United States Patent Application Publication US 2020/0163878 A1 - sequence listing, part 9

SEQ ID NO: 39787 - RNA, 1701 nt, Artificial Sequence
  derived and/or modified CDS sequence (wt) from hemagglutinin__InfluenzaA__AET10095
augaagacuaucauugcuuugagcuacauucuaugucugguuuucgcucaaaaacuuccuggaaaugacaacagcacggcaacgcugugccuugggcaccaugcaguaccaaacggaacgauagugaaaacaaucacgaaugaccaaauugaaguuacuaaugcuacugagcugguucagaguuccucaacaggugaaauaugcgacaguccucaucagauccuugauggagaaaacugcacacuaauagaugcucuauugggagacccucagugugauggcuuccaaaauaagaaaugggaccuuuuuguugaacgaagcaaagccuacagcaacuguuacccuuaugaugugccggauuaugccucccuuaggucacuaguugccucauccggcacacuggaguuuaacaaugaaagcuucaauuggacuggagucacucaaaacggaacaagcucugcuugcauaaggagaucuaauaauaguuucuuuaguagauugaauugguugacccacuuaaacuucaaauacccagcauugaacgugacuaugccaaacaaugaacaauuugacaaauuguacauuugggggguucaccacccggguacugacaaggaccaaaucuuccuguaugcucaagcaucaggaagaaucacaguaucuaccaaaagaagccaacaagcuguaaucccgaauaucggaucuagacccagaguaaggaauaucccuagcagaauaagcaucuauuggacaauaguaaaaccgggagacauacuuuugauuaacagcacagggaaucuaauugcuccuagggguuacuucaaaauacgaagugggaaaagcucaauaaugagaucagauacacccauuggcaaaugcaauucugaaugcaucacuccaaauggaagcauucccaaugacaaaccauuccaaaauguaaacaggaucacauacggggccugucccagauauguuaagcaaaacacucugaaauuggcaacaggaaugcgaaauguaccagagaaacaaacuagaggcauauuuggcgcaauagcggguuucauagaaaaugguugggagggaaugguggaugguugguacgguuucaggcaucaaaauucugagggaagaggacaagcagcagaucucaaaagcacucaagcagcaaucgaucaaaucaaugggaagcugaauagauugaucgggaaaaccaacgagaaauuccaucagauugaaaaagaauucucagaagucgaagggagaauucaagaccuugagaaauauguugaggacacuaaaauagaucucuggucauacaacgcggagcuucuuguugcccuggagaaccaacauacaauugaucuaacugacucagaaaugaacaaacuguuugaaaaaacaaagaagcaacugagggaaaaugcugaggauaugggcaaugguuguuucaaaauauaccacaaaugcgacaaugccugcauagaaucaaucagaaauggaacuuaugaccacgauguauacagagaugaagcauuaaacaaccgguuccagaucaagggaguugagcugaagucaggguacaaagauuggauccuauggauuuccuuugccauaucauguuuuuugcuuuguguugcuuuguugggguucaucaugugggccugccaaaaaggcaacauuaggugcaacauuugcauuuga

SEQ ID NO: 39788 - RNA, 1701 nt, Artificial Sequence
  derived and/or modified CDS sequence (wt) from hemagglutinin__InfluenzaA__AET10096
augaagacuaucauugcuuugagcuacauucuaugucugguuuucgcucaaaaauuuccuggaaaugacaacagcacggcaacgcugugccuugggcaccaugcaguaccaaacggaacgauagugaaaacaaucacgaaugaccaaauugaaguuacuaaugcuacugagcugguucagaauuccucaacaggugaaauaugcgacaguccucaucagaucauugauggagaaaacugcacacuaauagaugcucuauugggagacccucagugugauggcuuccaaaauaagaaauggaaccuuuuuguugaacgaagcaaagccuacagcaacuguuacccuuaugaugugccggauuaugccucccuuaggucacuaguugccucauccggcacacuggaguuuaacaaugaaagcuucaauuggacuggagucacucaaaacggaacaagcucugcuugcauaaggagaucuaauaauaguuucuuuaguagauugaauugguugacccacuuaaacuucaaauacccagcauugaacgugacuaugccaaacaaugaacaauuugacaaauuguacauuugggggguucaccacccggguacggacaaggaccaaaucuuccuguaugcucaggcaucaggaagaaucacaguaucuaccaaaagaagccaacaagcuguaaucccgaauaucggaucuagacccagaguaaggaauaucccuagcagaauaagcaucuauuggacaauaguaaaaccgggagacauacuuuugauuaacagcacagggaaucuaauugcuccuagggguuacuucaaaauacgaagugggaaaagcucaauaaugagaucagaugcacccauuggcaaauguaauucugaaugcaucacuccaaauggaagcauucccaaugacaaaccauuccaaaauguaaacaggaucacauacggggccugucccagauauguuaagcaaaacacucugaaauuggcaacaggaaugcgaaauguaccagagaaacaaacuagaggcauauuuggcgcaauagcggguuucauagaaaaugguugggagggaaugguggaugguugguacgguuucaggcaucaaaauucugagggaagaggacaagcagcagaucucaaaagcacucaagcagcaaucgaucaaaucaaugggaagcugaauagauugaucgggaaaaccaacgagaaauuccaucagauugaaaaagaauucucagaagucgaagggagaauucaggaccuugagaaauauguugaggacacuaaaauagaucucuggucauacaacgcggagcuucuuguugcccuggagaaccaacauacaauugaucuaacugacucagaaaugaacaaacuguuugaaaaaacaaagaagcaacugagggaaaaugcugaggauaugggcaaugguuguuucaaaauauaccacaaaugugacaaugccugcauaggaucaaucagaaauggaacuuaugaccacgauguauacagagaugaagcauuaaacaaccgguuccagaucaagggaguugagcugaagucaggguacaaagauuggauccuauggauuuccuuugccauaucauguuuuuugcuuuguguugcuuuguugggguucaucaugugggccugccaaaaaggcaacauuaggugcaacauuugcauuuga

SEQ ID NO: 39789 - RNA, 1701 nt, Artificial Sequence
  derived and/or modified CDS sequence (wt) from hemagglutinin__InfluenzaA__AET10098
augaagacuaucauugcuuugagcuacauucuaugucugguuuucgcucaaaaauuuccuggaaaugacaacagcacggcaacgcugugccuugggcaccaugcaguaccaaacggaacgauagugaaaacaaucacgaaugaccaaauugaaguuacuaaugcuacugagcugguucagaauuccucaacaggugaaauaugcgacaguccucaucagaucauugauggagaaaacugcacacuaauagaugcucuauugggagacccucagugugauggcuuccaaaauaagaaaugggaccuuuuuguugaacgaagcaaagccuacagcaacuguuacccuuaugaugugccggauuaugccucccuuaggucacuaguugccucauccggcacacuggaguuuaacaaugaaaguuucaauuggacuggagucacucaaaacggaacaagcucugcuugcauaaggagaucuaauaauaguuucuuuaguagauugaauugguugacccacuuaaacuucaaauacccagcauugaacgugacgaugccaaacaaugaacaauuugacaaauuguacauuugggggguucaccacccggguacggacaaggaccaaaucuuccuguaugcucaagcaucaggaagaaucacaguaucuaccaaaagaagccaacaagcuguaaucccgaauaucggaucuagacccagaguaaggaauaucccuagcagaauaagcaucuauuggacaauaguaaaaccgggagacauacuuuugauuaacagcacagggaaucuaauugcuccuagggguuacuucaaaauacgaagugggaaaagcucaauaaugagaucagaugcacccauuggcaaaugcaauucugaaugcaucacuccaaauggaagcauucccaaugacaaaccauuccaaaauguaaacaggaucacauacggggccugucccagauauguuaagcaaaacacucugaaauuggcaacaggaaugcgaaauguaccagagaaacaaacuagaggcauauuuggcgcaauagcggguuucauagaaaaugguugggagggaaugguggaugguugguacgguuucaggcaucaaaauucugagggaagaggacaagcagcagaucucaaaagcacucaagcagcaaucgaucaaaucaaugggaagcugaauagauugaucgggaaaaccaacgagaaauuccaucagauugaaaaagaauucucagaagucgaagggagaauucaggaccuugagaaauauguugaggacacuaaaauagaucucuggucauacaacgcggagcuucuuguugcccuggagaaccaacauacaauugaucuaacugacucagaaaugaacaaacuguuugaaaaaacaaagaagcaacugagggaaaaugcugaggauaugggcaaugguuguuucaaaauauaccacaaaugugacaaugccugcauaggaucaaucagaaauggaacuuaugaccacgauguauacagagaugaagcauuaaacaaccgguuccagaucaagggaguugagcugaagucaggguacaaagauuggauccuauggauuuccuuugccauaucauguuuuuugcuuuguguugcuuuguugggguucaucaugugggccugccaaaaaggcaacauuaggugcaacauuugcauuuga

SEQ ID NO: 39790 - RNA, 1701 nt, Artificial Sequence
  derived and/or modified CDS sequence (wt) from hemagglutinin__InfluenzaA__AET10099
augaagacuaucauugcuuugagcuacauucuaugucugguuuucgcucaaaaacuuccuggaaaugacaacagcacggcaacgcugugccuugggcaccaugcagugccaaacggaacgauagugaaaacaaucacgaaugaccaaauugaaguuacuaaugcuacugagcugguucagaguuccucaacaggugaaauaugcaacaguccucaucagauccuugauggagaaaacugcacacuaauagaugcucuauugggagacccucagugugauggcuuccaaaacaagaaaugggaccuuuuuguugaacgaagcaaagcccacagcaacuguuacccuuaugaugugccggauuaugccucccuuaggucacuaguugccucauccggcacacuggaguuuaacaaugaaagcuucaauuggacuggagucacucaaaacggaacaagcucugcuugcauaaggagaucuaauaauaguuucuuuaguagauugaauugguugacccacuuaaacuucaaauacccagcauugaacgugacuaugccaaacaaugaacaauuugacaaauuguacauuugggggguucaccacccggguacggacaaggaccaaauauuccuguaugcucaagcagcaggaagaaucacaguaucuaccaaaagaagccaacaagcuguaauuccgaauaucggaucuagacccagaguaaggaauaucccuagcagaguaagcaucuauuggacaauaguaaaaccgggagacauacuuuugauuaacagcacagggaaucuaauugcuccuagggguuacuucaaaauacgaagugggaaaagcucaauaaugagaucagaugcacccauuggcaaaugcaauucugcaugcaucacuccaaauggaagcauucccaaugacaaaccauuccaaaauguaaacaggaucacauacggggccugucccagauauguuaagcaaaacacucugaaauuggcaacaggaaugagaaauguaccagagaaacaaacuagaggcauauuuggcgcaauagcugguuucauagaaaaugguugggagggaaugguggaugguugguacgguuucaggcaucaaaauucugagggaaggggacaagcagcagaucucaaaagcacucaagcagcaaucgaucaaaucaaugggaagcugaauagauugaucgggaaaaccaacgagaaauuccaucagauugaaaaagaauucucagaagucgaagggagaauucaggaccuugagaaauauguugaggacacuaaaauagaucucuggucauacaacgcggagcuucuuguugcccuggagaaccaacacacaauugaucuaacugacucagaaaugaacaaacuguuugaaaaaacaaagaagcaacugagggaaaaugcugaggauaugggcaaugguuguuucaaaauauaccacaaaugugacaaugccugcauaggaucaaucagaaauggaacuuaugaccacgauguguacagagaugaagcauuaaacaaccgauuccagaucaagggaguugagcugaagucaggguacaaagauuggauccuauggauuuccuuugccauaucauguuuuuugcuuuguguugcuuuguugggguucaucaugugggccugccaaaaaggcaacauuaggugcaacauuugcauuuga

SEQ ID NO: 39791 - RNA, 1701 nt, Artificial Sequence
  derived and/or modified CDS sequence (wt) from hemagglutinin__InfluenzaA__AET10100
augaagacuaucauugcuuugagcuacauucuaugucugguuuucgcucaaaaacuuccuggaaaugacaacagcacggcaacgcugugccuugggcaccaugcagugccaaacggaacgauagugaaaacaaucacgaaugaccaaauugaaguuacuaaugcuacugagcugguucagaguuccucaacaggugaaauaugcaacaguccucaucagauccuugauggagaaaacugcacacuaauagaugcucuauugggagacccucagugugauggcuuccaaaacaagaaaugggaccuuuuuguugaacgaagcaaagcccacagcaacuguuacccuuaugaugugccggauuaugccucccuuaggucacuaguugccucauccggcacacuggaguuuaacaaugaaagcuucaauuggacuggagucacucaaaacggaacaagcucugcuugcauaaggagaucuaauaauaguuucuuuaguagauugaauugguugacccacuuaaacuucaaauacccagcauugaacgugacuaugccaaacaaugaacaauuugacaaauuguacauuugggggguucaccacccggguacggacaaggaccaaaucuuccuguaugcucaagcaucaggaagaaucacaguaucuaccaaaagaagccaacaagcuguaauuccgaauaucggaucuagacccagaguaaggaauaucccuagcagaguaagcaucuauuggacaauaguaaaaccgggagacauacuuuugauuaacagcacagggaaucuaauugcuccuagggguuacuucaaaauacgaagugggaaaagcucaauaaugagaucagaugcacccauuggcaaaugcaauucugcaugcaucacuccaaauggaagcauucccaaugacaaaccauuccaaaauguaaacaggaucacauacggggccugucccagauauguuaagcaaaacacucugaaauuggcaacaggaaugagaaauguaccagagaaacaaacuagaggcauauuuggcgcaauagcggguuucauagaaaaugguugggagggaaugguggaugguugguacgguuucaggcaucaaaauucugagggaaggggacaagcagcagaucucaaaagcacucaagcagcaaucgaucaaaucaaugggaagcugaauagauugaucgggaaaaccaacgagaaauuccaucagauugaaaaagaauucucagaagucgaagggagaauucaggaccuugagaaauauguugaggacacuaaaauagaucucuggucauacaacgcggagcuucuuguugcccuggagaaccaacacacaauugaucuaacugacucagaaaugaacaaacuguuugaaaaaacaaagaagcaacugagggaaaaugcugaggauaugggcaaugguuguuucaaaauauaccacaaaugugacaaugccugcauaggaucaaucagaaauggaacuuaugaccacgauguguacagagaugaagcauuaaacaaccgauuccagaucaaaggaguugagcugaagucaggguacaaagauuggauccuauggauuuccuuugccauaucauguuuuuugcuuuguguugcuuuguugggguucaucaugugggccugccaaaaaggcaacauuaggugcaacauuugcauuuga

SEQ ID NO: 39792 - RNA, 1701 nt, Artificial Sequence
  derived and/or modified CDS sequence (wt) from hemagglutinin__InfluenzaA__AET10101
augaagacuaucauugcuuugagcugcauucuaugucugguuuucgcucaaaagcuuccuggaaaugacaacagcacggcaacgcugugccuugggcaccaugcaguaccaaacggaacgauagugaaaacaaucacgaaugaccaaauugaaguuacuaaugcuacugagcugguccagaguuccucaacaggugaaauaugcgacaguccucaucagauccuugauggagaaaacugcacacuaauagaugcucuauugggagacccucagugugauggcuuccaaaauaagaaaugggaccuuuuuguugaacgaagcaaagccuacagcaacuguuacccuuaugaugugccggauuaugccucccuuaggucacuaguugccucauccggcacacuggaguuuaacaaugaaagcuucaauuggacuggagucacucaaaacggaacaagcucugcuugcauaaggagaucuaauaauaguuucuuuaguagauugaauugguugacccacuuaaacuucaaauacccagcauugaacgugacuaugccaaacaaugaacaauuugacaaauuguacauuugggggguucaccacccgggugcggacaaggaccaaaucuuccuguaugcucaagcaucaggaagaaucacaguaucuaccaaaagaagccaacaagcuguaaucccgaauaucggaucuagacccagaguaaggaauaucccuagcagaauaagcaucuauuggacaauaguaaaaccgggagacauacuuuugauuaacagcacagggaaucuaauugcuccuagggguuacuucaaaauacgaagugggaaaagcucaauaaugagaucagaugcacccauuggcaaaugcaauucugaaugcaucacuccaaauggaagcauucccaaugacaaaccauuccaaaauguaaacaggaucacauacggggccugucccagauauguuaagcaaagcacucugaaauuggcaacaggaaugcgaaauguaccagagaaacaaacuagaggcauauuuggcgcaauagcggguuucauagaaaaugguugggagggaaugguggaugguugguacgguuucaggcaucaaaauucugagggaagaggacaagcagcagaucucaaaagcacucaagcagcaaucgaucaaaucaaugggaagcugaauagauugaucgggaaaaccaacgagaaauuccaucagauugaaaaagaauucucagaagucgaagggagaauucaggaccuugagaaauauguugaggacacuaaaauagaucucuggucauacaacgcggagcuucuuguugcccuggagaaccaacauacaauugaucuaacugacucagaaaugaacaaacuguuugaaaaaacaaagaagcaacugagggaaaaugcugaggauaugggcaaugguuguuucacaauauaccacaaaugugacaaugccugcauaggaucaaucagaaauggaacuuaugaccacaauguauacagagaugaagcauuaaacaaccgguuccagaucaagggaguugagcugaagucaggguacaaagauuggauccuauggauuuccuuugccauaucauguuuuuugcuuuguguugcuuuguugggguucaucaugugggccugccaaaaaggcaacauuaggugcaacauuugcauuuga

SEQ ID NO: 39793 - RNA, 1701 nt, Artificial Sequence
  derived and/or modified CDS sequence (wt) from hemagglutinin__InfluenzaA__AET10102
augaagacuaucauugcuuugagcuacauucuaugucugguuuucacucaaaaacuuccuggaaaugacaacagcacggcaacgcugugccuugggcaccaugcaguaccaaacgggacgauagugaaaacaaucacgaaugaccaaauugaaguuacuaaugcuacugagcugguucagaguuccucaacaggugaaauaugcgacaguccccaucagauccuugauggaaaaaacugcacacuaauagaugcccuauugggagacccucagugugauggcuuccaaaauaagaaaugggaccuuuuuguugaacgcagcaaagccuacagcaacuguuacccuuuugaugugccggauuaugccucccuuaggucacuaguugccucauccggcacacuggaguuuaacaaugaaagcuucaauuggacuggagucacucaaaacggaacaagcucugcuugcaugaggagaucuaaaagcaguuucuuuaguagauugaauugguugacccacuuaaacuucaaauacccagcauugaacgugacuaugccaaacgaugaacaauuugacaaauuguacauuugggggguucaccacccggguacggacaaagaccaaaucuuccuguaugcucaagcaucaggaagaaucacagucucuaccaaaagaagccaacaaacuguaaucccgaauaucggaucuagacccagaauaaggaauaucccuagcagaauaagcaucuauuggacaauaguaaaaccgggagacauacuuuugauuaacagcacagggaaucuaauugcuccuagggguuacuucaaaauacgaagugggaaaagcucaauaaugagaucagaugcacccauuggcaaaugcaacucugaaugcaucacuccaaauggaagcauucccaaugacaaaccauuccaaaauguaaacaggaucacauacggggccugucccagauauguuaagcaaaacacucugaaauuggcaacagggaugcgaaauguaccagagaaacaaacuagaggcauauuuggcgcaaucgcagguuucauagaaaaugguugggagggaaugguggaugguugguacgguuucaggcaucaaaauucugagggaagaggacaagcagcagaucucaaaagcacucaagcagcaaucgaucaaaucaaugggaagcugaauagauugaucgggagaaccaacgagaaauuccaucagauugaaaaagaauucucagaagucgaagggagaauucaggaccuugagaaauauguugaggacacuaaaauagaucucuggucauacaacgcggagcuucuuguugcccuggagaaccaacauacaauugaucuaacugacucagaaaugaacaaacuguuugaaaaaacaaggaagcaacugagggaaaaugcugaggauaugggcaaugguuguuucaaaauauaccacaaaugugacaaugccugcauaggaucaaucagaaauggaacuuaugaccacgauguauacagagaugaagcauuaaacaaccgguuucagaucaagggaguugagcugaagucaggguacaaagauuggauccuauggauuuccuuugccauaucauguuuuuugcuuuguguugcuucguugggguucaucaugugggccugccaaaaaggcaacauuaggugcaacauuugcauuuga

SEQ ID NO: 39794 - RNA, 1701 nt, Artificial Sequence
  derived and/or modified CDS sequence (wt) from hemagglutinin__InfluenzaA__AET10103
augaagacuaucauugcuuugagcuacauucuaugucugguuuucgcucaaaaacuuccuggaaaugacaacagcacggcaacgcugugccuugggcaccaugcaguaccaaacggaacgauagugaaaacaaucacgaaugaccaaauugaaguuacuaaugcuacugagcugguucagaauuccucaacaggugaaauaugcgacaguccucaucagauccuugauggagaaaacugcacacuaauagaugcucuauugggagacccucagugugauggcuuccaaaauaagaaaugggaccuuuuuguugaacgaagcaaagccuacagcaacuguuacccuuaugaugugccggauuaugccucccuuaggucacuaguugccucauccggcacacuggaguuuaacaaugaaagcuucaauuggacuggagucacucaaaacggaacaagcucugcuugcauaaggagaucuaauaauaguuucuuuaguagauugaauugguugacccacuuaaacuucaaauacccagcauugaacgugacuaugccaaacaaugaacaauuugacaaauuguacauuugggggguucaccacccggguacggacaaggaccaaaucuuccuguaugcucaagcaucaggaagaaucacaguaucuaccaaaagaagccaacaagcuguaaucccgaauaucggaucuagacccagaguaaggaauaucccuagcagaauaagcaucuauuggacaauaguaaaaccgggagacauacuuuugauuaacagcacagggaaucuaauugcuccuagggguuacuucaaaauacgaagugggaaaagcucaauaaugagaucagaugcacccauuggcaaaugcaauucggaaugcaucacuccaaauggaagcauucccaaugacaaaccauuccaaaauguaaacaggaucacauacggggccugucccagauauguuaagcaaaacacucugaaauuggcaacaggaaugcgaaauguaccagagaaacaaacuagaggcauauuuggcgcaauagcagguuucauagaaaaugguugggagggaaugguggaugguugguacgguuucaggcaucaaaauucugagggaagaggacaagcagcagaucucaaaagcacucaagcagcaaucgaucaaaucaaugggaagcugaauagauugaucgggaaaaccaacgagaaauuccaucagauugaaaaagaauucucagaagucgaagggagaauucaggaccuugagaaauauguugaggacacuaaaauagaucucuggucauacaacgcggagcuucuuguugcccuggagaaccaacauacaauugaucuaacugacucagaaaugaacaaacuguuugaaaaaacaaagaagcaacugagggaaaaugcugaggauaugggcaaugguuguuucaaaauauaccacaaaugugacaaugccugcauaggaucaaucagaaauggaacuuaugaccacgauguauacagagaugaagcauuaaacaaccgguuccagaucaagggaguugagcugaagucaggguacaaagauuggauccuauggauuuccuuugccauaucauguuuuuugcuuuguguugcuuuguugggguucaucaugugggccugccaaaaaggcaacauuagaugcaacauuugcauuuga

SEQ ID NO: 39795 - RNA, 1701 nt, Artificial Sequence
  derived and/or modified CDS sequence (wt) from hemagglutinin__InfluenzaA__AET10104
augaagacuaucauugcuuugagcuacauucuaugucugguuuucgcucaaaaauuuccuggaaaugacaacagcacggcaacgcugugccuugggcaccaugcaguaccaaacggaacgauagugaaaacaaucacgaaugaccaaauugaaguuacuaaugcuacugagcugguucagaauuccucaacaggugaaauaugcgacaguccucaucagaucauugauggagaaaacugcacacuaauagaugcucuauugggagacccucagugugauggcuuccaaaauaagaaaugggaccuuuuuguugaacgaagcaaagccuacagcaacuguuacccuuaugaugugccggauuaugccucccuuaggucacuaguugccucauccggcacacuggaguuuaacaaugaaagcuucaauuggacuggagucacucaaaacggaacaagcucugcuugcauaaggagaucuaauaauaguuucuuuaguagauugaauugguugacccacuuaaacuucaaauacccagcauugaacgugacuaugccaaacaaugaacaauuugacaaauuguacauuugggggguucaccacccggguacggacaaggaccaaaucuuccuguaugcucaggcaucaggaagaaucacaguaucuaccaaaagaagccaacaagcuguaaucccgaauaucggaucuagacccagaguaaggaauaucccuagcagaauaagcaucuauuggacaauaguaaaaccgggagacauacuuuugauuaacagcacagggaaucuaauugcuccuagggguuacuucaaaauacgaagugggaaaagcucaauaaugagaucagaugcacccauuggcaaaugcaauucugaaugcaucacuccaaauggaagcauucccaaugacaaaccauuccaaaauguaaacaggaucacauacggggccugucccagauauguuaagcaaaacacucugaaauuggcaacaggaaugcgaaauguaccagagaaacaaacuagaggcauauuuggcgcaauagcggguuucauagaaaaugguugggagggaaugguggaugguugguacgguuucaggcaucaaaauucugagggaagaggacaagcagcagaucucaaaagcacucaagcagcaaucgaucaaaucaaugggaaacugaauagauugaucgggaaaaccaacgagaaauuccaucagauugaaaaagaauucucagaagucgaagggagaauucaggaccuugggaaauauguugaggacacuaaaauagaucucuggucauacaacgcggagcuucuuguugcccuggagaaccaacauacaauugaucuaacugacucagaaaugaacaaacuguuugaaaaaacaaagaagcaacugagggaaaaugcugaggauaugggcaaugguuguuucaaaauauaccacaaaugugacaaugccugcauaggaucaaucagaaauggaacuuaugaccacgauguauacagagaugaagcauuaaacaaccgguuccagaucaagggaguugagcugaagucaggguacaaagauuggauccuauggauuuccuuugccauaucauguuuuuugcuuuguguugcuuuguugggguucaucaugugggccugccaaaaaggcaacauuaggugcaacauuugcauuuga

SEQ ID NO: 39796 - RNA, 1701 nt, Artificial Sequence
  derived and/or modified CDS sequence (wt) from hemagglutinin__InfluenzaA__AET10105
augaagacuaucauugcuuugagcuacauucuaugucugguuuucgcucaagaacuuccuggaaaugacaacagcacggcaacgcugugccuugggcaccaugcagugccaaacggaacgauagugaaaacaaucacgaaugaccaaauugaaguuacuaaugcuacugagcugguucagaguuccucaacaggugaaauaugcaacaguccucaucagauccuugauggagaaaacugcacacuaauagaugcucuauugggagacccucagugugauggcuuccaaaacaagaaaugggaccuuuuuguugaacgaagcaaagcccacagcaacuguuacccuuaugaugugccggauuaugccucccuuaggucacuaguugccucauccggcacacuggaguuuaacaaugaaagcuucaauuggacuggagucacucaaaacggaacaagcucugcuugcauaaggagaucuaauaauaguuucuuuaguagauugaauugguugacccacuuaaacuucaaauacccagcauugaacgugacuaugccaaacaaugaacaauuugacaaauuguacauuugggggguucaccacccggguacggacaaggaccaaauauuccuguaugcucaagcagcaggaagaaucacaguaucuaccaaaagaagccaacaagcuguaauuccgaauaucggaucuagacccagaguaaggaauaucccuagcagaguaagcaucuauuggacaauaguaaaaccgggagacauacuuuugauuaacagcacagggaaucuaauugcuccuagggguuacuucaaaauacgaagugggaaaagcucaauaaugagaucagaugcacccauuggcaaaugcaauucugcaugcaucacuccaaauggaagcauucccaaugacaaaccauuccaaaauguaaacaggaucacauacggggccugucccagauauguuaagcaaaacacucugaaauuggcaacaggaaugagaaauguaccagagaaacaaacuagaggcauauuuggcgcaauagcggguuucauagaaaaugguugggagggaaugguggaugguugguacgguuucaggcaucaaaauucugagggaaggggacaagcagcagaucucaaaagcacucaagcagcaaucgaucaaaucaaugggaagcugaauagauugaucgggaaaaccaacgagaaauuccaucagauugaaaaagaauucucagaagucgaagggagaauucaggaccuugagaaauauguugaggacacuaaaauagaucucuggucauacaacgcggagcuucuuguugcccuggagaaccaacacacaauugaucuaacugacucagaaaugaacaaacuguuugaaaaaacaaagaagcaacugagggaaaaugcugaggauaugggcaaugguuguuucaaaauauaccacaaaugugacaaugccugcauaggaucaaucagaaauggaacuuaugaccacgauguguacagagaugaagcauuaaacaaccgauuccagaucaagggaguugagcugaagucaggguacaaagauuggauccuauggauuuccuuugccauaucauguuuuuugcuuuguguugcuuuguugggguucaucaugugggccugccaaaaaggcaacauuaggugcaacauuugcauuuga

SEQ ID NO: 39797 - RNA, 1701 nt, Artificial Sequence
  derived and/or modified CDS sequence (wt) from hemagglutinin__InfluenzaA__AET10106
augaagacuaucauugcuuugagcuacauucuaugucugguuuucgcucaaaaacuuccuggaaauuacaacagcacggcaacgcugugccuugggcaccaugcagugccaaacggaacgauagugaaaacaaucacgaaugaccaaauugaaguuacuaaugcuacugagcugguucagaguuccucaacaggugaaauaugcaacaguccucaucagauccuugauggagaaaacugcacacuaauagaugcucuauugggagacccucagugugauggcuuccaaaacaagaaaugggaccuuuuuguugaacgaagcaaagcccacagcaacuguuacccuuaugaugugccggauuaugccucccuuaggucacuaguugccucauccggcacacuggaguuuaacaaugaaagcuucaauuggacuggagucacucaaaacggaacaagcucugcuugcauaaggagaucuaauaauaguuucuuuaguagauugaauugguugacccacuuaaacuucaaauacccagcauugaacgugacuaugccaaacaaugaacaauuugacaaauuguacauuugggggguucaccacccggguacggacaaggaccaaaucuuccuguaugcucaagcaucaggaagaaucacaguaucuaccaaaagaagccaacaagcuguaauuccgaauaucggaucuagacccagaguaaggaauaucccuagcagaguaagcaucuauuggacaauaguaaaaccgggagacauacuuuugauuaacagcacagggaaucuaauugcuccuagggguuacuucaaaauacgaagugggaaaagcucaauaaugagaucagaugcacccauuggcaaaugcaauucugcaugcaucacuccaaauggaagcauucccaaugacaaaccauuccaaaauguaaacaggaucacauacggggccugucccagauauguuaagcaaaacacucugaaauuggcaacaggaaugagaaauguaccagagaaacaaacuagaggcauauuuggcgcaauagcggguuucauagaaaaugguugggagggaaugguggaugguugguacgguuucaggcaucaaaauucugagggaaggggacaggcagcagaucucaaaagcacucaagcagcaaucgaucaaaucaaugggaagcugaauagauugaucgggaaaaccaacgagaaauuccaucagauugaaaaagaauucucagaagucgaagggagaauucaggaccuugagaaauauguugaggacacuaaaauagaucucuggucauacaacgcggagcuucuuguugcccuggagaaccaacacacaauugaucuaacugacucagaaaugaacaaacuguuugaaaaaacaaagaagcaacugagggaaaaugcugaggauaugggcaaugguuguuucaaaauauaccacaaaugugacaaugccugcauaggaucaaucagaaauggaacuuaugaccacgauguguacagagaugaagcauuaaacaaccgauuccagaucaagggaguugagcugaagucaggguacaaagauuggauccuauggauuuccuuugccauaucauguuuuuugcuuuguguugcuuuguugggguucaucaugugggccugccaaaaaggcaacauuaggugcaacauuugcauuuga

SEQ ID NO: 39798 - RNA, 1701 nt, Artificial Sequence
  derived and/or modified CDS sequence (wt) from hemagglutinin__InfluenzaA__AET10107
augaagacuaucauugcuuugagcuacauucuaugucugguuuucgcucaagaaauuccuggaaaugacaacagcacggcaacgcugugccuugggcaccaugcagugccaaacggaacgauagugaaaacaaucacgaaugaccaaauugaaguuacuaaugcuacugagcugguucagaguuccucaacaggugaaauaugcaacaguccucaucagauccuugauggagaaaacugcacacuaauagaugcucuauugggagacccucagugugauggcuuccaaaacaagaaaugggaccuuuuuguugaacgaagcaaagcccacagcaacuguuacccuuaugaugugccggauuaugccucccuuaggucacuaguugccucauccggcacacuggaguuuaacaaugaaagcuucaauuggacuggagucacucaaaacggaacaagcucugcuugcauaaggagaucuaauaauaguuucuuuaguagauugaauugguugacccacuuaaacuucaaauacccagcauugaacgugacuaugccaaacaaugaacaauuugacaaauuguacauuugggggguucaccacccggguacggacaaggaccaaaucuuccuguaugcucaagcaucaggaagaaucacaguaucuaccaaaagaagccaacaagcuguaauuccgaauaucggaucuagacccagaguaaggaauaucccuagcagaguaagcaucuauuggacaauaguaaaaccgggagacauacuuuugauuaacagcacagggaaucuaauugcuccuagggguuacuucaaaauacgaagugggaaaagcucaauaaugagaucagaugcacccauuggcaaaugcaauucugcaugcaucacuccaaauggaagcauucccaaugacaaaccauuccaaaauguaaacaggaucacauacggggccugucccagauauguuaagcaaaacacucugaaauuggcaacaggaaugagaaauguaccagagaaacaaacuagaggcauauuuggcgcaauagcggguuucauagaaaaugguugggagggaaugguggaugguugguacgguuucaggcaucaaaauucugagggaaggggacaagcagcagaucucaaaagcacucaagcagcaaucgaucaaaucaaugggaagcugaauagauugaucgggaaaaccaacgagaaauuccaucagauugaaaaagaauucucagaagucgaagggagaauucaggaccuugagaaauauguugaggacacuaaaauagaucucuggucauacaacgcggagcuucuuguugcccuggagaaccaacacacaauugaucuaacugacucagaaaugaacaaacuguuugaaaaaacaaagaagcaacugagggaaaaugcugaggauaugggcaaugguuguuucaaaauauaccacaaaugugacaaugccugcauaggaucaaucagaaauggaacuuaugaccacgauguguacagagaugaagcauuaaacaaccgauuccagaucaagggaguugagcugaagucaggguacaaagauuggauccuauggauuuccuuugccauaucauguuuuuugcuuuguguugcuuuguugggguucaucaugugggccugccaaaaaggcaacauuaagugcaacauuugcauuuga

SEQ ID NO: 39799 - RNA, 1701 nt, Artificial Sequence
  derived and/or modified CDS sequence (wt) from hemagglutinin__InfluenzaA__AET10108
augaagacuaucauugcuuugagcuacauucuaugucugguuuucgcucaaaaacuuccuggaaaugacaacagcacggcaacgcugugccuugggcaccaugcaguaccaaacgggacgauagugaaaacaaucacgaaugaccaaauugaaguuacuaaugcuacugagcugguccagaguuccucaacaggugaaauaugcgacaguccucaucagauccuugauggagaaaacugcacacuaauagaugcucuauugggagacccucagugugauggcuuccaaaauaagaaaugggaccuuuuuguugaacgaagcaaagccuacagcaacuguuacccuuaugaugugccggauuaugccucccuuaggucacuaguugccucauccggcacacuggaguuuaacaaugaaagcuucaauuggacuggagucacucaaaacggaacaagcucugcuugcauaaggagaucuaauaauaguuucuuuaguagauugaauugguugacccacuuaaacuucaaauacccagcauugaacgugacuaugccaaacaaugaacaauuugacaaauuguacauuugggggguucaccacccggguacggacaaggaccaaaucuuccuguaugcucaagcaucaggaagaaucacaguaucuaccaaaagaagccaacaagcuguaaucccgaauaucggaucuagacccagaguaaggaauaucccuagcagaauaagcaucuauuggacaauaguaaaaccgggagacauacuuuugauuaacagcacagggaaucuaauugcuccuagggguuacuucaaaauacgaagugggaaaagcucaauaaugagaucagaugcacccauuggcaaaugcaauucugaaugcaucacuccaaauggaagcauucccaaugacaaaccauuccaaaauguaaacaggaucacauacggggccugucccagauauguuaagcaaaacacucugaaauuggcaacaggaaugagaaauguaccagagaaacaaacuagaggcauauuuggcgcaauagcggguuucauagaaaaugguugggagggaaugguggaugguugguacgguuucaggcaucaaaauucugagggaaggggacaagcagcagaucucaaaagcacucaagcagcaaucgaucaaaucaaugggaagcugaauagauugaucgggaaaaccaacgagaaauuccaucagauugaaaaagaauucucagaagucgaagggagaauucaggaccuugagaaauauguugaggacacuaaaauagaucucuggucauacaacgcggagcuucuuguugcccuggagaaccaacacacaauugaucuaacugacucagaaaugaacaaacuguuugaaaaaacaaagaagcaacugagggaaaaugcugaggauaugggcaaugguuguuucaaaauauaccacaaaugugacaaugccugcauaggaucaaucagaaauggaacuuaugaccacgauguguacagagaugaagcauuaaacaaccgauuccagaucaagggaguugagcugaagucaggguacaaagauuggauccuauggauuuccuuugccauaucauguuuuuugcuuuguguugcuuuguugggguucaucaugugggccugccaaaaaggcaacauuaggugcaacauuugcauuuga

SEQ ID NO: 39800 - RNA, 1701 nt, Artificial Sequence
  derived and/or modified CDS sequence (wt) from hemagglutinin__InfluenzaA__AET10109
augaagacuaucauugcuuugagcuacauucuaugucugguuuucgcucaaaaacuuccuggaaaugacaacagcacggcaacgcugugccuugggcaccaugcagugccaaacggaacgauagugaaaacaaucacgaaugaccaaauugaaguuacuaaugcuacugagcugguucagaguuccucaacaggugaaauaugcaacaguccucaucagauccuugauggagaaaacugcacacuaauagaugcucuauugggagacccucagugugauggcuuccaaaacaagaaaugggaccuuuuuguugaacgaagcaaagcccacagcaacuguuacccuuaugaugugccggauuaugccucccuuaggucacuaguugccucauccggcacacuggaguuuaacaaugaaagcuucaauuggacuggagucacucaaaacggaacaagcucugcuugcauaaggagaucuaauaauaguuucuuuaguagauugaauugguugacccauuuaaacuucaaauacccagcauugaacgugacuaugccaaacaaugaacaauuugacaaauuguacauuugggggguucaccacccggguacggacaaggaccaaaucuuccuguaugcucaagcaucaggaagaaucacaguaucuaccaaaagaagccaacaagcuguaauuccgaauaucggaucuagacccagaguaaggaauaucccuagcagaguaagcaucuauuggacaauaguaaaaccgggagacauacuuuugauuaacagcacagggaaucuaauugcuccuagggguuacuucaaaauacgaagugggaaaagcucaauaaugagaucagaugcacccauuggcaaaugcaauucugcaugcaucacuccaaauggaagcauucccaaugacaaaccauuccaaaauguaaacaggaucacauacggggccugucccagauaugucaagcaaaacacucugaaauuggcaacaggaaugagaaauguaccagagaaacaaacuagaggcauauuuggcgcaauagcggguuucauagaaaaugguugggagggaaugguggaugguugguacgguuucaggcaucaaaauucugagggaaggggacaggcagcagaucucaaaagcacucaagcagcaaucgaucaaaucaaugggaagcugaauagauugaucgggaaaaccaacgagaaauuccaucagauugaaaaagaauucucagaagucgaagggagaauucaggaccuugagaaauauguugaggacacuaaaauagaucucuggucauacaacgcggagcuucuuguugcccuggagaaccaacacacaauugaucuaacugacucagaaaugaacaaacuguuugaaaaaacaaagaagcaacugagggaaaaugcugaggauaugggcaaugguuguuucaaaauauaccacaaaugugacaaugccugcauaggaucaaucagaaauggaacuuaugaccacgauguguacagagaugaagcauuaaacaaccgauuccagaucaagggaguugagcugaagucaggguacaaagauuggauccuauggauuuccuuugccauaucauguuuuuugcuuuguguugcuuuguugggguucaucaugugggccugccaaaaaggcaacauuaggugcaacauuugcauuuga

SEQ ID NO: 39801 - RNA, 1701 nt, Artificial Sequence
  derived and/or modified CDS sequence (wt) from hemagglutinin__InfluenzaA__AET10110
augaagacuaucauugcuuugagcuacauucuaugucugguuuucgcucaaaaacuuccuggaaaugacaacagcacggcaacgcugugccuugggcaccaugcaguaccaaacggaacgauagugaaaacaaucacgaaugaccaaauugaaguuacuaaugcuacugagcugguucagaguuccucaacaggugaaauaugcaacaguccucaucagauccuugauggagaaaacugcacacuaauagaugcucuauugggagacccucagugugauggcuuccaaaauaagaaaugggaccuuuuuguugaacgaagcaaagccuacagcaacuguuacccuuaugaugugccggauuaugccucccuuaggucacuaguugccucauccggcacacuggaguuuaacaaugaaagcuucaauuggacuggagucacucaaaacggaacaagcucugcuugcauaaggagaucuaauaauaguuucuuuaguagauugaauugguugacccacuuaaacuucaaauacccagcauugaacgugacuaugccaaacaaugaacaauuugacaaauuguacauuugggggguucaccacccggguacggacaaggaccaaaucuuccuguaugcucaagcaucaggaagaaucacaguaucuaccaaaagaagccaacaagcuguaauuccgaauaucggaucuagacccagaguaaggaauaucccuagcagaguaagcaucuauuggacaauaguaaaaccgggagacauacuuuugauuaacagcacagggaaucuaauugcuccuagggguuacuucaaaauacgaagugggaaaagcucaauaaugagaucagaugcacccauuggcaaaugcaauucugcaugcaucacuccaaauggaagcauucccaaugacaaaccauuccaaaauguaaacaggaucacauacggggccugucccagauaugucaagcaaaacacucugaaauuggcaacaggaaugagaaauguaccagagaaacaaacuagaggcauauuuggcgcaauagcggguuucauagaaaaugguugggagggaaugguggaugguugguacgguuucaggcaucaaaauucugagggaaggggacaggcagcagaucucaaaagcacucaagcagcaaucgaucaaaucaaugggaagcugaauagauugaucgggaaaaccaacgagaaauuccaucagauugaaaaagaauucucagaagucgaagggagaauucaggaccuugagaaauauguugaggacacuaaaauagaucucuggucauacaacgcggagcuucuuguugcccuggagaaccaacacacaauugaucuaacugacucagaaaugaacaaacuguuugaaaaaacaaagaagcaacugagggaaaaugcugaggauaugggcaaugguuguuucaaaauauaccacaaaugugacaaugccugcauaggaucaaucagaaauggaacuuaugaccacgauguguacagagaugaagcauuaaacaaccgauuccagaucaagggaguugagcugaagucaggguacaaagauuggauccuauggauuuccuuugccauaucauguuuuuugcuuuguguugcuuuguugggguucaucaugugggccugccaaaaaggcaacauuaagugcaacauuugcauuuga

SEQ ID NO: 39802 - RNA, 1701 nt, Artificial Sequence
  derived and/or modified CDS sequence (wt) from hemagglutinin__InfluenzaA__AET10111
augaagacuaucauugcuuugagcuacauucuaugucugguuuucgcucaagaaauuccuggaaaugacaacagcacggcaacgcugugccuugggcaccaugcagugccaaacggaacgauagugaaaacaaucacgaaugaccaaauugaaguuacuaaugcuacugagcugguucagaguuccucaacaggugaaauaugcaacaguccucaucagauccuugauggagaaaacugcacacuaauagaugcucuauugggagacccucagugugauggcuuccaaaacaagaaaugggaccuuuuuguugaacgaagcaaagcccacagcaacuguuacccuuaugaugugccggauuaugccucccuuaggucacuaguugccucauccggcacacuggaguuuaacaaugaaagcuucaauuggacuggagucacucaaaacggaacaagcucugcuugcauaaggagaucuaauaauaguuucuuuaguagauugaauugguugacccacuuaaacuucaaauacccagcauugaacgugacuaugccaaacaaugaacaauuugacaaauuguacauuugggggguucaccacccggguacggacaaggaccaaaucuuccuguaugcucaagcaucaggaagaaucacaguaucuaccaaaagaagccaacaagcuguaauuccgaauaucggaucuagacccagaguaaggaauaucccuagcagaguaagcaucuauuggacaauaguaaaaccgggagacauacuuuugaguaacagcacagggaaucuaauugguccuagggguuacuucaaaauacgaagugggaaaagcucaauaaugagaucagaugcacccauuggcaaaugcaauucugcaugcaucacuccaaauggaagcauucccaaugacaaaccauuccaaaauguaaacaggaucacauacggggccugucccagauaugucaagcaaaacacucugaaauuggcaacaggaaugagaaauguaccagagaaacaaacuagaggcauauuuggcgcaauagcggguuucauagaaaaugguugggagggaaugguggaugguugguacgguuucaggcaucaaaauucugagggaaggggacaggcagcagaucucaaaagcacucaagcagcaaucgaucaaaucaaugggaagcugaauagauugaucgggaaaaccaacgagaaauuccaucagauugaaaaagaauucucagaagucgaagggagaauucaggaccuugagaaauauguugaggacacuaaaauagaucucuggucauacaacgcggagcuucuuguugcccuggagaaccaacacacaauugaucuaacugacucagaaaugaacaaacuguuugaaaaaacaaagaagcaacugagggaaaaugcugaggauaugggcaaugguuguuucaaaauauaccacaaaugugacaaugccugcauaggaucaaucagaaauggaacuuaugaccacgauguguacagagaugaagcauuaaacaaccgauuccagaucaagggaguugagcugaagucaggguacaaagauuggauccuauggauuuccuuugccauaucauguuuuuugcuuuguguugcuuuguugggguucaucaugugggccugccaaaaaggcaacauuaggugcaacauuugcauuuga

SEQ ID NO: 39803 - RNA, 1701 nt, Artificial Sequence
  derived and/or modified CDS sequence (wt) from hemagglutinin__InfluenzaA__AET10113
augaagacuaucauugcuuugagcuacauucuaugucugguuuucgcucaagaacuuccuggaaaugacaacagcacggcaacgcugugccuugggcaccaugcagugcaaaacggaacgauagugaaaacaaucacgaaugaccaaauugaaguuacuaaugcuacugagcugguucagaguuccucaacaggugaaauaugcaacaguccucaucagauccuugauggagaaaacugcacacuaauagaugcucuauugggagacccucagugugauggcuuccaaaacaagaaaugggaccuuuuuguugaacgaagcaaagcccacagcaacuguuacccuuaugaugugccggauuaugccucccuuaggucacuaguugccucauccggcacacuggaguuuaacaaugaaagcuucaauuggacuggagucacucaaaacggaacaagcucugcuugcauaaggagaucuaauaauaguuucuuuaguagauugaauugguugacccacuuaaacuucaaauacccagcauugaacgugacuaugccaaacaaugaacaauuugacaaauuguacauuugggggguucaccacccggguacggacaaggaccaaaucuuccuguaugcucaagcaucaggaagaaucacaguaucuaccaaaagaagccaacaagcuguaauuccgaauaucggaucuagacccagaguaaggaauaucccuagcagaguaagcaucuauuggacaauaguaaaaccgggagacauacuuuugauuaacagcacagggaaucuaauugcuccuagggguuacuucaaaauacgaagugggaaaagcucaauaaugagaucagaugcacccauuggcaaaugcaauucugcaugcaucacuccaaauggaagcauucccaaugacaaaccauuccaaaauguaaacaggaucacauacggggccugucccagauaugucaagcaaaacacucugaaauuggcaacaggaaugagaaauguaccagagaaacaaacuagaggcauauuuggcgcaauagcggguuucauagaaaaugguugggagggaaugguggaugguugguacgguuucaggcaucaaaauucugagggaaggggacaggcagcagaucucaaaagcacucaagcagcaaucgaucaaaucaaugggaagcugaauagauugaucgggaaaaccaacgagaaauuccaucagauugaaaaagaauucucagaagucgaagggagaauucaggaccuugagaaauauguugaggacacuaaaauagaucucuggucauacaacgcagagcuucuuguugcccuggagaaccaacacacaauugaucuaacugacucagaaaugaacaaacuguuugaaaaaacaaagaagcaacugagggaaaaugcugaggauaugggcaaugguuguuucaaaauauaccacaaaugugacaaugccugcauaggaucaaucagaaauggaacuuaugaccacgauguguacagagaugaagcauuaaacaaccgauuccagaucaagggaguugagcugaagucaggguacaaagauuggaucuuauggauuuccuuugccauaucauguuuuuugcuuuguguugcuuuguugggguucaucaugugggccugccaaaaaggcaacauuaggugcaacauuugcauuuga

SEQ ID NO: 39804 - RNA, 1701 nt, Artificial Sequence
  derived and/or modified CDS sequence (wt) from hemagglutinin__InfluenzaA__AET10114
augaagaccaucauugcuuugagcuacauucuaugucugguuuucgcucaagaacuuccuggaaaugacgacagcacggcaacgcugugccuugggcaccaugcagugccaaacggaacgauagugaaaacaaucacgaaugaccaaauugaaguuacuaaugcuacugagcugguucagaguuccucaacaggugaaauaugcaacaguccucaucagauccuugauggagaaaacugcacacuaauagaugcucuauugggagacccucagugugauggcuuccaaaacaagaaaugggaccuuuuuguugaacgaagcaaagcccacagcaacuguuacccuuaugaugugccggauuaugccucccuuaggucacuaguugccucauccggcacacuggaguuuaacaaugaaagcuucaauuggacuggagucacucaaaacggaacaagcucugcuugcauaaggagaucuaauaauaguuucuuuaguagauugaauugguugacccacuuaaacuucaaauacccagcauugaacgugacuaugccaaacaaugaacaauuugacaaauuguacauuugggggguucaccacccggguacggacaaggaccaaaucuuccuguaugcucaagcaucaggaagaaucacaguaucuaccaaaagaagccaacaagcuguaauuccgaauaucggaucuagacccagaguaaggaauaucccuagcagaguaagcaucuauuggacaauaguaaaaccgggagacauacuuuugauuaacagcacagggaaucuaauugcuccuagggguuacuucaaaauacgaagugggaaaagcucaauaaugagaucagaugcacccauuggcaaaugcaauucugcaugcaucacuccaaauggaagcauuuccaaugacaaaccauuccaaaauguaaacaggaucacauacggggccugucccagauaugucaagcaaaacacucugaaauuggcaacaggaaugagaaauguaccagagaaacaaacuagaggcauauuuggcgcaauagcggguuucauagaaaaugguugggagggaaugguggaugguugguacgguuucaggcaucaaaauucugagggaagaggacaagcagcagaucucaaaagcacucaagcagcaaucgaucaaaucaaugggaagcugaauagauugaucgggaaaaccaacgagaaauuccaucagauugaaaaagaauucucagaagucgaagggagaauucaggaccuugagaaauauguugaggacacuaaaauagaucucuggucauacaacgcggagcuucuuguugcccuggagaaccaacacacaauugaucuaacugacucagaaaugaacaaacuguuugaaaaaacaaagaagcaacugagggaaaaugcugaggauaugggcaaugguuguuucaaaauauaccacaaaugugacaaugccugcauaggaucaaucagaaauggaacuuaugaucacgauguguacagagaugaagcauuaaacaaccgauuccagaucaaaggaguugagcugaagucaggguacaaagauuggauccuauggauuuccuuugccauaucauguuuuuugcuuuguguugcuuuguugggguucaucaugugggccugccaaaaaggcaacauuaugugcaacauuugcauuuga

SEQ ID NO: 39805 - RNA, 1698 nt, Artificial Sequence
  derived and/or modified CDS sequence (wt) from hemagglutinin__InfluenzaA__AET50439
augaaaguaaaacuacugguccuguuaugcacauuuacagcuacauaugcagacacaauauguauaggcuaccaugcuaacaacucgaccgacacuguugacacaguacuugaaaagaaugugacagugacacacucugucaaccugcuugagaacagucacaauggaaaacuaugucuauuaaaaggaauagccccacuacaauuggguaauugcagcguugccggguggaucuuaggaaacccagaaugcgaauuacugauuuccaaggagucaugguccuacauuguagaaaaaccaaauccugagaauggaacauguuacccagggcauuucgcugacuaugaggaacugagggagcaauugaguucaguaucuucauuugagagguucgaaauauuccccaaagaaagcucauggcccaaccacaccguaaccggagugucagcaucaugcucccauaauggggaaagcaguuuuuacagaaauuugcuauggcugacggggaagaaugguuuguacccaaaccugagcaaguccuaugcaaacaacaaagaaaaagaaguccuuguacuaugggguguucaucacccgccaaacauagguaaccaaaaggcccucuaucauacagaaaaugcuuaugucucuguagugucuucacauuauagcagaaaauucaccccagaaauagccaaaagacccaaaguaagagaucaagaaggaagaaucaauuacuacuggacucugcuugaacccggggauacaauaauauuugaggcaaauggaaaucuaauagcgccaagauaugcuuucgcacugaguagaggcuuuggaucaggaaucaucaacucaaaugcaccaauggauaaaugugaugcgaagugccaaacaccucagggagcuauaaacagcagucuuccuuuccagaacguacacccagucacaauaggagaguguccaaaguaugucaggagugcaaaauuaaggaugguuacaggacuaaggaacaucccauccauucaauccagagguuuguuuggagccauugccgguuucauugaagggggguggacuggaaugguagaugguugguaugguuaucaucaucagaaugagcaaggaucuggcuaugcugcagaucaaaaaagcacacaaaaugccauuaaugggauuacaaacaaggugaauucuguaauugagaaaaugaacacucaauucacagcagugggcaaagaauucaacaaauuggaaagaaggauggaaaacuugaauaaaaaaguugaugauggguuuauagacauuuggacauauaaugcagaacuguugguucuacuggaaaaugaaaggacuuuggauuuccaugacuccaaugugaagaaucuguaugagaaaguaaaaagccaguuaaagaauaaugcuaaagaaauaggaaauggguguuuugaauucuaucacaaguguaacgaugaaugcauggagaguguaaagaauggaacuuaugacuauccaaaauauuccgaagaaucaaaguuaaacagggagaaaauugauggagugaaauuggaaucaaugggagucuaucagauucuggcgaucuacucaacagucgccaguucucugguucuuuuggucucccugggggcaaucagcuucuggauguguuccaaugggucuuuacaguguagaauaugcaucuaa

SEQ ID NO: 39806 - RNA, 1698 nt, Artificial Sequence
  derived and/or modified CDS sequence (wt) from hemagglutinin__InfluenzaA__AET50440
augaaaguaaaacuacugguccuguuaugcacauuuacagcuacauaugcagacacaauauguauaggcuaccaugcuaacaacucgaccgacacuguugacacaguacuugaaaagaaugugacagugacacacucugucaaccugcuugagaacagucacaauggaaaacuaugucuauuaaaaggaauagccccacuacaauuggguaauugcagcguugccggguggaucuuaggaaacccagaaugcgaauuacugauuuccaaggagucaugguccuacauuguagaaaaaccaaauccugagaauggaacauguuacccagggcauuucgcugacuaugaggaacugagggagcaauugaguucaguaucuucauuugagagguucgaaauauuccccaaagaaagcucauggcccacccacaccguaaccggagugucagcaucaugcucccauaauggggaaagcaguuuuuacagaaauuugcuauggcugacggggaagaaugguuuguacccaaaccugagcaaguccuaugcaaacaacaaagaaaaagaaguccuuguacuaugggguguucaucacccgccaaacauagguaaccaaaaggcccucuaucauacagaaaaugcuuaugucucuguagugucuucacauuauagcagaaaauucaccccagaaauagccaaaagacccaaaguaagagaucaagaaggaagaaucaauuacuacuggacucugcuugaacccggggauacaauaauauuugaggcaaauggaaaucuaauagcgccaagauaugcuuucgcacugaguagaggcuuuggaucaggaaucaucaacucaaaugcaccaauggauaaaugugaugcgaagugccaaacaccucagggagcuauaaacagcagucuuccuuuccagaacguacacccagucacaauaggagaguguccaaaguaugucaggagugcaaaauuaaggaugguuacaggacuaaggaacaucccauccauucaauccagagguuuguuuggagccauugccgguuucauugaagggggguggacuggaaugguagaugguugguaugguuaucaucaucagaaugagcaaggaucuggcuaugcugcagaucaaaaaagcacacaaaaugccauuaaugggauuacaaacaaggugaauucuguaauugagaaaaugaacacucaauucacagcagugggcaaagaauucaacaaauuggaaagaaggauggaaaacuugaauaaaaaaguugaugauggguuuauagacauuuggacauauaaugcagaacuguugguucuacuggaaaaugaaaggacuuuggauuuccaugacuccaaugugaagaaucuguaugagaaaguaaaaagccaguuaaagaauaaugcuaaagaaauaggaaauggguguuuugaauucuaucacaaguguaacgaugaaugcauggagaguguaaagaauggaacuuaugacuauccaaaauauuccgaagaaucaaaguuaaacagggagaaaauugauggagugaaauuggaaucaaugggagucuaucagauucuggcgaucuacucaacagucgccaguucucugguucuuuuggucucccugggggcaaucagcuucuggauguguuccaaugggucuuuacaguguagaauaugcaucuaa

SEQ ID NO: 39807 - RNA, 1698 nt, Artificial Sequence
  derived and/or modified CDS sequence (wt) from hemagglutinin__InfluenzaA__AET50441
augaaaguaaaacuacugguccuguuaugcacauuuacagcuacauaugcagacacaauauguauaggcuaccaugcuaacaacucgaccgacacuguugacacaguacuugaaaagaaugugacagugacacacucugucaaccugcuugagaacagucacaauggaaaacuaugucuauuaaaaggaauagccccacuacaauuggguaauugcagcguugccggguggaucuuaggaaacccagaaugcgaauuacugauuuccaaggagucaugguccuacauuguagaaaaaccaaauccugagaauggaacauguuacccagggcauuucgcugacuaugaggaacugagggagcaauugaguucaguaucuucauuugagagguucgaaauauuccccaaagaaagcucauggcccacccacaccguaaccggagugucagcaucaugcucccauaauggggaaagcaguuuuuacagaaauuugcuauggcugacggggaagaaugguuuguacccaaaccugagcaaguccuaugcaaacaacaaagaaaaagaaguccuuguacuaugggguguucaucacccgccaaacauagguaaccaaaaggcccucuaucauacagaaaaugcuuaugucucuguagugucuucacauuauagcagaaaauucaccccagaaauagccaaaagacccaaaguaagaggucaagaaggaagaaucaauuacuacuggacucugcuugaacccggggauacaauaauauuugaggcaaauggaaaucuaauagcgccaagauaugcuuucgcacugaguagaggcuuuggaucaggaaucaucaacucaaaugcaccaauggauaaaugugaugcgaagugccaaacaccucagggagcuauaaacagcagucuuccuuuccagaacguacacccagucacaauaggagaguguccaaaguaugucaggagugcaaaauuaaggaugguuacaggacuaaggaacaucccauccauucaauccagagguuuguuuggagccauugccgguuucauugaagggggguggacuggaaugguagaugguugguaugguuaucaucaucagaaugagcaaggaucuggcuaugcugcagaucaaaaaagcacacaaaaugccauuaaugggauuacaaacaaggugaauucuguaauugagaaaaugaacacucaauucacagcagugggcaaagaauucaacaaauuggaaagaaggauggaaaacuugaauaaaaaaguugaugauggguuuauagacauuuggacauauaaugcagaacuguugguucuacuggaaaaugaaaggacuuuggauuuccaugacuccaaugugaagaaucuguaugagaaaguaaaaagccaguuaaagaauaaugcuaaagaaauaggaaauggguguuuugaauucuaucacaaguguaacgaugaaugcauggagaguguaaagaauggaacuuaugacuauccaaaauauuccgaagaaucaaaguuaaacagggagaaaauugauggagugaaauuggaaucaaugggagucuaucagauucuggcgaucuacucaacagucgccaguucucugguucuuuuggucucccugggggcaaucagcuucuggauguguuccaaugggucuuuacaguguagaauaugcaucuaa

SEQ ID NO: 39808 - RNA, 1698 nt, Artificial Sequence
  derived and/or modified CDS sequence (wt) from hemagglutinin__InfluenzaA__AET50442
augaaaguaaaacuacugguccuguuaugcacauuuacagcuacauaugcagacacaauauguauaggcuaccaugcuaacaacucgaccgacacuguugacacaguacuugaaaagaaugugacagugacacacucugucaaccugcuugagaacagucacaauggaaaacuaugucuauuaaaaggaauagccccacuacaauuggguaauugcagcguugccggguggaucuuaggaaacccagaaugcgaauuacugauuuccaaggagucaugguccuacauuguagaaaaaccaaauccugagaauggaauauguuacccagggcauuucgcugacuaugaggaacugagggagcaauugaguucaguaucuucauuugagagguucgaaauauuccccaaagaaagcucauggcccacccacaccguaaccggagugucagcaucaugcucccauaauggggaaagcaguuuuuacagaaauuugcuauggcugacggggaagaaugguuuguacccaaaccugagcaaguccuaugcaaacaacaaagaaaaagaaguccuuguacuaugggguguucaucacccgccaaacauagguaaccaaaaggcccucuaucauacagaaaaugcuuaugucucuguagugucuucacauuauagcagaaaauucaccccagaaauagccaaaagacccaaaguaagaggucaagaaggaagaaucaauuacuacuggacucugcuugaacccggggauacaauaauauuugaggcaaauggaaaucuaauagcgccaagauaugcuuucgcacugaguagaggcuuuggaucaggaaucaucaacucaaaugcaccaauggauaaaugugaugcgaagugccaaacaccucagggagcuauaaacagcagucuuccuuuccagaacguacacccagucacaauaggagaguguccaaaguaugucaggagugcaaaauuaaggaugguuacaggacuaaggaacaucccauccauucaauccagagguuuguuuggagccauugccgguuucauugaagggggguggacuggaaugguagaugguugguaugguuaucaucaucagaaugagcaaggaucuggcuaugcugcagaucaaaaaagcacacaaaaugccauuaaugggauuacaaacaaggugaauucuguaauugagaaaaugaacacucaauucacagcagugggcaaagaauucaacaaauuggaaagaaggauggaaaacuugaauaaaaaaguugaugauggguuuauagacauuuggacauauaaugcagaacuguugguucuacuggaaaaugaaaggacuuuggauuuccaugacuccaaugugaagaaucuguaugagaaaguaaaaagccaguuaaagaauaaugcuaaagaaauaggaaauggguguuuugaauucuaucacaaguguaacgaugaaugcauggagaguguaaagaauggaacuuaugacuauccaaaauauuccgaagaaucaaaguuaaacagggagaaaauugauggagugaaauuggaaucaaugggagucuaucagauucuggcgaucuacucaacagucgccaguucucugguucuuuuggucucccugggggcaaucagcuucuggauguguuccaaugggucuuuacaguguagaauaugcaucuaa

SEQ ID NO: 39809 - RNA, 1698 nt, Artificial Sequence
  derived and/or modified CDS sequence (wt) from hemagglutinin__InfluenzaA__AET84163
augaaaguaaaacuacugguccuguuaugcacauuuacagcuacauaugcagacacaauauguauaggcuaccaugcuaacaacucgaccgacacuguugacacaguacuugaaaagaaugugacagugacacacucugucaaccugcuugagaacagucacaauggaaaacuaugucuauuaaaaggaauagccccacuacaauuggguaacugcagcguugccggguggaucuuaggaaacccagaaugcgaaucacugauuuccaaagagucaugguccuacauuguagaaaaaccaaauccugagaauggaacauguuacccagggcauuucgcugacuaugaggaacugagggagcaauugaguucaguaucuucauuugagagguucgaaauauuccccaaagaaagcucauggcccaaccacaccguaaccggagugucagcaucaugcucccauaauggggaaagcaguuuuuacagaaauuugcuauggcugacggggaagaaugguuuguacccaaaccugagcaaguccuaugcaaacaacaaagaaaaagaaguccuuguacuaugggguguucaucacccgccaagcauaaguaaucaaaagacccucuaucauacagaaaaugcuuauguuucuguagugucuucacauuauagcagaaaauucaccccagaaguagccaaaagacccaaaguaagagaucaagaaggaagaaucaacuacuacuggacucugcuugaacccggggauacaauaauauuugaggcaaauggaaaucuaauagcgccaagguaugcuuucgcacugaguagaggcuuuggaucaggaaucaucaacucaaaugcaccaauggauaaaugugaugcgaagugucaaacaccucagggagcuauaaacagcagucuuccuuuccagaacguacacccagucacaauaggagaguguccaaaguaugucaggagugcaaaauuaagaaugguuacaggacuaaggaacaucccauccauucaauccagagguuuguuuggagccauugccgguuucauugaagggggguggacuggaaugguagacgguugguaugguuaucaucaucagaaugagcaaggaucuggcuaugcugcagaucaaaaaagcacacaaaaugccauuaaugggauuacaaacaaggugaauucuguaauugagaaaaugaacacucaauucacagcagugggcaaagaauucaacaaauuggaaagaaggauggaaaacuugaauaaaaaaguugaugauggguuuauagacauuuggacauauaaugcagaacuguugguucuacuggaaaaugaaaggacuuuggauuuccaugacuccaaugugaagaaucuguaugagaaaguaaaaagccaguuaaagaauaaugcuaaagaaauaggaaauggguguuuugaauucuaucacaaguguaacgaugaaugcauggagaguguaaagaauggaacuuaugacuauccaaaauauuccgaagaaucaaaguuaaacagggagaaaauugauggagugaaauuggaaucaaugggagucuaucagauucuggcgaucuacucaacagucgccaguucucugguucuuuuggucucccugggggcaaucagcuucuggauguguuccaaugggucuuugcaguguagaauaugcaucuga

SEQ ID NO: 39810 - RNA, 1698 nt, Artificial Sequence
  derived and/or modified CDS sequence (wt) from hemagglutinin__InfluenzaA__AET84174
augaaaguaaaacuacugguccuguuaugcacauuuacagcuacauaugcggacacaauauguauaggcuaccaugcuaacaacucgaccgacacuguugacacaguacuugaaaagaaugugacagugacacacucugucaaccugcuugagaacagucacaauggaaaacuaugucuauuaaaaggaauagccccacuacaauuggguaacugcagcguugccggguggaucuuaggaaacccagaaugcgaauuacugauuuccaaggagucaugguccuacauuguagaaaaaccaaauccugagaauggaacauguuacccagggcauuucgcugacuaugaggaacugagggagcaauugaguucaguaucuucauuugagagguucgaaauauuccccaaagaaagcucauggcccaaccacaccguaaccggagugucagcaucaugcucccauaauggggaaagcaguuuuuacagaaauuugcuauggcugacggggaagaaugguuuguacccaaaccugagcaaguccuaugcaaacaacaaagaaaaagaaguccuuguacuaugggguguucaucacccgccaaacauaguugaccaaaagacccuuuaccguacagaaaaugcuuauguuucuguagugucuucacauuauagcagaaaauucaccccagaaauagccaaaagacccaaaguaagagaucaagaaggaagaaucaacuacuacuggacucugcuugaacccggggauacaauaauauuugaggcaaauggaaaucuaauagcgccaagauaugcuuucgcacugauuagaggcuuuggaucaggaaucaucaacucaaaugcaccaauggguaaaugugaugcgaagugucaaacaccucagggagcuauaaacagcagucuuccuuuccagaacguacacccagucacaauaggagaguguccaaaguaugucaggagugcaaaauuaaggaugguuacaggacuaaggaacaucccauccauucaauccagagguuuguuuggagccauugccgguuucauugaagggggguggacuggaaugguagaugguugguaugguuaucaucaucagaaugagcaaggaucuggcuaugcugcagaucaaaaaagcacacaaaaugccauuaaugggauuacaaacaaggugaauucuguaauugagaaaaugaacacucaauucacagcugugggcaaagaauucaacaaauuggaaagaaggauggaaaacuugaauaaaaaaguugaugauggguuuauagacauuuggacauauaaugcagaacuguugguucuacuggaaaaugaaaggacuuuggauuuccaugacuccaaugugaagaaucuguaugagaaaguaaaaagccaguuaaagaauaaugcuaaagaaauaggaaauggguguuuugaauucuaucacaaguguaacgaugaaugcauggagaguguaaagaauggaacuuaugacuauccaaaauauuccgaagaaucaaaguuaaacagggagaaaauugauggagugaaauuggaaucaaugggagucuaucagauucuggcgaucuacucaacagucgccaguucucugguucuuuuggucucccugggggcaaucagcuucuggauguguuccaaugggucuuugcaguguagaauaugcaucuaa

SEQ ID NO: 39811 - RNA, 1698 nt, Artificial Sequence
  derived and/or modified CDS sequence (wt) from hemagglutinin__InfluenzaA__AET84196
augaaaguaaaacuacugguccuguuaugcacauuuacagcuacauaugcagacacaauauguauaggcuaccaugcuaacaacucgaccgacacuguugacacaguacuugaaaagaaugugacagugacacacucugucaaccugcuugagaacagucacaauggaaaacuaugucuauuaaaaggaauagccccacuacaauuggguaacugcagcguugccggguggaucuuaggaaacccagaaugcgaaucacugauuuccaaagagucaugguccuacauuguagaaaaaccaaauccugagaauggaacauguuacccagggcauuucgcugacuaugaggaacugagggagcaauugaguucaguaucuucauuugagagguucgaaauauuccccaaagaaagcucauggcccaaccacaccguaaccggagugucagcaucaugcucccauaauggggaaagcaguuuuuacagaaauuugcuauggcugacgaggaagaaugguuuguacccaacccugagcaaguccuaugcaaacaacaaagaaaaagaaguccuuguacuaugggguguucaucacccgccaagcauaaaugaccaaaagacccucuaucauacagaaaaugcuuauguuucuguagugucuucacacuauagcaggaaauucaccccagaaauagccaaaagacccaaaguaagagaucaagaaggaagaaucaacuacuacuggacucugcuugaacccggggauacaauaauauuugaggcaaauggaaaucuaauagcgccaagauaugcuuucgcacugaguagaggcuuuggaucaggaaucaucaacucaagugcaccaauggauaaaugugaugcgaagugucaaacaccucagggagcuauaaacagcagucuuccuuuccagaacguacacccagucacaauaggagaguguccaaaguaugucaggagugcaaaauuaaggaugguuacaggacuaaggaacaucccauccauucaauccagagguuuguuuggagccauugccgguuucauugaagggggguggacuggaaugguagaugguugguaugguuaucaucaucagaaugagcaaggaucuggcuaugcugcagaucaaaaaagcacacaaaaugccauuaaugggauuacaaacaaggugaauucuguaauugagaaaaugaacacucaauucacagcagugggcaaagaauucaacaaauuggaaagaaggauggaaaacuugaauaaaaaaguugaugauggguuuauagacauuuggacauauaacgcagaacuguugguucuacuggaaaaugaaaggacuuuggauuuccauaacuccaaugugaagaaucuguaugagaaaguaaaaagccaguuaaagaauaaugcuaaagaaauaggaaacggguguuuugaauucuaucacaaguguaacgaugaaugcauggagaguguaaagaauggaacuuaugacuauccaaaauauuccgaagaaucaaaguuaaacagagagaaaauugauggagugaaauuggaaucaaugggagucuaucagauucuggcgaucuacucaacagucgccaguucucugguucuuuuggucucccugggggcaaucagcuucuggauguguuccaaugggucuuugcaguguagaauaugcaucuaa

SEQ ID NO: 39812 - RNA, 1698 nt, Artificial Sequence
  derived and/or modified CDS sequence (wt) from hemagglutinin__InfluenzaA__AET84207
augaaaguaaaacuacugguccuguuaugcacauuuacagcuacauaugcggacacaauauguauaggcuaccaugcuaacaacucgaccgacacuguugacacaguacuugaaaagaaugugacagugacacacucugucaaccugcuugagaacagucacaauggaaaacuaugucuauuaaaaggaauagccccacuacaauuggguaacugcagcguugccggguggaucuuaggaaacccagaaugcgaauuacugauuuccaaggagucaugguccuacauuguagaaaaaccaaauccugagaauggaacauguuacccagggcauuucgcugacuaugaggaacugagggagcaauugaguucaguaccuucauuugagagguucgaaauauuccccaaagaaagcucauggcccaaccacaccguaaccggagugucagcaucaugcucccauaauggggaaagcaguuuuuacagaaauuugcuauggcugacggggaagaaugguuuguacccaaaccugagcaaguccuaugcaaacaacaaagaaaaagaaguccuuguacuaugggguguucaucacccgccaagcauaaaugaucaaaagacccucuaucauacagaaaaugcuuauguuucuguagugucuucacauuauagcagaaaauucaccccagaaauagccaaaagacccaaaguaagagaucaagaaggaagaaucaacuacuacuggacucugcuugaacccagggauacaauaauauuugaggcaaauggaaaucuaauagcgccaagauaugcuuucgcacugaguagaggcuuuggaucaggaaucaucaacucaaaugcaccaauggauaaaugugaugcgaagugucaaacaccucagggagcuauaaacagcagucuuccuuuccagaacguacacccagucacaauaggagaguguccaaaguaugucaggagugcaaaauuaaggaugguuacaggacuaaggaacaucccauccauucaauccagagguuuguuuggagccauugccgguuucauugaagggggguggacuggaaugguagaugguugguaugguuaucaucaucagaaugagcaaggaucuggcuaugcugcagaucaaaaaagcacacaaaaugccauuaaugggauuacaaacaaggugaauucuguaauugagaaaaugaacacucaauucacagcugugggcaaagaauucaacaaauuggaaagaaggauggaaaacuugaauaaaaaaguugaugauggguuuauagacauuuggacauauaaugcagaacuguugguucuacuagaaaaugaaaggacuuuggauuuccaugacuccaaugugaagaaucuguaugagaaaguaaaaagccaguuaaagaauaaugcuaaagaaauaggaaacggguguuuugaauucuaucacaaguguaacgaugaaugcauggagaguguaaagaauggaacuuaugacuauccaaaauauuccgaagaaucaaaguuaaacagggagaaaauugauggagugaaauuggaaucaaugggagucuaucagauucuggcgaucuacucaacagucgccaguucccugguucuuuuggucucccugggggcaaucagcuucuggauguguuccaaugggucuuugcaguguagaauaugcaucuaa

SEQ ID NO: 39813 - RNA, 1698 nt, Artificial Sequence
  derived and/or modified CDS sequence (wt) from hemagglutinin__InfluenzaA__AET84218
augaaaguaaaacuacugguccuguuaugcacauuuacagcuacauaugcagacacaauauguauaggcuaccaugcuaacaacucgaccgacacuguugacacaguacuugaaaagaaugugacagugacacacucugucaaccugcuugagaacagucacaauggaaaacuaugucuauuaaaaggaauagccccacuacaauuggguaacugcagcguugccggguggaucuuaggaaacccagaaugcgaauuacugauuuccaaggagucaugguccuacauuguagaaaaaccaaauccugagaauggaacauguuacccagggcauuucgcugacuaugaggaacugagggagcaauugaguucaguaucuucauuugagagguuugaaauauuccccaaagaaagcucauggcccaaccacaccguaaccggagugucagcaucaugcucccauaauggggaaagcaguuuuuacagaaauuugcuauggcugacggggaagaaugguuuguacccaaaccugagcaaguccuaugcaaacaacaaagaaaaagaaguccuuguacuaugggguguucaucacccgccaaacauaaguaaccaaaagacccucuaucauacagaaaaugcuuauguuucuguagugucuucacauuauagcagaaaauucaccccagaaauagccaaaagacccaaaguaagagaucaagaaggaagaaucaacuacuacuggacucugcuugaacccggggauacaauaauauuugaggcaaguggaaaucuaauagcgccaagauaugcuuucgcacugaguagaggcuuuggaucaggaaucaucaacucaaaugcaccaauggauaaaugugaugcgaagugucaaacaccucagggagcuauaaacagcagucuuccuuuccagaacguacacccagucacaauaggagaguguccaaaguaugucaggagugcaaaauuaaggaugguuacaggacuaaggaacaucccauccauucaauccagagguuuguuuggagccauugccgguuucauugaagggggguggacuggaaugguagaugguugguaugguuaucaucaucagaaugagcaaggaucuggcuaugcugcagaucaaaaaagcacacaaaaugccauuaaugggauuacaaacaaggugaauucuguaauugagaaaaugaacacucaauucacagcugugggcaaagaauucaacaaauuggaaagaaggauggaaaacuugaauaaaaaaguugaugauggguuuauagacauuuggacauauaaugcagaacuguugguucuacuggaaaaugaaaggacuuuggauuuccaugacuccaaugugaagaaucuguaugagaaaguaaaaagccaguuaaagaauaaugcuaaagaaauaggaaauggguguuuugaauucuaucacaaguguaacgaugaaugcauggagaguguaaagaauggaacuuaugacuauccaaaauauuccgaagaaucgaaguuaaacagggagaaaauugauggagugaaauuggaaucaaugggagucuaucagauucuggcgaucuacucaacagucgccaguucucugguucuuuuggucucccugggggcaaucagcuucuggauguguuccaaugggucuuugcaguguagaauaugcaucuaa

SEQ ID NO: 39814 - RNA, 1698 nt, Artificial Sequence
  derived and/or modified CDS sequence (wt) from hemagglutinin__InfluenzaA__AET84229
augaaaguaaaacuacugguccuguuaugcacauuuacagcuacauaugcagacacaauauguauaggcuaccaugcuaacaacucgaccgacacuguugacacaguacuugaaaagaaugugacagugacacacucugucaaccugcuugagaacagucacaauggaaaacuaugucuauuaaaaggaauagccccacuacaauuggguaacugcagcguugccggguggaucuuaggaaacccagaaugcgaauuacugauuuccaaagagucaugguccuacauuguagaaaaaccaaauccugagaauggaacauguuacccagggcauuucgcugacuaugaggaacugagggagcaauugaguucaguaucuucauuugagagguucgaaauauuccccaaagaaagcucauggcccaaccacaccguaaccggagugucagcaucaugcucccauaauggggaaagcaguuuuuacagaaauuugcuauggcugacggggaagaaugguuuguacccaacccugagcaaguccuaugcaaacaacaaagaaaaagaaguccuuguacuaugggguguucaucacccgccaaacauaguugaccaaaagacccucuaccguacagaaaaugcuuauguuucuguagugucuucacauuauagcagaaaauucaccccagaaauagccaaaagacccaaaguaagagaucaagaaggaagaaucaacuacuacuggacucugcuugaacccggggauacaauaauauuugaggcaaauggaaaucuaauagcgccaagauaugcuuucgcacugaguagaggcuuuggaucaggaaucaucaacucaaaugcaccaauggguaaaugugaugcgaagugucaaacaccucagggagcuauaaacagcagucuuccuuuccagaacguacacccagucacaauaggagaguguccaaaguaugucaggagugcaaaauuaaggaugguuacaggacuaaggaacaucccacccauucaauccagagguuuguuuggagccauugccgguuucauugaagggggguggacuggaaugguagaugggugguaugguuaucaucaucagaaugagcaaggaucuggcuaugcugcagaucaaaaaagcacacaaaaugccauuaaugggauuacaaacaaggugaauucuguaauugagaaaaugaacacucaauucacagcugugggcaaagaauucaacaaauuggaaagaaggauggaaaacuugaauaaaaaaguugaugauggguuuauagacauuuggacauauaaugcagaacuguugguucuacuggaaaaugaaaggacuuuggauuuccaugacuccaaugugaagaaucuguaugagaaaguaaaaagccaguuaaagaauaaugcuaaagaaauaggaaauggguguuuugaauucuaucacaaguguaacgaugaaugcauggagaguguaaagaauggaacuuaugacuauccaaaauauuccgaagaaucaaaguuaaacagggagaaaauugauggagugaaauuggaaucaaugggagucuaucagauucuggcgaucuacucaacagucgccaguucucugguucuuuuggucucccugggggcaaucagcuucuggauguguuccaaugggucuuugcaguguagaauaugcaucuaa

SEQ ID NO: 39815 - RNA, 1698 nt, Artificial Sequence
  derived and/or modified CDS sequence (wt) from hemagglutinin__InfluenzaA__AET84240
augaaaguaaaacuacugguccuguuaugcacauuuacagcuacauaugcagacacaauauguauaggcuaccaugcuaacaacucgaccgacacuguugacacaguacuugaaaagaaugugacagugacacacucugucaaccugcuugagaacagucacaauggaaaacuaugucuauuaaaaggaauagccccacuacaauuggguaacugcagcguugccggguggaucuuaggaaacccagaaugcgaauuacugauuuccaaggagucaugguccuacauuguagaaaaaccaaauccugagaauggaacauguuacccaggguauuucgcugacuaugaggagcugagggagcaauugaguucaguaucuucauuugagagguucgaaauauuccccaaagaaagcucauggcccaaccacaccguaaccggagugucagcaucaugcucccauaauggggaaagcaguuuuuacagaaauuugcuauggcugacggggaagaaugguuuguacccaaaccugagcaaguccuaugcaaacaacaaagaaaaagaaguccuuguacuaugggguguucaucacccgccaaacauaguugaccaaaagacccucuaucguacagaaaaugcuuauguuucuguagugucuucacauuauagcagaaaauucaccccagaaauagccaaaagacccaaaguaagagaucaagaaggaagaaucaacuacuacuggacucugcuugaacccggggauacaauaauauuugaggcaaauggaaaucuaauagcgccaagauaugcuuucgcacugaguagaggcuuuggaucaggaaucaucaacucaaaugcaccaauggguaaaugugaugcgaaaugucaaacaccucagggagcuauaaacagcagucuuccuuuccagaacguacacccagucacaauaggagaguguccaaaguaugucaggagugcaaaauuaaggaugguuacaggacuaaggaacaucccauccauucaauccagagguuuguuuggagccauugccgguuucauugaagggggguggacuggaaugguagaugguugguaugguuaucaucaucagaaugagcaaggaucuggcuaugcugcagaucaaaaaagcacacaaaaugccauuaaugggauuacaaacaaggugaauucuguaauugagaaaaugaacacucaauucacagcagugggcaaagaauucaacaaauuggaaagaaggauggaaaacuugaauaaaaaaguugaugauggguuuauagacauuuggacauauaaugcagaacuguugguucuacuggaaaaugaaaggacuuuggauuuccaugacuccaaugugaagaaucuguaugagaaaguaaaaagccaguuaaagaauaaugcuaaagaaauaggaaauggguguuuugaauucuaucacaaguguaacaaugaaugcauggagaguguaaagaauggaacuuaugacuauccaaaauauuccgaagaaucaaaguuaaacagggagaaaauugauggagugaaauuggagucaaugggagucuaucagauucuggcgaucuacucaacagucgccaguucucugguucuuuuggucucccugggggcaaucagcuucuggauguguuccaaugggucuuugcaguguagaauaugcaucuaa

SEQ ID NO: 39816 - RNA, 1698 nt, Artificial Sequence
  derived and/or modified CDS sequence (wt) from hemagglutinin__InfluenzaA__AET84251
augaaaguaaaacuacugguccuguuaugcacauuuacagcuacauaugcagacacaauauguauaggcuaccaugcuaacaacucgaccgacacuguugacacaguacuugaaaagaaugugacagugacacacucugucaaccugcuugagaacagucacaauggaaaacuaugucuauuaaaaggaauagccccacuacaauuggguaacugcagcguugccggguggaucuuaggaaacccagaaugcgaauuacugauuuccaaagagucaugguccuacauuguagaaaaaccaaauccugagaauggaacauguuacccagggcauuucgcugacuaugaggagcugagggagcaauugaguucaguaucuucauuugagagguucgaaauauuccccaaagaaagcucauggcccaaccacaccguaaccggagugucagcaucaugcucccauaauggggaaagcaguuuuuacagaaauuugcuauggcugacggggaagaaugguuuguacccaaaccugagcaaguccuaugcaaacaacaaagaaaaagaaguccuuguacuaugggguguucaucacccgccaaacauaguuaaccaaaagacccucuaccguacagaaaaugcuuauguuucuguagugucuucacauuauagcagaaaauucaccccagaaauagccaaaagacccaaaguaagagaucaagaaggaagaaucaacuacuacuggacucugcuugaacccggggauacaauaauauuugaggcaaauggaaaucuaauagcgccaagauaugcuuucgcacugaguagaggcuuuggaucaggaaucaucaacucaaaugcaccaauggguaaaugugaugcgaagugucaaacaccucauggagcuauaaacagcugucuuccuuuccagaacguacacccagucacaauaggagaguguccaaaguaugucaggagugcaaaauuaaggaugguuacaggacuaaggaacaucccauccauucaauccagagguuuguuuggagccauugccgguuucauugaagggggguggacuggaaugguagaugguugguaugguuaucaucaucagaaugagcaaggaucuggcuaugcugcagaucaaaaaagcacacaaaaugccauuaaugggauuacaaacaaggugaauucuguaauugagaaaaugaacacucaauucacagcagugggcaaagaauucaacaaauuggaaagaaggauggaaaacuugaauaaaaaaguugaugauggguuuauagacauuuggacauauaaugcagaacuguugguucuacuggaaaaugaaaggacuuuggauuuccaugacuccaaugugaagaauuuguaugagaaaguaaaaagccaguuaaagaauaaugcuaaagaaauaggaaauggguguuuugaauucuaucacaaguguaacgaugaaugcauggagaguguaaagaauggaacuuaugacuauccaaaauauuccgaagaaucaaaguuaaacaaggagaaaauugauggggugaaauuggaaucaaugggagucuaucagauucuggcgaucuacucaacagucgccaguucucugguucuuuuggucucccugggggcaaucagcuucuggauguguuccaaugggucuuugcaguguagaauaugcaucuaa

SEQ ID NO: 39817 - RNA, 1698 nt, Artificial Sequence
  derived and/or modified CDS sequence (wt) from hemagglutinin__InfluenzaA__AET84262
augaaaguaaaacuacugguccuguuaugcacauuuacagcuacauaugcagacacaauauguauaggcuaccaugcuaacaacucgaccgacacuguugacacaguacuugaaaagaaugugacagugacacacucugucaaccugcuugagaacagucacaauggaaaacuaugucuauuaaaaggaauagccccacuacaauuggguaacugcagcguugccggguggaucuuaggaaacccagaaugcgaauuacugauuuccaaagagucaugguccuacauuguagaaaaaccaaauccugagaauggaacauguuacccagggcauuucgcugacuaugaggagcugagggagcaauugaguucaguaucuucauuugagagguucgaaauauuccccaaagaaagcucauggcccaaccacaccguaaccggagugucagcaucaugcucccauaauggggaaagcaguuuuuacagaaauuugcuauggcugacggggaagaaugguuuguacccaaaccugagcaaguccuaugcaaacaacaaagaaaaagaaguccuuguacuaugggguguucaucacccgccaaacauaguugaccaaaagacccucuaucguacagaaaaugcuuauguuucuguagugucuucacauuauagcagaaaauucaccccagaaauagccaaaagacccaaaguaagagaucaagaaggaagaaucaacuacuacuggacucugcuugaacccggggauacaauaauauuugaggcaaauggaaaucuaauagcgccaagauaugcuuucgcacugaguagaggcuuuggaucaggaaucaucaacucaaaugcaccaauggauaaaugugaugcgaagugucaaacaccucauggagcuauaaacagcugucuuccuuuccagaacguacacccagucacaauaggagaguguccaaaguaugucaggagugcaaaauuaaggaugguuacaggacuaaggaacaucccauccauucaauccagagguuuguuuggagccauugccgguuucauugaagggggguggacuggaaugguagaugguugguaugguuaucaucaucagaaugagcaaggaucuggcuaugcugcagaucaaaaaagcacacaaaaugccauuaaugggauuacaaacaaggugaauucuguaauugagaaaaugaacacucaauucacagcugugggcaaagaauucaacaaauuggaaagaaggauggaaaacuugaauaaaaaaguugaugauggguuuauagacauuuggacauauaaugcagaacuguugguucuacuggaaaaugaaaggacuuuggauuuccaugacuccaaugugaagaaucuguaugagaaaguaaaaagccaguuaaagaauaaugcuaaagaaauaggaaauggguguuuugaauucuaucacaaguguaacgaugaaugcauggagaguguaaagaauggaacuuaugacuauccaaaauauuccgaagaaucaaaguuaaacagggagaaaauugauggagugaaauuggaaucaaugggagucuaucagauucuggcgaucuacucaacagucgccaguucucugguucuuuuggucucccugggggcaaucagcuucuggauguguuccaaugggucuuugcaguguagaauaugcaucuaa

SEQ ID NO: 39818 - RNA, 1698 nt, Artificial Sequence
  derived and/or modified CDS sequence (wt) from hemagglutinin__InfluenzaA__AET84284
augaaaguaaaacuacugguccuguuaugcacauuuacagcuacauaugcagacacaauauguauaggcuaccaugcuaacaacucgaccgacacuguugacacaguacuugaaaagaaugugacagugacacacucugucaaccugcuugagaacagucacaauggaaaacuaugucuauuaaaaggaauagccccacuacaauuggguaacugcagcguugccggguggaucuuaggaaacccagaaugcgaauuacugauuuccaaggagucaugguccuacauuguagaaaaaccaaauccugagaauggaacauguuacccaggacauuucgcugacuaugaggaacugagggagcaauugaguucaguaucuucauuugagagguucgaaauauuccccaaagaaagcucauggcccaaccacacuguaaccggagugucagcaucaugcucccauaauggggaaaacaguuuuuacagaaauuugcuauggcugacggggaagaaugguuuguacccaaaccugagcaaguccuaugcaaacaacaaagaaaaagaaguccuuguacuaugggguguucaucacccgccaaacauagcuaaccaaaagacccucuaucauacagaaaaugcuuauguuucuguagugucuucacauuauagcagaaaauucaccccagaaauagccaaaagacccaaaguaagagaucaagaaggaagaaucaacuacuacuggacucugcuugaacccggggauacaauaauauuugaggcaaauggaaaucuaauagcgccaagauaugcuuucgcacugaguagaggcuuuggaucaggaaucaucaacucaaaugcaccaauggauaaaugugaugcgaagugccaaacaccucagggagcuauaaacagcagucuuccuuuccagaacguacacccagucacaauaggagaguguccaaaguaugucaggagugcaaaauuaaggaugguuacaggacuaaggaacaucccauccauucaauccagagguuuguuuggagccauugccgguuucauugaagggggguggacuggaaugguagaugguugguaugguuaucaucaucagaaugagcaaggaucuggcuaugcugcagaucaaaaaagcacacaaaaugccauuaaugggauuacaaacaaggugaauucuguaauugagaaaaugaacacucaauucacagcagugggcaaagaauucaacaaauuggaaagaaggauggaaaacuugaauaaaaaaguugaugauggguuuauagacauuuggacauauaaugcagaacuguugguucuacuggaaaaugaaaggacuuuggauuuccaugacuccaaugugaagaaucuguaugagaaaguaaaaagccaguuaaagaauaaugcuaaagaaauaggaaauggguguuuugaauucuaucacaaguguaacgaugaaugcauggagaguguaaagaauggaacuuaugacuauccaaaauauuccgaagaaucaaaguuaaacagggagaaaauugauggagugaaauuggaaucaaugggagucuaucagauucuggcgaucuacucaacagucgccaguucucugguucuuuuggucucccugggggcaaucagcuucuggauguguuccaaugggucuuugcaguguagaauaugcaucuaa

SEQ ID NO: 39819 - RNA, 1698 nt, Artificial Sequence
  derived and/or modified CDS sequence (wt) from hemagglutinin__InfluenzaA__AET84306
augaaaguaaaacuacugguccuguuaugcacauuuacagcuacauaugcagacacaauauguauaggcuaccaugcuaacaacucgaccgacacuguugacacaguacuugaaaagaaugugacagugacacacucugucaaccugcuugagaacagucacaauggaaaacuaugucuauuaaaaggaauagccccacuacaauuggguaacugcagcguugccggguggaucuuaggaaacccagaaugcgaauuacugauuuccaaggagucaugguccuacauuguagaaaaaccaaauccugagaauggaacauguuacccagggcauuucgcugacuaugaggaacugagggagcaauugaguucaguaucuucauuugagagguucgaaauauuccccaaagaaagcucauggcccaaccacaccguaaccggagugucagcaucaugcucccauaauggggaaagcaguuuuuacagaaauuugcuauggcugacggggaagaaugguuuguacccaaaccugagcaaguccuaugcaaacaacaaagaaaaagaaguccuuguacuaugggguguucaucacccgccuaacauagguaaccaaaaggcccucuaucauacagaaaaugcuuauguuucuguagugucuucacauuauagcauaaaauucaccccagaaauagccaaaagacccaaaguaagagaucaagaaggaagaaucaacuacuacuggacucugcucgaacccggggauacaauaauauuugaggcaaauggaaaucuaauagcgccaagauaugcuuucgcacugaguagaggcuuuggaucaggaaucaucaacucaaaugcaccaauggauaaaugugaugcgaagugucaaacaccucagggagcuauaaacagcagucuuccuuuccagaacguacacccagucacaauaggagaguguccaaaguaugucaggagugcaaaauuaaggaugguuacaggacuaaggaauaucccauccauucaauccagagguuuguuuggagccauugccgguuucauugaagggggguggacuggaaugguagaugguugguaugguuaucaucaucagaaugagcaaggaucuggcuaugcugcagaucaaaaaagcacacaaaaugccauuaaugggauuacaaacaaggugaauucuguaauugagaaaaugaacacucaauucacagcagugggcaaagaauucaacaaauuggaaagaaggauggaaaacuugaauaaaaaaguugaugauggguuuauagacauuuggacauauaaugcagaacuguugguucuacuggaaaaugaaaggacuuuggauuuccaugacuccaaugugaagaaucuguaugagaaaguaaaaagccaguuaaagaauaaugcuaaagaaauaggaaauggguguuuugaauucuaucacaaguguaacgaugaaugcauggagaguguaaagaauggaacuuaugacuauccaaaauauuccgaagaaucaaaguuaaacagggagaaaauugauggagugaaauuggaaucaaugggagucuaucaaauucuggcgaucuacucaacagucgccaguucucugguucuuuuggucucccugggggcaaucagcuucuggauguguuccaaugggucuuugcaguguagaauaugcaucuaa

SEQ ID NO: 39820 - RNA, 1698 nt, Artificial Sequence
  derived and/or modified CDS sequence (wt) from hemagglutinin__InfluenzaA__AET84339
augaaaguaaaacuacugguccuguuaugcacauuuacagcuacauaugcagacacaauauguauaggcuaccaugcuaacaacucgaccgacacuguugacacaguacuugaaaagaaugugacagugacacacucugucaaccugcuugagaacagucacaauggaaaacugugucuauuaaaaggaauagccccacuacaauuggguaacugcagcguugccggguggaucuuaggaaacccagaaugcgaauuacugauuuccaaggagucaugguccuacauuguagaaaaaccaaauccugagaauggaacauguuacccagggcauuucgcugacuaugaggaacugagggagcaauugaguucaguaucuucauuugagagguucgaaauauuccccaaagaaagcucauggcccaaccacaccguaaccggagugucagcaucaugcucccauaauggggaaagaaguuuuuacagaaauuugcuauggcugacggggaagaaugguuuguacccaaaccugagcaaguccuaugcaaacaacaaagaaaaagaaguccuuguacuaugggguguucaucacccgccuaacauagguaaccaaaagacccucuaucauacagaaaaugcuuauguuucuguagugucuucacauuauagcagaaaauucaccccagaaauagccaaaagacccaaaguaagagaucaagaaggaagaaucaacuacuacuggacucugcuugaacccggggauacaauaauauuugaggcaaauggaaaucuaauagcgccaagauaugcuuucgcacugaguagaggcuuuggaucaggaaucaucaacucaaaugcaccaauggauaaaugugaugcgaagugucaaacaccucagggagcuauaaacagcagucuuccuuuccagaacguacacccagucacaauaggagaguguccaaaguaugucaggagugcaaaauuaaggaugguuacaggacuaaggaacaucccauccauucaauccagagguuuguuuggagccauugccgguuucauugaagggggguggacuggaaugguagaugguugguaugguuaucaucaucagaaugagcaagggucuggcuaugcugcagaucaaaaaagcacacaaaaugccaucaaugggauuacaaacaaggugaauucuguaauugagaaaaugaacacucaauucacagcagugggcaaagaauucaacaaauuggaaagaaggauggaaaacuugaauaaaaaaguugaugauggguuuauagacauuuggacauauaaugcagaacuguugguucuacuggaaaaugaaaggacuuuggauuuccaugauuccaaugugaagaaucuguaugagaaaguaaaaagccaguuaaagaauaaugcuaaagaaauaggaaauggguguuuugaauucuaucacaaguguaacgaugagugcauggagaguguaaagaauggaacuuaugacuauccaaaauauuccgaagaaucaaaguuaaacagggagaaaauugauggagugaaguuggaaucaaugggagucuaucagauucuggcgaucuacucaacagucgccaguucucugguucuuuuggucucccugggggcaaucagcuucuggauguguuccaaugggucuuugcaguguagaauaugcaucuaa

SEQ ID NO: 39821 - RNA, 1698 nt, Artificial Sequence
  derived and/or modified CDS sequence (wt) from hemagglutinin__InfluenzaA__AET84361
augaaaguaaaacuacugguccuguuaugcacauuuacagcuacauaugcagacacaauauguauaggcuaccaugcuaacaacucgaccgacacuguugacacaguacuugaaaagaaugugacagugacacacucugucaaccugcuugagaacagucacaauggaaaacugugucuauuaaaaggaauagccccacuacaauuggguaacugcagcguugccggguggaucuuaggaaacccagaaugcgaauuacugauuuccaaggagucaugguccuacauuguagaaaaaccaaauccugagaauggaacauguuacccagggcauuucgcugacuaugaggaacugagggagcaauugaguucaguaucuucauuugagagguucgaaauauuccccaaagaaagcucauggcccaaccacaccguaaccggagugucagcaucaugcucccauaauggggaaagaaguuuuuacagaaauuugcuauggcugacggggaagaaugguuuguacccaaaccugagcaaguccuaugcaaacaacaaagaaaaagaaguccuuguacuaugggguguucaucacccgccuaacauagguaaccaaaagacccucuaucauacagaaaaugcuuauguuucuguagugucuucacauuauagcagaaaauucaccccagaaauagccaaaagacccaaaguaagagaucaagaaggaagaaucaacuacuacuggacucugcuugaacccggggauacaauaauauuugaggcaaauggaaaucuaauagcgccaagauaugccuucgcacugaguagaggcuuuggaucaggaaucaucaacucaaaugcaccaauggauaaaugugaugcgaagugucaaacaccucagggagcuauaaacagcagucuuccuuuccagaacguacacccagucacaauaggagaguguccaaaguaugucaggagugcaaaauuaaggaugguuacaggacuaaggaacaucccauccauucaauccagagguuuguuuggagccauugccgguuucauugaagggggguggacuggaaugguagaugguugguaugguuaucaucaucagaaugagcaagggucuggcuaugcugcagaucaaaaaagcacacaaaaugccauuaaugggauuacaaacaaggugaauucuguaauugagaaaaugaacacucaauucacagcagugggcaaagaauucaacaaauuggaaagaaggauggaaaacuugaauaaaaaaguugaugauggguuuauagacauuuggacauauaaugcagaacuguugguucuacuggaaaaugaaaggacuuuggauuuccaugacuccaaugugaagaaucuguaugagaaaguaaaaagccaguuaaagaauaaugcuaaagaaauaggaaauggguguuuugaauucuaucacaaguguaacgaugagugcauggagaguguaaagaauggaacuuaugacuauccaaaauauuccgaagaaucaaaguuaaacagggagaaaauugauggagugaaauuggaaucaaugggagucuaucagauucuggcgaucuacucaacagucgccaguucucugguucuuuuggucucccugggggcaaucagcuucuggauguguuccaaugggucuuugcaguguagaauaugcaucuaa

SEQ ID NO: 39822 - RNA, 1698 nt, Artificial Sequence
  derived and/or modified CDS sequence (wt) from hemagglutinin__InfluenzaA__AET84372
augaaaguaaaacuacugguccuguuaugcacauuuacugcuacauaugcagacacaauauguauaggcuaccaugcuaacaacucgaccgacacuguugacacaguacuugaaaagaaugugacagugacacacucugucaaccugcuugagaacagucacaauggaaaacugugucuauuaaaaggaauagccccacuacaauuggguaacugcagcguugccggguggaucuuaggaaacccagaaugcgaauuacugauuuccaaggagucaugguccuacauuguagaaaaaccaaauccugagaauggaacauguuacccagggcauuucgcugacuaugaggaacugagggagcaauugaguucaguaucuucauuugagagguucgaaauauuccccaaagaaagcucauggcccaaccacaccguaaccggagugucagcaucaugcucccauaauggggaaagaaguuuuuacagaaauuugcuauggcugacggggaagaaugguuuguacccaaaccugagcaaguccuaugcaaacaacaaagaaaaagaaguccuuguacuaugggguguucaucacccgccuaacauaggugaccaaaagacccucuaucauacagaaaaugcuuauguuucuguagugucuucacauuauagcagaaaauucaccccagaaauagccaaaagacccaaaguaagagaucaagaaggaagaaucaacuacuacuggacucugcuugaacccggggauacaauaauauuugaggcaaauggaaaucuaauagcgccaagauaugcuuucgcacugaguagaggcuuuggaucaggaaucaucaacucaaaugcaccaauggauaaaugugaugcgaagugucaaacaccucagggagcuauaaacagcagucuuccuuuccagaacguacacccagucacaauaggagaguguccaaaguaugucaggagugcaaaauuaaggaugguuacaggacuaaggaacaucccauccauucaauccagagguuuguuuggagccauugccgguuucauugaagggggguggacuggaaugguagaugguugguaugguuaucaucaucagaaugagcaagggucuggcuaugcugcagaucaaaaaagcacacaaaaugccaucaaugggauuacaaacaaggugaauucuguaauugagaaaaugaacacucaauucacagcagugggcaaagaauucaacaaauuggaaagaaggauggaaaacuugaauaaaaaaguugaugauggguuuauagacauuuggacauauaaugcagaacuguugguucuacuggaaaaugaaaggacuuuggauuuccaugauuccaaugugaagaaucuguaugagaaaguaaaaagccaguuaaagaauaaugcuaaagaaauaggaaauggguguuuugaauucuaucacaaguguaacgaugagugcauggagaguguaaagaauggaacuuaugacuauccaaaauauuccgaagaaucaaaguuaaacagggagaaaauugauggagugaaauuggaaucaaugggagucuaucagauucuggcgaucuacucaacagucgccaguucucugguucuuuuggucucccugggggcaaucagcuucuggauguguuccaaugggucuuugcaguguagaauaugcaucuaa

SEQ ID NO: 39823 - RNA, 1698 nt, Artificial Sequence
  derived and/or modified CDS sequence (wt) from hemagglutinin__InfluenzaA__AET84394
augaaaguaaaacuacugguccuguuaugcacauuuacagcuacauaugcagacacaauauguauaggcuaccaugcuaacaacucgaccgacacuguugacacaguacuugaaaagaaugugacagugacacacucugucaaccugcuugagaacagucacaauggaaaacugugucuauuaaaaggaauagccccacuacaauuggguaacugcagcguugccggguggaucuuaggaaacccagaaugcgaauuacugauuuccaaggagucaugguccuacauuguagaaaaaccaaauccugagaauggaacauguuacccagggcauuucgcugacuaugaggaacugagggagcaauugaguucaguaucuucauuugagagguucgaaauauuccccaaagaaagcucauggcccaaccacaccguaaccggagugucagcaucaugcucccauaauggggaaagaaguuuuuacagaaauuugcuauggcugacggggaagaaugguuuguacccaaaccugagcaaguccuaugcaaacaacaaagaaaaagaaguccuuguacuaugggguguucaucacccgccagacauagguaaccaaaagacccucuaucauacagaaaaugcuuauguuucuguagugucuucacauuauagcagaaaauucaccccagaaauagccaaaagacccaaaguaagagaucaagaaggaagaaucaacuacuacuggacucugcuugaacccggggauacaauaauauuugaggcaaauggaaaucuaauagcgccaagauaugccuucgcacugaguagaggcuuuggaucaggaaucaucaacucaaaugcaccaauggauaaaugugaugcgaagugucaaacaccucagggagcuauaaacagcagucuuccuuuccagaacguacacccagucacaauaggagaguguccaaaguaugucaggagugaaaaauuaaggaugguuacaggacuaaggaacaucccauccauucaauccagagguuuguuuggagccauugccgguuucauugaagggggguggacuggaaugguagaugguugguaugguuaucaucaucagaaugagcaagggucuggcuaugcugcagaucaaaaaagcacacaaaaugccauuaaugggauuacaaacaaggugaauucuguaauugagaaaaugaacacucaauucacagcagugggcaaagaauucaacaaauuggaaagaaggauggaaaacuugaauaaaaaaguugaugauggguuuauagacauuuggacauauaaugcagaacuguugguucuacuggaaaaugaaaggacuuuggauuuccaugacuccaaugugaagaaucuguaugagaaaguaaaaagccaguuaaagaauaaugcuaaagaaauaggaaauggguguuuugaauucuaucacaaguguaacgaugagugcauggagaguguaaagaauggaacuuaugacuauccaaaauauuccgaagaaucaaaguuaaacagggagaaaauugauggagugaaauuggaaucaaugggagucuaucagauucuggcgaucuacucaacagucgccaguucucugguucuuuuggucucccugggggcaaucagcuucuggauguguuccaaugggucuuugcaguguagaauaugcaucuaa

SEQ ID NO: 39824 - RNA, 1698 nt, Artificial Sequence
  derived and/or modified CDS sequence (wt) from hemagglutinin__InfluenzaA__AET84405
augaaaguaaaacuacugguccuguuaugcacauuuacagcuacauaugcagacacaauauguauaggcuaccaugcuaacaacucgaccgacacuguugacacaguacuugaaaagaaugugacagugacacacucugucaaccugcuugagaacagucacaauggaaaacugugucuauuaaaaggaauagccccacuacaauuggguaacugcagcguugccggguggaucuuaggaaacccagaaugcgaauuacugauuuccaaggagucaugguccuacauuguagaaaaaccaaauccugaaaauggaacauguuacccagggcauuucgcugacuaugaggaacugagggagcaauugaguucaguaucuucauuugagagguucgaaauauuccccaaagaaagcucauggcccaaccacaccguaaccggagugucagcaucaugcucccauaauggggaaagaaguuuuuacagaaauuugcuauggcugacggggaagaaugguuuguacccaaaccugagcaaguccuaugcaaacaacaaagaaaaagaaguccuuguacuaugggguguucaucacccgccagacauagguaaccaaaagacccucuaucauacagaaaaugcuuauguuucuguagugucuucacacuauagcagaaaauucaccccagaaauagccaaaagacccaaaguaagagaucaagaaggaagaaucaacuacuacuggacucugcuugaacccggggauacaauaauauuugaggcaaauggaaaucuaauagcgccaagauaugcuuucgcacugaguagaggcuuuggaucaggaaucaucaacucaaaugcaccaauggauaaaugugaugcgaagugucaaacaccucagggagcuauaaacagcagucuuccuuuccagaacguacacccagucacaauaggagaguguccaaaguaugucaggagugcaaaauuaaggaugguuacaggacuaaggaacaucccauccauucaauccagagguuuguuuggagccauugccgguuucauugaagggggguggacuggaaugguagaugguugguaugguuaucaucaucagaaugagcaagggucuggcuaugcugcagaucaaaaaagcacacaaaaugccaucaaugggauuacaaacaaggugaauucuguaauugagaaaaugaacacucaauucacagcagugggcaaagaauucaacaaauuggaaagacggauggaaaacuugaauaaaaaaguugaugauggguuuauagacauuuggacauauaaugcagaacuguugguucuacuggaaaaugaaaggacuuuggauuuccaugauuccaaugugaagaaucuguaugagaaaguaaaaagccaguuaaagaauaaugcuaaagaaauaggaaauggguguuuugaauucuaucacaaguguaacgaugagugcauggagaguguaaagaauggaacuuaugacuauccaaaauauuccgaagaaucaaaguuaaacagggagaaaauugauggagugaaauuggaaucaaugggagucuaucagauucuggcgaucuacucaacugucgccaguucucugguucuuuuggucucccugggggcaaucagcuucuggauguguuccaaugggucuuugcaguguagaauaugcaucuaa

SEQ ID NO: 39825 - RNA, 1698 nt, Artificial Sequence
  derived and/or modified CDS sequence (wt) from hemagglutinin__InfluenzaA__AET84416
augaaaguaaaacuacugguccuguuaugcacauuuacagcuacauaugcagacacaauauguauaggcuaccaugcuaacaacucgaccgacacuguugacacaguacuugaaaagaaugugacagugacacacucugucaaccugcuugagaacagucacaauggaaaacugugucuauuaaaaggaauagccccacuacaauuggguaacugcagcguugccggguggaucuuaggaaacccagaaugcgaauuacugauuuccaaggagucaugguccuacauuguagaaaaaccaaauccugagaauggaacauguuacccagggcauuucgcugacuaugaggaacugagggagcaauugaguucaguaucuucauuugagagguucgaaauauuccccaaagaaagcucauggcccaaccacaccguaaccggagugucagcaucaugcucccauaauggggaaaggaguuuuuacagaaauuugcuauggcugacggggaagaaugguuuguacccaacccugagcaaguccuaugcaaacaacaaagaaaaagaaguccuuguacuaugggguguucaucacccgccagacauaggugaccaaaagacccucuaucauacagaaaaugcuuauguuucuguagugucuucacauuauagcagaaaauucaccccagaaauagccaaaagacccaaaguaagagaucaagaaggaagaaucaacuacuacuggacucugcuugaacccggggauacaauaauauuugaggcaaauggaaaucuaauagcgccaagauaugcuuucgcacugaguagaggcuuuggaucaggaaucaucaacucaaaugcaccaauggauaaaugugaugcgaagugucaaacaccucagggagcuauaaacagcagucuuccuuuccagaacguacacccagucacaauaggagaguguccaaaguaugucaggagugcaaaauuaaggaugguuacaggacuaaggaacaucccauccauucaauccagagguuuguuuggagccauugccgguuucauugaagggggguggacuggaaugguagaugguugguaugguuaucaucaucagaaugagcaagggucuggcuaugcugcagaucaaaaaagcacacaaaaugccaucaaugggauuacaaacaaggugaauucuguaauugagaaaaugaacacucaauucacagcugugggcaaagaauucaacaaauuggaaagaaggauggaaaacuugaauaaaaaaguugaugauggguuuauagacauuuggacauauaaugcagaacuguugguucuacuggaaaaugaaaggacuuuggauuuccaugauuccaaugugaagaaucuguaugagaaaguaaaaagccaguuaaagaauaaugcuaaagaaauaggaaauggguguuuugaauucuaucacaaguguaacgaugagugcauggagaguguaaagaauggaacuuaugacuauccaaaauauuccgaagaaucaaaguuaaacagggagaaaauugauggagugaaauuggaaucaaugggagucuaucagauucuggcgaucuacucaacagucgccaguucucugguucuuuuggucucccugggggcaaucagcuucuggauguguuccaaugggucuuugcaguguagaauaugcaucuaa

SEQ ID NO: 39826 - RNA, 1698 nt, Artificial Sequence
  derived and/or modified CDS sequence (wt) from hemagglutinin__InfluenzaA__AET84427
augaaaguaaaacuacugguccuguuaugcacauuuacagcuacauaugcagacacaauauguauaggcuaccaugcuaacaacucgaccgacacuguugacacaguacuugaaaagaaugugacagugacacacucugucaaccugcuugagaacagucacaauggaaaacuaugucuauuaaaaggaauagccccacuacaauuggguaacugcagcgucgccggguggaucuuaggaaacccagaaugcgaauuacugauuuccaaggagucaugguccuacauuguagaaaaaccaaauccugagaauggaacauguuacccagggcauuucgcugacuaugaggaacugagggagcaauugaguucaguaucuucauuugagagguucgaaauauuccccaaagaaagcucauggcccaaccacaccguaaccggagugucagcaucaugcucccauaauggggaaagcaguuuuuacagaaauuugcuauggcugacggggaagaaugguuuguacccaaaccugagcaaguccuaugcaaacaacaaggaaaaagaaguccuuguacuaugggguguucaucacccgccaaacauagguaaccaaaagacccucuaucauacagaaaaugcuuauguuucuguagugucuucacauuauagcagaaaauucaccccagaaauagccaaaagacccaaaguaagagaucaagaaggaaggaucaacuacuacuggacucugcuugaacccggggauacaauaauauuugaggcaaauggaaaucuaauagcgccaagauaugcuuucgcacugaguagaggcuuuggaucaggaaucaucaacucaaaugcaccaauggauaaaugugaugcgaagugucaaacaccucagggagcuauaaacagcagucuuccuuuccagaacguacacccagucacaauaggagaguguccaaaguaugucaggagugcaaaauuaaggaugguuacaggacuaaggaacaucccauccauucaauccagagguuuguuuggggccauugccgguuucauugaagggggguggacagggaugguagauggaugguacgguuaucaccaucagaaugagcaaggaucuggcuaugcugcagaucaaaaaagcacacaaaaugccauuaaugggauuacaaacaaggugaauucuguaauugagaaaaugaacacucaauucacagcagugggcaaagaauucaacaaauuggaaagaaggauggaaaacuugaauaaaaaaguugaugauggguuuauagacauuuggacauauaaugcagaacuguugguucuacuggaaaaugaaaggacuuuggauuuccaugacuccaaugugaagaaucuguaugagaaaguaaaaagccaguuaaagaauaaugcuaaagaaauaggaaauggguguuuugaauucuaucacaaguguaacgaugaaugcauggagaguguaaagaauggaacuuaugacuauccaaaauauuccgaagaaucaaaguuaaacagggagaaaauugauggagugaaauuggaaucaaugggagucuaucagauucuggcgaucuacucaacagucgccaguucucugguucuuuuggucucccugggggcaaucagcuucuggauguguuccaaugggucuuugcaguguagaauaugcaucuaa

SEQ ID NO: 39827 - RNA, 1698 nt, Artificial Sequence
  derived and/or modified CDS sequence (wt) from hemagglutinin__InfluenzaA__AET84438
augaaaguaaaacuacugguccuguuaugcacauuuacagcuacauaugcagacacaauauguauaggcuaccaugcuaacaacucgaccgacacuguugacacaguacuugaaaagaaugugacagugacacacucugucaaccugcuugagaacagucacaauggaaaacuaugucuauuaaaaggaauagccccacuacaauuggguaacugcagcguugccggguggaucuuaggaaacccagaaugcgaauuacugauuuccaaggagucaugguccuacauuguagaaaaaccaaauccugagaauggaacauguuacccagggcauuucgcugacuaugaggaacugagggagcaauugaguucaguaucuucauuugagagguucgaaauauuccccaaagaaagcucauggcccaaccacaccguaaccggagugucagcaucaugcucccauaauggggaaagcaguuuuuacagaaauuugcuauggcugacggggaagaaugguuuguacccaaaccugagcaaguccuaugcaaacaacaaagaaaaagaaguccuuguacuaugggguguucaccacccgccuaacauagguguccaaaagacccucuauaauacagaaaaugcuuauguuucuguagugucuucacauuauagcagaaaauucaccccagaaauagcuaaaagacccaaaguaagagaucaagaaggaagaaucaacuacuacuggacucugcuugaacccggggauacaauaauguuugaggcaaauggaaaucuaauagcgccaagauaugcuuucgcacugaguagaggcuuuggaucaggaaucaucaacucaaaugcaccaauggauaaaugugaugcgaagugucaaacaccucagggagcuauaaacagcagucuuccuuuccagaacguacacccagucacaauaggagaguguccaaaguaugucaggagugcaaaauuaaggaugguuacaggacuaaggaacaucccauccauucaauccagagguuuguuuggagccauugccgguuucauugaagggggguggacuggaaugguagaugguugguaugguuaucaucaucagaaugagcaaggaucuggcuaugcugcagaucaaaaaagcacacaaaaugccauuaaugggauuacaaacaaggugaauucuguaauugagaaaaugaacacucaauucacagcagugggcaaagaauucaacaaauuggaaagaaggauggaaaacuugaauaaaaaaguugaugauggguuuauagacauuuggacauauaaugcagaacuguugguucuacuggaaaaugaaaggacuuuggauuuccaugacuccaaugugaagaaucuguaugagaaaguaaaaagccaguuaaagaauaaugcuaaagaaauaggaaauggguguuuugaauucuaucacaaguguaacgaugaaugcauggagaguguaaagaauggaacuuaugacuauccaaaauauuccgaagaaucaaaguuaaacagggagaaaauugauggagugaaauuggaaucaaugggagucuaucagauucuggcgaucuacucaacagucgccaguucucugguucuuuuggucucccugggggcaaucagcuucuggauguguuccaaugggucuuugcaguguagaauaugcaucuaa

SEQ ID NO: 39828 - RNA, 1698 nt, Artificial Sequence
  derived and/or modified CDS sequence (wt) from hemagglutinin__InfluenzaA__AET84449
augaaaguaaaacuacugguccuguuaugcacauuuacagcuacauaugcagacacaauauguauaggcuaccaugccaacaacucaaccgacacuguugacacaguacuugagaagaaugugacagugacacacucugucaaccugcuugaggacagucacaauggaaaauuaugucuauuaaaaggaauagccccacuacaauuggguaauugcagcguugccggauggaucuuaggaaacccagaaugcgaauuacugauuuccagggaaucaugguccuacauuguagaaaaaccaaauccugagaauggaacauguuacccagggcauuucgccgacuaugaggaacugagggagcaauugaguucaguaucuucauuugagagauucgaaauauuccccaaagaaagcucauggcccaaccacaccacaaccggaguaucagcaucaugcucccauaauggggaaagcaguuuuuacaaaaauuugcuauggcugacggggaagaaugguuuguacccaaaccugagcaaguccuaugcaaacaacaaagagaaagaaguccuuguacuaugggguguucaucacccgccuaacauaggugaccaaagggcucucuaucauacagaaaaugcuuaugucucuguagugucuucacauuauagcagaaaauucaccccagaaauagccaaaagacccaaaguaagagaucaagaaggaagaaucaacuacuacuggacucuacuugaacccggggauacaauaauauuugaggcaaauggaaaucuaauagcgccaagauaugcuuucgcacugaguagaggcuuuggaucaggaaucaucaacucaaaugcaccaauggauggaugugaugcgaagugucaaacaccucagggagcuauaaacagcagucuuccuuuccagaauguacacccugucacaauaggagaguguccaaaguaugucaggagugcaaaauuaaggaugguuacaggacuaaggaacaucccauccauucaauccagagguuuguuuggagccauugccgguuucauugaagggggguggacuggaaugguagaugguugguaugguuaucaucaucagaaugagcaaggaucuggcuaugcugcagaucaaaaaagcacacaaaaugccauuaaugggauuacaaacaaggugaauucuguaauugagaaaaugaacacucaauucacagcugugggcaaagaauucaacaaauuggaaagaaggauggaaaacuuaaauaaaaaaguugaugauggguuuauagacauuuggacauauaaugcagaauuguugguucuacuggaaaaugaaaggacuuuggauuuccaugacuccaaugugaagaaucuguaugagaaaguaaaaagccaauuaaagaauaaugccaaagaaauaggaaauggguguuuugaauucuaucacaaguguaacgaugaaugcauggagaguguaaaaaauggaacuuaugacuauccaaaauauuccgaagaaucaaaguuaaacagggagaaaauugauggagugaaauuggaaucaaugggagucuaucagauucuggcgaucuacucaacagucgccaguucucugguucuuuuggucucccugggggcaaucagcuucuggauguguuccaaugggucuuugcaguguagaauaugcaucuaa

SEQ ID NO: 39829 - RNA, 1701 nt, Artificial Sequence
  derived and/or modified CDS sequence (wt) from hemagglutinin__InfluenzaA__AET98600
augaagacuaucauugcuuugagcuacauucuaugucugguuuucgcucaaaaacuuccuggaaaugacaacagcacggcaacgcugugccuugggcaccaugcaguaccaaacggaacgauagugaaaacaaucacgaaugaccaaauugaaguuacuaaugcuacugagcugguucagaguuccucaacaggugaaauaugcgacaguccucaucagauccuugauggagaaaacugcacacuaauagaugcucuauugggagacccucagugugauggcuuccaaaauaagaaaugggaccuuuuuguugaacgaagcaaagccuacagcaacuguuacccuuaugaugugccggauuaugccucccuuaggucacuaguugccucauccggcacacuggaguuuaacaaugaaagcuucaauuggacuggagucacucaaaacggaacaagcucugcuugcauaaggagaucuaauaauaguuucuuuaguagauugaauugguugacccacuuaaacuucaaauacccagcauugaacgugacugugccaaacaaugaacaauuugacaaauuguacauuugggggguucaccacccggguacggacaaggaccaaaucuuccuguaugcucaagcaucaggaagaaucacaguaucuaccaaaagaagccaacaagcuguaaucccgaauaucggaucuagacccagaguaaggaauaucccuagcagaauaagcaucuauuggacaauaguaaaaccgggagacauacuuuugauuaacagcacagggaaucuaauugcuccuagggguuacuucaaaauacgaaguggaaaaagcucaauaaugagaucagaugcacccauuggcaaaugcaauucugaaugcaucacuccaaauggaagcauucccaaugacaaaccauuccaaaauguaaacaggaucacauacggggccugccccagauauguuaagcaaagcacucugaaauuggcaacaggaaugcgaaauguaccagagaaacaaacuagaggcauauuuggcgcaauagcggguuucauagaaaaugguugggagggaaugguggaugguugguacgguuucaggcaucaaaauucugagggaagaggacaagcagcagaucucaaaagcacucaagcagcaaucgaucaaaucaaugggaagcugaauagauugaucgggaaaaccaacgagaaauuccaucagauugaaaaagaauucucagaagucgaagggagaauucaggaccuugagaaauauguggaggacacuaaaauagaucucuggucauacaacgcggagcuucuuguugcccuggagaaccaacauacaauugaucuaacugacucagaaaugaacaaacuguuugaaaaaacaaagaagcaacugagggaaaaugcugaggauaugggcaaugguuguuucacaauauaccacaaaugugacaaugccugcauaggaucaaucagaaauggaacuuaugaccacaauguauacagagaugaagcauuaaacaaccgguuccagaucaagggaguugagcugaagucaggguacaaagauuggauccuauggauuuccuuugccauaucauguuuuuugcuuuguguugcuuuguugggguucaucaugugggccugccaaaaaggcaacauuaggugcaacauuugcauuuga

SEQ ID NO: 39830 - RNA, 1701 nt, Artificial Sequence
  derived and/or modified CDS sequence (wt) from hemagglutinin__InfluenzaA__AEV76874
augaaggcaauacuaguaguucugcuauauacauuugcaaccgcaaaugcagacacauuauguauagguuaccaugcgaacaauucaacagacacuguagacacaguacuagaaaagaauguaacaguaacacacucuguuaaucuucuagaagacaagcauaacgggaaacuaugcaaacuaagagggguagccccauugcauuuggguaaauguaacauugcuggcuggauccugggaaauccagagugugaaucauucuccacagcaagcucaugguccuacauuguggaaacaucuaguucagacaauggaacguguuacccaggagauuucaucgauuaugaggagcuaagagagcaauugagcucagugucaucauuugaaagguuugaaauauuccccaagacaaguucauggcccaaucaugacucgaacaaagguguaacggcagcauguccucaugcuggagcaaaaggcuucuacaaaaauuuaauauggcuaguuaaaaaaggaaauucauacccaaagcucagcaaauccuacauuaaugauaaagggaaagaaguccucgugcuauggggcauucaccauccaucuacuacugcugaccaacaaagucucuaucagaaugcagauacauauguuuuuguggggacaucaagauacagcaagaaguucaacccggaaauagaaauaagacccaaagugagggaucaagaagggagaaugaacuauuacuggacacuaguagagccgggagacaaaauaacauucgaagcaacuggaaaucuagugguaccgagauaugcauucgcaauggaaagaaaugcuggaucugguauuaucauuucagauacaccaguccacgauugcaauacaacuugucagacacccaagggugcuauaaacaccagccucccauuucagaauauacauccgaucacaauuggaaaauguccaaaauauguaaaaagcacaaaauugagacuggccacaggauugaggaaugucccgucuauucaaucuagaggccuauuuggggccauugccggcuucauugaagggggguggacagggaugguagauggaugguacgguuaucaccaucaaaacgagcaggggucaggauaugcagccgaccugaagagcacacagaaugccauugacaagauuacuaacaaaguaaauucuguuauugaaaagaugaauacacaguucacagcaguagguaaagaguucaaccaccuggaaaaaagaauagagaauuuaaauaaaaaaguugaugaugguuuucuggacauuuggacuuacaaugccgaacuguugguucuauuggaaaaugaaagaacuuuggacuaccacgauucaaaugugaagaacuuauaugaaaagguaagaaaccaguuaaaaaacaaugccaaggaaauuggaaauggcugcuuugaauuuuaccacaaaugcgauaacacgugcauggaaagugucaaaaaugggacuuaugacuacccaaaauacucagaggaagcaaaauuaaacagagaagaaauagaugggguaaagcuggaaucaacaaggauuuaccagauuuuggcgaucuauucaacugucgccaguucauugguacugguagucucccugggggcaaucaguuucuggaugugcucuaaugggucucuacaguguagaauauguauuuaa

SEQ ID NO: 39831 - RNA, 1701 nt, Artificial Sequence; identical to SEQ ID NO: 34681
  derived and/or modified CDS sequence (wt) from hemagglutinin__InfluenzaA__AEW10574

SEQ ID NO: 39832 - RNA, 1701 nt, Artificial Sequence; identical to SEQ ID NO: 34681
  derived and/or modified CDS sequence (wt) from hemagglutinin__InfluenzaA__AEW10584

SEQ ID NO: 39833 - RNA, 1701 nt, Artificial Sequence
  derived and/or modified CDS sequence (wt) from hemagglutinin__InfluenzaA__AEW10594
augaaggcaauacuaguaguucugcuauauacauuugcaaccgcaaaugcagacacauuauguauagguuaucaugcgaacaauucaacagacacuguagacacaguacuagaaaagaauguaacaguaacacacucuguuaaccuucuagaagacaagcauaacgggaaacuaugcaaacuaagagggguagccccauugcauuuggguaaauguaacauugcuggcuggauccugggaaauccagagugugaaucacucuccacagcaagcucaugguccuacauuguggaaacaucuaguucagacaauggaacguguuacccaggagauuucaucgauuaugaggagcuaagagagcaauugagcucagugucaucauuugaaagguuugagauauuccccaagacaaguucauggcccaaucaugacucgaacaaagguguaacggcagcauguccucaugcuggagcaaaaagcuucuacaaaaauuuaauauggcuaguuaaaaaaggaaauucauacccaaagcucagcaaauccuacauuaaugauaaagggaaagaaguccucgugcuauggggcauucaccauccaucuacuagugcugaccaacaaagucucuaucagaaugcagaugcauauguuuuuguggggacaucaagauacagcaagaaguucaagccggaaauagcaauaagacccaaagugagggaacaagaagggagaaugaacuauuacuggacacuaguagagccgggagacaaaauaacauucgaagcaacuggaaaucuagugguaccgagauaugcauucgcaauggaaagaaaugcuggaucugguauuaucauuucagauacaccaguccacgauugcaauacaacuugucagacacccaagggugcuauaaacaccagccucccauuucagaauauacauccgaucacaauuggaaaauguccaaaauauguaaaaagcacaaaauugagacuggccacaggauugaggaaugucccgucuauucaaucuagaggccuauuuggggccauugccgguuucauugaagggggguggacagggaugguagauggaugguacgguuaucaccaucaaaaugagcaggggucaggauaugcagccgaccugaagagcacacagaaugccauugacgagauuacuaacaaaguaaauucuguuauugaaaagaugaauacacaguucacagcaguagguaaagaguucaaccaccuggaaaaaagaauagaaaauuuaaauaaaaaaguugaugaugguuuccuggacauuuggacuuacaaugccgaacuguugguucuauuggaaaaugaaagaacuuuggacuaccacgauucaaaugugaagaacuuauaugaaaagguaagaagccaguuaaaaaacaaugccaaggaaauuggaaacggcugcuuugaauuuuaccacaaaugcgauaacacgugcauggaaagugucaaaaaugggacuuaugacuacccaaaauacucagaggaagcaaaauuaaacagagaagaaauagaugggguaaagcuggaaucaacaaggauuuaccagauuuuggcgaucuauucaacugucgccaguucauugguacugguagucucccugggggcaaucaguuucuggaugugcucuaaugggucucuacaguguagaauauguauuuaa

SEQ ID NO: 39834 - RNA, 1701 nt, Artificial Sequence; identical to SEQ ID NO: 36353
  derived and/or modified CDS sequence (wt) from hemagglutinin__InfluenzaA__AEW10604

SEQ ID NO: 39835 - RNA, 1701 nt, Artificial Sequence; identical to SEQ ID NO: 39220
  derived and/or modified CDS sequence (wt) from hemagglutinin__InfluenzaA__AEW10614

SEQ ID NO: 39836 - RNA, 1701 nt, Artificial Sequence; identical to SEQ ID NO: 35772
  derived and/or modified CDS sequence (wt) from hemagglutinin__InfluenzaA__AEW10624

SEQ ID NO: 39837 - RNA, 1701 nt, Artificial Sequence; identical to SEQ ID NO: 34681
  derived and/or modified CDS sequence (wt) from hemagglutinin__InfluenzaA__AEW10634

SEQ ID NO: 39838 - RNA, 1701 nt, Artificial Sequence; identical to SEQ ID NO: 34676
  derived and/or modified CDS sequence (wt) from hemagglutinin__InfluenzaA__AEW10644

SEQ ID NO: 39839 - RNA, 1701 nt, Artificial Sequence
  derived and/or modified CDS sequence (wt) from hemagglutinin__InfluenzaA__AEW10654
augaaggcaauacuaguaguucugcuauauacauuugcaaccgcaaaugcagacacauuauguauagguuaucaugcgaacaauucaacagacacuguagacacagugcuagaaaagaauguaacaguaacacacucuguuaaccuucuagaagacaagcauaacgggaaacuaugcaaacuaagagggguagccccauugcauuuggguaaauguaacauugcuggcuggauccugggaaauccagagugugaaucacucuccacagcaagcucaugguccuacauuguggaaacaucuaguucagacaauggaacguguuacccaggagauuucaucgauuaugaggagcuaagagagcaauugagcucagugucaucuuuugaaagguuugagauauuccccaagacaaguucauggcccaaucaugacucgaacaaagguguaacggcagcauguccucaugcuggagcaaaaagcuucuacaaaaauuuaauauggcuaguuaaaaaaggaaauucauacccaaagcucaacaaauccuacauuaaugauaaagggaaagaaguccucgugcuauggggcauucaccauccaucuacuagugcugaccaacaaagucucuaucagaaugcagaugcauauguuuuuguggggucaucaagauacagcaagaaguucaagccggaaauagcaauaagacccaaagugagggaucaagaagggagaaugaacuauuacuggacacuaguagagccgggagacaaaauaacauucgaagcaacuggaaaucuagugguaccgagauaugcauucgcaauggaaagaaaugcuggaucugguauuaucauuucagauacaccaguccacgauugcaauacaacuugucagacacccaagggugcuauaaacaccagccucccauuucagaauauacauccgaucacaauuggaaaauguccaaaauauguaaaaagcacaaaauugagacuggccacaggauugaggaaugucccgucuauucaaucuagaggccuauuuggggccauugccgguuucauugaagggggguggacagggaugguagauggaugguacgguuaucaccaucaaaaugagcaggggucaggauaugcagccgaccugaagagcacacagaaugccauugacgagauuacuaacaaaguaaauucuguuauugaaaagaugaauacacaguucacagcaguagguaaagaguucaaccaccuggaaaaaagaauagagaauuuaaauaaaaaaguugaugaugguuuccuggacauuuggacuuacaaugccgaacuguugguucuauuggaaaaugaaagaacuuuggacuaccacgauucaaaugugaagaacuuauaugaaaagguaagaagccaguuaaaaaacaaugccaaggaaauuggaaacggcugcuuugaauuuuaccacaaaugcgauaacacgugcauggaaagugucaaaaaugggacuuaugacuacccaaaauacucagaggaagcaaaauuaaacagagaagaaauagaugggguaaagcuggaaucaacaaggauuuaccagauuuuggcgaucuauucaacugucgccaguucauugguacugguagucucccugggggcaaucaguuucuggaugugcucuaaugggucucuacaguguagaauauguauuuaa

SEQ ID NO: 39840 - RNA, 1701 nt, Artificial Sequence; identical to SEQ ID NO: 34705
  derived and/or modified CDS sequence (wt) from hemagglutinin__InfluenzaA__AEW10664

SEQ ID NO: 39841 - RNA, 1701 nt, Artificial Sequence
  derived and/or modified CDS sequence (wt) from hemagglutinin__InfluenzaA__AEW10674
augaaggcaauacuaguaguucugcuauauacauuugcaaccgcaaaugcagacacauuauguauagguuaucaugcgaacaauucaacagacacuguagacacaguacuagaaaagaauguaacaguaacacacucuguuaaccuucuagaagacaagcauaacgggaaacuaugcaaacuaagagggguagccccauugcauuuggguaaauguaacauugcuggcuggauccugggaaauccagagugugaaucacucuccacagcaagcucaugguccuacauuguggaaacaucuaguucagacaauggaacguguuacccaggagauuucaucgauuaugaggagcuaagagagcaauugagcucagugucaucauuugaaagguuugagauauuccccaagacaaguucauggcccaaucaugacucgaacaaagguguaacggcagcauguccucaugcugaagcaaaaagcuucuacaaaaauuuaauauggcuaguuaaaaaaggaaauucauacccaaagcucagcaaauccuacauuaaugauaaagggaaagaaguccucgugcuauggggcauucaccauccaucuacuagugcugaccaacaaagucucuaucagaaugcagaugcauauguuuuuguggggacaucaagauacagcaagaaguucaagccggaaauagcaauaagacccaaagugagggaucaagaagggagaaugaacuauuacuggacacuaguagagccgggagacaaaauaacauucgaagcaacuggaaaucuagugguaccgagauaugcauucgcaauggaaagaaaugcuggaucugguauuaucauuucagauacaccaguccacgauugcaauacaacuugucagacacccaagggugcuauaaacaccagccucccauuucagaauauacauccgaucacaauuggaaaauguccaaaauauguaaaaagcacaaaauugagacuggccacaggauugaggaaugucccgucuauucaaucuagaggccuauuuggggccauugccgguuucauugaagggggguggacagggaugguagauggaugguacgguuaucaccaucaaaaugagcaggggucaggauaugcagccgaccugaagagcacacagaaugccauugacgagauuacuaacaaaguaaauucuguuauugaaaagaugaauacacaguucacagcaguagguaaagaguucaaccaccuggaaaaaagaauagagaauuuaaauaaaaaaguugaugaugguuuccuggacauuuggacuuacaaugccgaacuguugguucuauuggaaaaugaaagaacuuuggacuaccacgauucaaaugugaagaacuuauaugaaaagguaagaagccaguuaaaaaacaaugccaaggaaauuggaaacggcugcuuugaauuuuaccacaaaugcgauaacacgugcauggaaagugucaaaaaugggacuuaugacuacccaaaauacucagaggaagcaaaauuaaacagagaagaaauagaugggguaaagcuggaaucaacaaggauuuaccagauuuuggcgaucuauucaacugucgccaguucauugguacugguagucucccugggggcaaucaguuucuggaugugcucuaaugggucucuacaguguagaauauguauuuaa

SEQ ID NO: 39842 - RNA, 1701 nt, Artificial Sequence; identical to SEQ ID NO: 34681
  derived and/or modified CDS sequence (wt) from hemagglutinin__InfluenzaA__AEW10684

SEQ ID NO: 39843 - RNA, 1701 nt, Artificial Sequence; identical to SEQ ID NO: 34676
  derived and/or modified CDS sequence (wt) from hemagglutinin__InfluenzaA__AEW10694

SEQ ID NO: 39844 - RNA, 1701 nt, Artificial Sequence; identical to SEQ ID NO: 34705
  derived and/or modified CDS sequence (wt) from hemagglutinin__InfluenzaA__AEW10704

SEQ ID NO: 39845 - RNA, 1701 nt, Artificial Sequence; identical to SEQ ID NO: 39839
  derived and/or modified CDS sequence (wt) from hemagglutinin__InfluenzaA__AEW10724

SEQ ID NO: 39846 - RNA, 1701 nt, Artificial Sequence
  derived and/or modified CDS sequence (wt) from hemagglutinin__InfluenzaA__AEW10734
augaaggcaauacuaguaguucugcuauauacauuugcaaccgcaaaugcagacacauuauguauagguuaucaugcgaacaauucaacagacacuguagacacaguacuagaaaagaauguaacaguaacacacucuguuaaccuucuagaagacaagcauaacgggaaacuaugcaaacuaagagggguagccccauugcauuuggguaaauguaacauugcuggcuggauccugggaaauccagagugugaaucacucuccacagcaagcucaugguccuacauuguggaaacaucuaguucagacaauggaacguguuacccaggagauuucaucgauuaugaggagcuaagagagcaauugagcucagugucaucauuugaaagguuugagauauuccccaagacaaguucauggcccaaucaugacucgaacaaagguguaacggcagcauguccucaugcuggagcaaaaagcuucuacaaaaauuuaauauggcuaguuaaaaaaggaaauucauacccaaagcucagcaaauccuacauuaaugauaaagggaaagaaguccucgugcuauggggcauucaccauccaucuacuagugcugaccaacaaagucucuaucagaaugcagaugcauauguuuuuguggggacaucaagauacagcaagaaguucaagccggaaauagcaauaagacccaaagugagggaucaagaagggagaaugaacuauuacuggacacuaguagagccgggagacaaaauaacauucgaagcaacuggaaaucuagugguaccgagauaugcauucgcaauggaaagaaaugcuggaucugguauuaucauuucagauacaccaguccacgauugcaauacaacuugucagacacccaagggugcuauaaacaccagccucccauuucagaauauacauccgaucacaauuggaaaauguccaaaauauguaaaaagcacaaaauugagacuggccacaggauugaggaaugucccgucuauucaaucuagaggccuauuuggggccauugccgguuucauugaagggggguggacagggaugguagauggaugguacgguuaucaccaucaaaaugagcaggggucaggauaugcagccgaccugaagagcacacagaaugccauugacgagauuacuaacaaaguaaauucuguuauugaaaagaugaauacacaguucacagcaguagguaaagaguucaaccaccuggaaaaaagaauagagaauuuaaauaaaaaaguugaugaugguuuccuggacauuuggacuuacaaugccgaacuguugguucuauuggaaaaugaaagaacuuuggacuaccacgauuccaaugugaagaacuuauaugaaaagguaagaagccaguuaaaaaacaaugccaaggaaauuggaaacggcugcuuugaauuuuaccacaaaugcgauaacacgugcauggaaagugucaaaaaugggacuuaugacuacccaaaauacucagaggaagcaaaauuaaacagagaagaaauagaugggguaaagcuggaaucaacaaggauuuaccagauuuuggcgaucuauucaacugucgccaguucauugguacugguagucucccugggggcaaucaguuucuggaugugcucuaaugggucucuacaguguagaauauguauuuaa

SEQ ID NO: 39847 - RNA, 1701 nt, Artificial Sequence
  derived and/or modified CDS sequence (wt) from hemagglutinin__InfluenzaA__AEW10744
augaaggcaauacuaguaguucugcuauauacauuugcaaccgcaaaugcagacacauuauguauagguuaucaugcgaacaauucaacagacacuguagacacaguacuagaaaagaauguaacaguaacacacucuguuaacauucuagaagacaagcauaacgggaaacuaugcaaacuaagagggguagccccauugcauuuggguaaauguaacauugcuggcuggauccugggaaauccagagugugaaucacucuccacagcaagcucaugguccuacauuguggaaacaucuaguucagacaauggaacguguuacccaggagauuucaucgauuaugaggagcuaagagagcaauugagcucagugucaucauuugaaagguuugagauauuccccaagacaaguucauggcccaaucaugacucgaacaaagguguaacggcagcauguccucaugcuggagcaaaaagcuucuacaaaaauuuaauauggcuaguuaaaaaaggaaauucauacccaaagcucagcaaauccuacauuaaugauaaagggaaagaaguccucgugcuauggggcauucaccauccaucuacuagugcugaccaacaaagucucuaucagaaugcagaugcauauguuuuuguggggucaucaagauacagcaagaaguucaagccggaaauagcaauaagacccaaagugagggaucaagaagggagaaugaacuauuacuggacacuaguagagccgggagacaaaauaacauucgaagcaacuggaaaucuagugguaccgagauaugcauucgcaauggaaagaaaugcuggaucugguauuaucauuucagauacaccaguccacgauugcaauacaacuugucagacacccaagggugcuauaaacaccagccucccauuucagaauauacauccgaucacaauuggaaaauguccaaaauauguaaaaagcacaaaauugagacuggccacaggauugaggaaugucccgucuauucuaucuagaggccuauuuggggccauugccgguuucauugaagggggguggacagggaugguagauggaugguacgguuaucaccaucaaaaugagcaggggucaggauaugcagccgaccugaagagcacacagaaugccauugacgagauuacuaacaaaguaaauucuguuauugaaaagaugaauacacaguucacagcaguagguaaagaguucaaccaccuggaaaaaagaauagagaauuuaaauaaaaaaguugaugaugguuuccuggacauuuggacuuacaaugccgaacuguugguucuauuggaaaaugaaagaacuuuggacuaccacgauucaaaugugaagaacuuauaugaaaagguaagaagccagcuaaaaaacaaugccaaggaaauuggaaacggcugcuuugaauuuuaccacaaaugcgauaacacgugcauggaaagugucaaaaaugggacuuaugacuacccaaaauacucagaggaagcaaaauuaaacagagaagaaauagaugggguaaagcuggaaucaacaaggauuuaccagauuuuggcgaucuauucaacugucgccaguucauugguacugguagucucccugggggcaaucaguuucuggaugugcucuaaugggucucuacaguguagaauauguauuuaa

SEQ ID NO: 39848 - RNA, 1701 nt, Artificial Sequence; identical to SEQ ID NO: 39847
  derived and/or modified CDS sequence (wt) from hemagglutinin__InfluenzaA__AEW10754

SEQ ID NO: 39849 - RNA, 1701 nt, Artificial Sequence
  derived and/or modified CDS sequence (wt) from hemagglutinin__InfluenzaA__AEW10764
augaaggcaauacuaguaguucugcuauauacauuugcaaccgcaaaugcagacacauuauguauagguuaucaugcgaacaauucaacagacacuguagacacaguacuagaaaagaauguaacaguaacacacucuguuaacauucuagaagacaagcauaacgggaaacuaugcaaacuaagagggguagccccauugcauuuggguaaauguaacauugcuggcuggauccugggaaauccagagugugaaucacucuccacagcaagcucaugguccuacauuguggaaacaucuaguucagacaauggaacguguuacccaggagauuucaucgauuaugaggagcuaagagagcaauugagcucagugucaucauuugaaagguuugagauauuccccaagacaaguucauggcccaaucaugacucgaacaaagguguaacggcagcauguccucaugcuggagcaaaaagcuucuacaaaaauuuaauauggcuaguuaaaaaaggaaauucauacccaaagcucagcaaauccuacauuaaugauaaagggaaagaaguccucgugcuauggggcauucaccauccaucuacuagugcugaccaacaaagucucuaucagaaugcaaaugcauauguuuuuguggggucaucaagauacagcaagaaguucaagccggaaauagcaauaagacccaaagugagggaucaagaagggagaaugaacuauuacuggacacuaguagagccgggagacaaaauaacauucgaagcaacuggaaaucuagugguaccgagauaugcauucgcaauggaaagaaaugcuggaucugguauuaucauuucagauacaccaguccacgauugcaauacaacuugucagacacccaagggugcuauaaacaccagccucccauuucagaauauacauccgaucacaauuggaaaauguccaaaauauguaaaaagcacaaaauugagacuggccacaggauugaggaaugucccgucuauucaaucuagaggccuauuuggggccauugccgguuucauugaagggggguggacagggaugguagauggaugguacgguuaucaccaucaaaaugagcaggggucaggauaugcagccgaccugaagagcacacagaaugccauugacgagauuacuaacaaaguaaauucuguuauugaaaagaugaauacacaguucacagcaguagguaaagaguucaaccaccuggaaaaaagaauagagaauuuaaauaaaaaaguugaugaugguuuccuggacauuuggacuuacaaugccgaacuguugguucuauuggaaaaugaaagaacuuuggacuaccacgauucaaaugugaagaacuuauaugaaaagguaagaagccagcuaaaaaacaaugccaaggaaauuggaaacggcugcuuugaauuuuaccacaaaugcgauaacacgugcauggaaagugucaaaaaugggacuuaugacuacccaaaauacucagaggaagcaaaauuaaacagagaagaaauagaugggguaaagcuggaaucaacaaggauuuaccagauuuuggcgaucuauucaacugucgccaguucauugguacugguagucucccugggggcaaucaguuucuggaugugcucuaaugggucucuacaguguagaauauguauuuaa

SEQ ID NO: 39850 - RNA, 1701 nt, Artificial Sequence; identical to SEQ ID NO: 34925
  derived and/or modified CDS sequence (wt) from hemagglutinin__InfluenzaA__AEW10774

SEQ ID NO: 39851 - RNA, 1701 nt, Artificial Sequence; identical to SEQ ID NO: 34676
  derived and/or modified CDS sequence (wt) from hemagglutinin__InfluenzaA__AEW10784

SEQ ID NO: 39852 - RNA, 1701 nt, Artificial Sequence; identical to SEQ ID NO: 34676
  derived and/or modified CDS sequence (wt) from hemagglutinin__InfluenzaA__AEW10794

SEQ ID NO: 39853 - RNA, 1701 nt, Artificial Sequence
  derived and/or modified CDS sequence (wt) from hemagglutinin__InfluenzaA__AEW10804
augaaggcaauacuaguaguucugcuauauacauuugcaaccgcaaaugcagacacauuauguauagguuaucaugcgaacaauucaacagacacuguagacacaguacuagaaaagaauguaacaguaacacacucuguuaacauucuagaagacaagcauaacgggaaacuaugcaaacuaagagggguagccccauugcauuuggguaaauguaacauugcuggcuggauccugggaaauccagagugugaaucacucuccacagcaagcucaugguccuacauuguggaaacaucuaguucagacaauggaacguguuacccaggagauuucaucgauuaugaggagcuaagagagcaauugagcucagugucaucauuugaaagguuugagauauuccccaagacaaguucauggcccaaucaugacucgaacaaagguguaacggcagcauguccucaugcuggagcaaaaagcuucuacaaaaauuuaauauggcuaguuaaaaaaggaaauucauacccaaagcucagcaaauccuacauuaaugauaaagggaaagaaguccucgugcuauggggcauucaccauccaucuacuagugcugaccaacaaagucucuaucagaaugcagaugcauauguuuuuguggggucaucaagauacagcaagaaguucaagccggaaauagcaauaagacccaaagugagggaucaagaagggagaaugaacuauuacuggacacuaguagagccgggagacaaaauaacauucgaagcaacuggaaaucuagugguaccgagauaugcauucgcaauggaaagaaaugcuggaucugguauuaucauuucagauacaccaguccacgauugcaauacaacuugucagacacccaagggugcuauaaacaccagccucccauuucagaauauacauccgaucacaauuggaaaauguccaaaauauguaaaaagcacaaaauugagacuggccacaggauugaggaaugucccgucuauucaaucuagaggccuauuuggggccauugccgguuucauugaagggggguggacagggaugguagauggaugguacgguuaucaccaucaaaaugagcaggggucaggauaugcagccgaccugaagagcacacagaaugccauugacgagauuacuaacaaaguaaauucuguuauugaaaagaugaauacacaguucacagcaguagguaaagaguucaaccaccuggaaaaaagaauagagaauuuaaauaaaaaaguugaugaugguuuccuggacauuuggacuuacaaugccgaacuguugguucuauuggaaaaugaaagaacuuuggauuaccacgauucaaaugugaagaacuuauaugaaaagguaagaagccagcuaaaaaacaaugccaaggaaauuggaaacggcugcuuugaauuuuaccacaaaugcgauaacacgugcauggaaagugucaaaaaugggacuuaugacuacccaaaauacucagaggaagcaaaauuaaacagagaagaaauagaugggguaaagcuggaaucaacaaggauuuaccagauuuuggcgaucuauucaacugucgccaguucauugguacugguagucucccugggggcaaucaguuucuggaugugcucuaaugggucucuacaguguagaauauguauuuaa

SEQ ID NO: 39854 - RNA, 1701 nt, Artificial Sequence; identical to SEQ ID NO: 34679
  derived and/or modified CDS sequence (wt) from hemagglutinin__InfluenzaA__AEW10814

SEQ ID NO: 39855 - RNA, 1701 nt, Artificial Sequence; identical to SEQ ID NO: 34772
  derived and/or modified CDS sequence (wt) from hemagglutinin__InfluenzaA__AEW10824

SEQ ID NO: 39856 - RNA, 1701 nt, Artificial Sequence; identical to SEQ ID NO: 34676
  derived and/or modified CDS sequence (wt) from hemagglutinin__InfluenzaA__AEW10834

SEQ ID NO: 39857 - RNA, 1701 nt, Artificial Sequence; identical to SEQ ID NO: 34898
  derived and/or modified CDS sequence (wt) from hemagglutinin__InfluenzaA__AEW10844

SEQ ID NO: 39858 - RNA, 1701 nt, Artificial Sequence
  derived and/or modified CDS sequence (wt) from hemagglutinin__InfluenzaA__AEW10854
augaaggcaauacuaguaguucugcuauauacauuugcaaccgcaaaugcagacacauuauguauagguuaucaugcgaacaauucaacagacacuguagacacaguacuagaaaagaauguaacaguaacacacucuguuaacauucuagaagacaagcauaacgggaaacuaugcaaacuaagagggguagccccauugcauuuggguaaauguaacauugcuggcuggauccugggaaauccagagugugaaucacucuccacagcaagcucaugguccuacauuguggaaacaucuaguucagacaauggaacguguuacccaggagauuucaucgauuaugaggagcuaagagagcaauugagcucagugucaucauuugaaagguuugagauauuccccaagacaaguucauggcccaaucaugacucgaacaaagguguaacggcagcauguccucaugcuggagcaaaaagcuucuacaaaaauuuaauauggcuaguuaaaaaaggaaauucauacccaaagcucagcaaauccuacauuaaugauaaagggaaagaaguccucgugcuauggggcauucaccauccaucuacuagugcugaccaacaaagucucuaucagaaugcagaugcauauguuuuuguggggucaucaagauacagcaagaaguucaagccggaaauaacaauaagacccaaagugagggaucaagaagggagaaugaacuauuacuggacacuaguagagccgggagacaaaauaacauucgaagcaacuggaaaucuagugguaccgagauaugcauucgcaauggaaagaaaugcuggaucugguauuaucauuucagauacaccaguccacgauugcaauacaacuugucagacacccaagggugcuauaaacaccagccucccauuucagaauauacauccgaucacaauuggaaaauguccaaaauauguaaaaagcacaaaauugagacuggccacaggauugaggaaugucccgucuauucaaucuagaggccuauuuggggccauugccgguuucauugaagggggguggacagggaugguagauggaugguacgguuaucaccaucaaaaugagcaggggucaggauaugcagccgaccugaagagcacacagaaugccauugacgagauuacuaacaaaguaaauucuguuauugaaaagaugaauacacaguucacagcaguagguaaagaguucaaccaccuggaaaaaagaauagagaauuuaaauaaaaaaguugaugaugguuuccuggacauuuggacuuacaaugccgaacuguugguucuauuggaaaaugaaagaacuuuggacuaccacgauucaaaugugaagaacuuauaugaaaagguaagaagccagcuaaaaaacaaugccaaggaaauuggaaacggcugcuuugaauuuuaccacaaaugcgauaacacgugcauggaaagugucaaaaaugggacuuaugacuacccaaaauacucagaggaagcaaaauuaaacagagaagaaauagaugggguaaagcuggaaucaacaaggauuuaccagauuuuggcgaucuauucaacugucgccaguucauugguacugguagucucccugggggcaaucaguuucuggaugugcucuaaugggucucuacaguguagaauauguauuuaa

SEQ ID NO: 39859 - RNA, 1701 nt, Artificial Sequence; identical to SEQ ID NO: 34898
  derived and/or modified CDS sequence (wt) from hemagglutinin__InfluenzaA__AEW10864

SEQ ID NO: 39860 - RNA, 1701 nt, Artificial Sequence; identical to SEQ ID NO: 34898
  derived and/or modified CDS sequence (wt) from hemagglutinin__InfluenzaA__AEW10874

SEQ ID NO: 39861 - RNA, 1701 nt, Artificial Sequence; identical to SEQ ID NO: 34898
  derived and/or modified CDS sequence (wt) from hemagglutinin__InfluenzaA__AEW10884

SEQ ID NO: 39862 - RNA, 1701 nt, Artificial Sequence; identical to SEQ ID NO: 34911
  derived and/or modified CDS sequence (wt) from hemagglutinin__InfluenzaA__AEW10894

SEQ ID NO: 39863 - RNA, 1701 nt, Artificial Sequence; identical to SEQ ID NO: 34898
  derived and/or modified CDS sequence (wt) from hemagglutinin__InfluenzaA__AEW10904

SEQ ID NO: 39864 - RNA, 1701 nt, Artificial Sequence; identical to SEQ ID NO: 34898
  derived and/or modified CDS sequence (wt) from hemagglutinin__InfluenzaA__AEW10914

SEQ ID NO: 39865 - RNA, 1701 nt, Artificial Sequence; identical to SEQ ID NO: 34705
  derived and/or modified CDS sequence (wt) from hemagglutinin__InfluenzaA__AEW10924

SEQ ID NO: 39866 - RNA, 1701 nt, Artificial Sequence; identical to SEQ ID NO: 34911
  derived and/or modified CDS sequence (wt) from hemagglutinin__InfluenzaA__AEW10934

SEQ ID NO: 39867 - RNA, 1701 nt, Artificial Sequence; identical to SEQ ID NO: 34898
  derived and/or modified CDS sequence (wt) from hemagglutinin__InfluenzaA__AEW10944

SEQ ID NO: 39868 - RNA, 1701 nt, Artificial Sequence; identical to SEQ ID NO: 34681
  derived and/or modified CDS sequence (wt) from hemagglutinin__InfluenzaA__AEW10954

SEQ ID NO: 39869 - RNA, 1701 nt, Artificial Sequence; identical to SEQ ID NO: 34681
  derived and/or modified CDS sequence (wt) from hemagglutinin__InfluenzaA__AEW10964

SEQ ID NO: 39870 - RNA, 1701 nt, Artificial Sequence; identical to SEQ ID NO: 34898
  derived and/or modified CDS sequence (wt) from hemagglutinin__InfluenzaA__AEW10974

SEQ ID NO: 39871 - RNA, 1701 nt, Artificial Sequence; identical to SEQ ID NO: 34681
  derived and/or modified CDS sequence (wt) from hemagglutinin__InfluenzaA__AEW10984

SEQ ID NO: 39872 - RNA, 1701 nt, Artificial Sequence; identical to SEQ ID NO: 34681
  derived and/or modified CDS sequence (wt) from hemagglutinin__InfluenzaA__AEW10994

SEQ ID NO: 39873 - RNA, 1701 nt, Artificial Sequence; identical to SEQ ID NO: 34681
  derived and/or modified CDS sequence (wt) from hemagglutinin__InfluenzaA__AEW11004

SEQ ID NO: 39874 - RNA, 1701 nt, Artificial Sequence
  derived and/or modified CDS sequence (wt) from hemagglutinin__InfluenzaA__AEW11014
augaaggcaauacuaguaguucugcuauauacauuugcaaccgcaaaugcagacacauuauguauagguuaucaugcgaacaauucaacagacacuguagacacaguacuagaaaagaauguaacaguaacacacucuguuaaccuucuagaagacaagcauaacgggaaacuaugcaaacuaagagggguagccccauugcauuuggguaaauguaacauugcuggcuggauccugggaaauccagagugugaaucacucuccacagcaagcucaugguccuacauuguggaaacaucuaguucagacaauggaacguguuacccaggagauuucaucgauuaugaggagcuaagagagcaauugagcucagugucaucauuugaaagguuugagauauuccccaagacaaguucauggcccaaucaugacucgaacaaagguguaacggcagcauguccucaugcuggagcaaaaagcuucuacaaaaauuuaauauggcuaguuaaaaaaggaaauucauacccaaagcucagcaaauccuacauuaaugauaaagggaaagaaguccucgugcuauggggcauucaccauccaucuacuagugcugaccaacaaagucucuaucagaaugcagaugcauauguuuuuguggggacaucaagauacagcaagaaguucaagccggaaauagcaauaagacccaaagugagggaucaagaagggagaaugaacuauuacuggacacuaguagagccgggagacaaaauaacauucgaagcaacuggaaaucuagugguaccgagauaugcauucgcaauggaaagaaaugcuggaucugguauuaucauuucagauacaccaguccacgauugcaauacaacuugucagacacccaagggugcuauaaacaccagccucccauuucagaauauacauccgaucacaauuggaaaauguccaaaauauguaaaaagcacaaaauugagacuggccacaggauugaggaaugucccgucuauucaaucuagaggccuauuuggggccauugccgguuucauugaagggggguggacagggaugguagauggaugguacgguuaucaccaucaaaaugagcaggggucaggauaugcagccgaccugaagagcacacagaaugccauugacgagauuacuaacaaaguaaauucuguuauugaaaagaugaauacacaguucacagcaguagguaaagaguucaaccaccuggaaaaaagaauagagaauuuaaauaaaaaaguugaugaugguuuccuggacauuuggacuuacaaugccgaacuguugguucuauuggaaaaugaaagaacuuuggacuaccacgauucaaaugugaagaacuuauaugaaaagguaagaagccaguuaaaaaacaaugccaaggaaauuggaaacggcugcuuugaauuuuaccacaaaugcgauaacacgugcauggaaagugucaaaaaugggacuuaugacuacccaaaauauucagaggaagcaaaauuaaacagagaagaaauagaugggguaaagcuggaaucaacaaggauuuaccagauuuuggcgaucuauucaacugucgccaguucauugguacugguagucucccugggggcaaucaguuucuggaugugcucuaaugggucucuacaguguagaauauguauuuaa

SEQ ID NO: 39875 - RNA, 1701 nt, Artificial Sequence; identical to SEQ ID NO: 34681
  derived and/or modified CDS sequence (wt) from hemagglutinin__InfluenzaA__AEW11024

SEQ ID NO: 39876 - RNA, 1701 nt, Artificial Sequence; identical to SEQ ID NO: 34681
  derived and/or modified CDS sequence (wt) from hemagglutinin__InfluenzaA__AEW11034

SEQ ID NO: 39877 - RNA, 1701 nt, Artificial Sequence
  derived and/or modified CDS sequence (wt) from hemagglutinin__InfluenzaA__AEW11044
augaaggcaauacuaguaguucugcuauauacauuugcaaccgcaaaugcagacacauuauguauagguuaucaugcgaacaauucaacagacacuguagacacaguacuagaaaagaauguaacaguaacacacucuguuaacauucuagaagacaagcauaacgggaaacuaugcaaacuaagagggguagccccauugcauuuggguaaauguaacauugcuggcuggauccugggaaauccagagugugaaucacucuccacagcaagcucaugguccuacauuguggaaacaucuaguucagacaauggaacguguuacccaggagauuucaucgauuaugaggagcuaagagagcaauugagcucagugucaucauuugaaagguuugagauauuccccaagacaaguucauggcccaaucaugacucgaacaaagguguaacggcagcauguccucaugcuggagcaaaaagcuucuacaaaaauuuaauauggcuaguuaaaaaaggaaauucauacccaaagcucagcaaaucauacauuaaugauaaagggaaagaaguccucgugcuauggggcauucaccauccaucuacuagugcugaccaacaaagucucuaucagaaugcagaugcauauguuuuuguggggucaucaagauacagcaagaaguucaagccggaaauagcaauaagacccaaagugagggaucaagaagggagaaugaacuauuacuggacacuaguagagccgggagacaaaauaacauucgaagcaacuggaaaucuagugguaccgagauaugcauucgcaauggaaagaaaugcuggaucugguauuaucauuucagauacaccaguccacgauugcaauacaacuugucagacacccaagggugcuauaaacaccagccucccauuucagaauauacauccgaucacaauuggaaaauguccaaaauauguaaaaagcacaaaauugagacuggccacaggauugaggaaugucccgucuauucaaucuagaggccuauuuggggccauugccgguuucauugaagggggguggacagggaugguagauggaugguacgguuaucaccaucaaaaugagcaggggucaggauaugcagccgaccugaagagcacacagaaugccauugacgagauuacuaacaaaguaaauucuguuauugaaaagaugaauacacaguucacagcaguagguaaagaguucaaccaccuggaaaaaagaauagagaauuuaaauaaaaaaguugaugaugguuuccuggacauuuggacuuacaaugccgaacuguugguucuauuggaaaaugaaagaacuuuggacuaccacgauucaaaugugaagaacuuauaugaaaagguaagaagccagcuaaaaaacaaugccaaggaaauuggaaacggcugcuuugaauuuuaccacaaaugcgauaacacgugcauggaaagugucaaaaaugggacuuaugacuacccaaaauacucagaggaagcaaaauuaaacagagaagaaauagaugggguaaagcuggaaucaacaaggauuuaccagauuuuggcgaucuauucaacugucgccaguucauugguacugguagucucccugggggcaaucaguuucuggaugugcucuaaugggucucuacaguguagaauauguauuuaa

SEQ ID NO: 39878 - RNA, 1701 nt, Artificial Sequence; identical to SEQ ID NO: 34681
  derived and/or modified CDS sequence (wt) from hemagglutinin__InfluenzaA__AEW11054

SEQ ID NO: 39879 - RNA, 1701 nt, Artificial Sequence; identical to SEQ ID NO: 34676
  derived and/or modified CDS sequence (wt) from hemagglutinin__InfluenzaA__AEW11064

SEQ ID NO: 39880 - RNA, 1701 nt, Artificial Sequence; identical to SEQ ID NO: 34676
  derived and/or modified CDS sequence (wt) from hemagglutinin__InfluenzaA__AEW11074

SEQ ID NO: 39881 - RNA, 1701 nt, Artificial Sequence
  derived and/or modified CDS sequence (wt) from hemagglutinin__InfluenzaA__AEW11084
augaaggcaauacuaguaguucugcuauauacauuugcaaccgcaaaugcagacacauuauguauagguuaucaugcgaacaauucaacagacacuguagacacaguacuagaaaagaauguaacaguaacacacucuguuaaccuucuagaagacaagcauaacgggaaacuaugcaaacuaagagggguagccccauugcauuuggguaaauguaacauugcuggcuggauccugggaaauccagagugugaaucacucuccacagcaagcucaugguccuacauuguggaaacaucuaguucagacaauggaacguguuacccaggagauuucaucgauuaugaggagcuaagagagcaauugagcucagugucaucauuugaaagguuugagauauuccccaagacaaguucauggcccaaucaugacucgaacaaagguguaacggcagcaugucuucaugcuggagcaaaaagcuucuacaaaaauuuaauauggcuaguuaaaaaaggaaauucauacccaaagcucagcaaauccuacauuaaugauaaagggaaagaaguccucgugcuauggggcauucaccauccaucuacuagugcugaccaacaaagucucuaucagaaugcagaugcauauguuuuuguggggucaucaagauacagcaagaaguucaagccggaaauagcaauaagacccaaagugagggaucaagaagggagaaugaacuauuacuggacacuaguagagccgggagacaaaauaacauucgaagcaacuggaaaucuagugguaccgagauaugcauucgcaauggaaagaaaugcuggaucugguauuaucauuucagauacaccaguccacgauugcaauacaacuugucagacacccaagggugcuauaaacaccagccucccauuucagaauauacauccgaucacaauuggaaaauguccaaaauauguaaaaagcacaaaauugagacuggccacaggauugaggaaugucccgucuauucaaucuagaggccuauuuggggccauugccgguuucauugaagggggguggacagggaugguagauggaugguacgguuaucaccaucaaaaugagcaggggucaggauaugcagccgaccugaagagcacacagaaugccauugacgagauuacuaacaaaguaaauucuguuauugaaaagaugaauacacaguucacagcaguagguaaagaguucaaccaccuggaaaaaagaauagagaauuuaaauaaaaaaguugaugaugguuuccuggacauuuggacuuacaaugccgaacuguugguucuauuggaaaaugaaagaacuuuggacuaccacgauucaaaugugaagaacuuauaugaaaagguaagaagccagcuaaaaaacaaugccaaggaaauuggaaacggcugcuuugaauuuuaccacaaaugcgauaacacgugcauggaaagugucaaaaaugggacuuaugacuacccaaaauacucagaggaagcaaaauuaaacagagaagaaauagaugggguaaagcuggaaucaacaaggauuuaccagauuuuggcgaucuauucaacugucgccaguucauugguacugguagucucccugggggcaaucaguuucuggaugugcucuaaugggucucuacaguguagaauauguauuuaa

SEQ ID NO: 39882 - RNA, 1701 nt, Artificial Sequence; identical to SEQ ID NO: 34676
  derived and/or modified CDS sequence (wt) from hemagglutinin__InfluenzaA__AEW11094

SEQ ID NO: 39883 - RNA, 1701 nt, Artificial Sequence; identical to SEQ ID NO: 34676
  derived and/or modified CDS sequence (wt) from hemagglutinin__InfluenzaA__AEW11104

SEQ ID NO: 39884 - RNA, 1701 nt, Artificial Sequence; identical to SEQ ID NO: 34681
  derived and/or modified CDS sequence (wt) from hemagglutinin__InfluenzaA__AEW11114

SEQ ID NO: 39885 - RNA, 1701 nt, Artificial Sequence
  derived and/or modified CDS sequence (wt) from hemagglutinin__InfluenzaA__AEW11124
augaaggcaauacuaguaguucugcuauauacauuugcaaccgcaaaugcagacacauuauguauagguuaucaugcgaacaauucaacagacacuguagacacaguacuagaaaagaauguaacaguaacacacucuguuaaccuucuagaagacaagcauaacgggaaacuaugcaaacuaagagggguagccccauugcauuuggguaaauguaacauugcuggcuggauccugggaaauccagagugugaaucacucuccacagcaagcucaugguccuacauuguggaaacaucuaguucagacaauggaacguguuacccaggagauuucaucgauuaugaggagcuaagagagcaauugagcucagugucaucauuugaaagguuugagauauuccccaagacaaguucauggcccaaucaugacucgaacaaagguguaacggcagcauguccucaugcuggagcaaaaagcuucuacaaaaauuuaauauggcuaguuaaaaaaggaaauucauacccaaagcucagcaaauccuacauuaaugauaaagggaaagaaguccucgugcuauggggcauucaccauccaucuacuagugcugaccaacaaagucucuaucagaaugcagaugcauauguuuuuguggggucaucaagauacagcaagaaguucaagccggaaauagcaauaagacccaaagugagggaucaagaagggagaaugaacuauuacuggacacuaguagagccgggagacaaaauaacauucgaagcaacuggaaaucuagugguaccgagauaugcauucgcaauggaaagaaaugcuggaucugguauuaucauuucagauacaccaguccacgauugcaauacaacuugucagacacccaagggugcuauaaacaccagccucccauuucagaauauacauccgaucacaauuggaaaauguccaaaauuuguaaaaagcacaaaauugagacuggccacaggauugaggaaugucccgucuauucaaucuagaggccuauuuggggccauugccgguuucauugaagggggguggacagggaugguagauggaugguacgguuaucaccaucaaaaugagcaggggucaggauaugcagccgaccugaagagcacacagaaugccauugacgagauuacuaacaaaguaaauucuguuauugaaaagaugaauacacaguucacagcaguagguaaagaguucaaccaccuggaaaaaagaauagagaauuuaaauaaaaaaguugaugaugguuuccuggacauuuggacuuacaaugccgaacuguugguucuauuggaaaaugaaagaacuuuggacuaccacgauucaaaugugaagaacuuauaugaaaagguaagaagccagcuaaaaaacaaugccaaggaaauuggaaacggcugcuuugaauuuuaccacaaaugcgauaacacgugcauggaaagugucaaaaaugggacuuaugacuacccaaaauacucagaggaagcaaaauuaaacagagaagaaauagaugggguaaagcuggaaucaacaaggauuuaccagauuuuggcgaucuauucaacugucgccaguucauugguacugguagucucccugggggcaaucaguuucuggaugugcucuaaugggucucuacaguguagaauauguauuuaa

SEQ ID NO: 39886 - RNA, 1701 nt, Artificial Sequence
  derived and/or modified CDS sequence (wt) from hemagglutinin__InfluenzaA__AEW11134
augaaggcaauacuaguaguucugcuauauacauuugcaaccgcaaaugcagacacauuauguauagguuaucaugcgaacaauucaacagacacuguagacacaguacuagaaaagaauguaacaguaacacacucuguuaacauucuagaagacaagcauaacgggaaacuaugcaaacuaagagggguagccccauugcauuuggguaaauguaacauugcuggcuggauccugggaaauccagagugugaaucacucuccacagcaagcucaugguccuacauuguggaaacaucuaguucagacaauggaacguguuacccaggagauuucaucgauuaugaggagcuaagagagcaauugagcucagugucaucauuugaaagguuugagauauuccccaagacaaguucauggcccaaucaugacucgaacaaagguguaacggcagcauguccucaugcuggagcaaaaagcuucuacaaaaauuuaauauggcuaguuaaaaaaggaaauucauacccaaagcucagcaaauccuacauuaaugauaaagggaaagaaguccucgugcuauggggcauucaccauccaucuacuagugcugaccaacaaagucucuaucagaaugcagaugcauauguuuuuguggggucaucaagauacagcaagaaguucaagccggaaauagcaauaagacccaaagugagggaucaagaagggagaaugaacuauuacuggacacuaguagagccgggagacaaaauaacauucgaagcaacuggaaaucuagugguaccgagauaugcauucgcaauggaaagaaaugcuggaucugguauuaucauuucagauacaccaguccacgauugcaauacaacuugucagacacccaagggugcuauaaacaccagccucccauuucagaauauacauccgaucacaauuggaaaauguccaaaauauguaaaaagcacaaaauugagacuggccacaggauugaggaaugucccgucuauucaaucuagaggccuauuuggggccauugccgguuucauugaagggggguggacagggaugguagauggaugguacgguuaucaccaucaaaaugagcaggggucaggauaugcagccgaccugaagagcacacagaaugccauugacgagauuacuaacaaaguaaauucuguuauugaaaagaugaauacacaguucacagcaguagguaaagaguucaaccaccuggaaaaaagaauagagaauuuaaauaaaaaaguugaugaugguuuccuggacauuuggacuuacaaugccgaacuguugguucuauuggaaaaugaaagaacuuuggacuaccacgauucaaaugugaagaacuuauaugaaaagguaagaagccagcuaaaaaacaaugccaaggaaauuggaaacggcugcuuugaauuuuaccacaaaugcgauaacacgugcauggaaagugucaaaaaugggacuuaugacuacccaaaauacucagaggaagcaaaauuaaacaaagaagaaauagaugggguaaagcuggaaucaacaaggauuuaccagauuuuggcgaucuauucaacugucgccaguucauugguacugguagucucccugggggcaaucaguuucuggaugugcucuaaugggucucuacaguguagaauauguauuuaa

SEQ ID NO: 39887 - RNA, 1701 nt, Artificial Sequence; identical to SEQ ID NO: 34980
  derived and/or modified CDS sequence (wt) from hemagglutinin__InfluenzaA__AEW11144

SEQ ID NO: 39888 - RNA, 1701 nt, Artificial Sequence; identical to SEQ ID NO: 34980
  derived and/or modified CDS sequence (wt) from hemagglutinin__InfluenzaA__AEW11154

SEQ ID NO: 39889 - RNA, 1701 nt, Artificial Sequence
  derived and/or modified CDS sequence (wt) from hemagglutinin__InfluenzaA__AEW11164
augaaggcaauacuaguaguucugcuauauacauuugcaaccgcaaaugcagacacauuauguauagguuaucaugcgaacaauucaacagacacuguagacacaguacuagaaaagaauguaacaguaacacacucuguuaaccuucuagaagacaagcauaacgggaaacuaugcaaacuaagagggguagccccauugcauuuggguaaauguaacauugcuggcuggauccugggaaauccagagugugaaucacucuccacagcaagcucaugguccuacauuguggaaacaucuaguucagacaauggaacguguuacccaggagauuucaucgauuaugaggagcuaagagagcaauugagcucagugucaucauuugaaagguuugagauauuccccaagacaaguucauggcccaaucaugacucgaacaaagguguaacggcagcaugucuucaugcuggagcaaaaagcuucuacaaaaauuuaauauggcuaguuaaaaaaggaaauucauacccaaagcucagcaaauccuacauuaaugauaaagggaaagaaguccucgugcuauggggcauucaccauccaucuacuagugcugaccaacaaagucucuaucagaaugcagaugcauauguuuuuguggggucaucaagauacagcaagaaguucaagccggaaauagcaauaagacccaaagugagggaucaagaagggagaaugaacuauuacuggacacuaguagagccgggagacaaaauaacauucgaagcaacuggaaaucuagugguaccgagauaugcauucgcaauggaaagaaaugcuggaucugguauuaucauuucagauacaccaguccacgauugcaauacaacuugucagacacccaagggugcuauaaacaccagccucccauuucagaauauacauccgaucacaauuggaaaauguccaaaauauguaaaaagcacaaaauugagacuggccacaggauugaggaaugucccgucuauucaaucuagaggccuauuuggggccauugccgguuucauugaagggggguggacagggaugguagauggaugguacgguuaucaccaucaaaaugagcaggggucaggauaugcagccgaccugaagagcacacagaaugccauugacgagauuacuaacaaaguaaauucuguuauugaaaagaugaauacacaguucacagcaguagguaaagaguucaaccaccuggaaaaaagaauagagaauuuaaauaaaaaaguugaugaugguuuccuggacauuuggacuuacaaugccgaacuguugguucuauuggaaaaugaaagaacuuuggacuaccacgauucaaaugugaagaacuuauaugaaaagguaagaagccaguuaaaaaacaaugccaaggaaauuggaaacggcugcuuugaauuuuaccacaaaugcgauaacacgugcauggaaagugucaaaaaugggacuuaugacuacccaaaauacucagaggaagcaaaauuaaacagagaagaaauagaugggguaaagcuggaaucaacaaggauuuaccagauuuuggcgaucuauucaacugucgccaguucauugguacugguagucucccugggggcaaucaguuucuggaugugcucuaaugggucucuacaguguagaauauguauuuaa

SEQ ID NO: 39890 - RNA, 1701 nt, Artificial Sequence; identical to SEQ ID NO: 39881
  derived and/or modified CDS sequence (wt) from hemagglutinin__InfluenzaA__AEW11174

SEQ ID NO: 39891 - RNA, 1701 nt, Artificial Sequence; identical to SEQ ID NO: 34681
  derived and/or modified CDS sequence (wt) from hemagglutinin__InfluenzaA__AEW11184

SEQ ID NO: 39892 - RNA, 1701 nt, Artificial Sequence; identical to SEQ ID NO: 34676
  derived and/or modified CDS sequence (wt) from hemagglutinin__InfluenzaA__AEW11194

SEQ ID NO: 39893 - RNA, 1701 nt, Artificial Sequence; identical to SEQ ID NO: 34681
  derived and/or modified CDS sequence (wt) from hemagglutinin__InfluenzaA__AEW11204

SEQ ID NO: 39894 - RNA, 1701 nt, Artificial Sequence; identical to SEQ ID NO: 39686
  derived and/or modified CDS sequence (wt) from hemagglutinin__InfluenzaA__AEW11214

SEQ ID NO: 39895 - RNA, 1701 nt, Artificial Sequence
  derived and/or modified CDS sequence (wt) from hemagglutinin__InfluenzaA__AEW11224
augaaggcaauacuaguaguucugcuauauacauuugcaaccgcaaaugcagacacauuauguauagguuaucaugcgaacaauucaacagacacuguagacacaguacuagaaaagaauguaacaguaacacacucuguuaacauucuagaagacaagcauaacgggaaacuaugcaaacuaagagggguagccccauugcauuuggguaaauguaacauugcuggcuggauccugggaaauccagagugugaaucacucuccacagcaagcucaugguccuacauuguggaaacaucuaguucagacaauggaacguguuacccaggagauuucaucgauuaugaggagcuaagagagcaauugagcucagugucaucauuugaaagguuugagauauuccccaagacaaguucauggcccaaucaugacucgaacaaagguguaacggcagcauguccucaugcuggagcaaaaagcuucuacaaaaauuuaauauggcuaguuaaaaaaggaaauucauacccaaagcucagcaaauccuacauuaaugauaaagggaaagaaguccucgugcuauggggcauucaccauccaucuacuagugcugaccaacaaagucucuaucagaaugcagaugcauauguuuuuguggggucaucaagauacagcaagaaguucaagccggaaauagcaauaagacccaaagugagggaucaagaagggagaaugaacuauuacuggacacuaguagagccgggagacaaaauaacauucgaagcaacuggaaaucuagugguaccgagauaugcauucgcaauggaaagaaaugcuggaucugguauuaucauuucagauacaccaguccacgauugcaauacaacuugucagacacccaagggugcuauaaacaccagccucccauuucagaauauacauccgaucacaauuggaaaauguccaaaauauguaaaaagcacaaaauugagacuggccacaggauugaggaaugucccgucuauucaaucuagaggccuauuuggggccauugccgguuucauugaagggggguggacagggaugguagauggaugguacgguuaucaccaucaaaaugagcaggggucaggauaugcagccgaccugaagagcacacagaaugccauugacgagauuacuaacaaaguaaauucuguuauugaaaagaugaauacacaguucacagcaguagguaaagaguucaaccaccuggaaaaaagaauagagaauuuaaauaaaaaaguugaugaugguuuccuggacauuuggacuuacaaugccgaacuguugguucuauuggaaaaugaaagaacuuuggacuaccacgauucaaaugugaagaacuuauaugaaaagguaagaagccagcuaaaaaacaaugccaaggaaauuggaaacggcugcuuugaauuuuaccacaaaugcgauaacacgugcauggaaagugucaaaaaugggacuuaugacuacccaaaauacucagaggaagcaaaauuaaacagagaagagauagaugggguaaagcuggaaucaacaaggauuuaccagauuuuggcgaucuauucaacugucgccaguucauugguacugguagucucccugggggcaaucaguuucuggaugugcucuaaugggucucuacaguguagaauauguauuuaa

SEQ ID NO: 39896 - RNA, 1701 nt, Artificial Sequence; identical to SEQ ID NO: 34681
  derived and/or modified CDS sequence (wt) from hemagglutinin__InfluenzaA__AEW11234

SEQ ID NO: 39897 - RNA, 1701 nt, Artificial Sequence; identical to SEQ ID NO: 34681
  derived and/or modified CDS sequence (wt) from hemagglutinin__InfluenzaA__AEW11244

SEQ ID NO: 39898 - RNA, 1701 nt, Artificial Sequence
  derived and/or modified CDS sequence (wt) from hemagglutinin__InfluenzaA__AEW11254
augaaggcaauacuaguaguucugcuauauacauuugcaaccgcaaaugcagacacauuauguauagguuaucaugcgaacaauucaacagacacuguagacacaguacuagaaaagaauguaacaguaacacacucuguuaaccuucuagaagacaagcauaacgggaaacuaugcaaacuaagagggguagccccauugcauuuggguaaauguaacauugcuggcuggauccugggaaauccagagugugaaucacucuccacagcaagcucaugguccuacauuguggaaacaucuaguucagacaauggaacguguuacccaggagauuucaucgauuaugaggagcuaagagagcaauugagcucagugucaucauuugaaagguuugagauauuccccaagacaaguucauggcccaaucaugacucgaacaaagguguaacggcagcaugucuucaugcuggagcaaaaagcuucuacaaaaauuuaauauggcuaguuaaaaaaggaaauucauacccaaagcucagcaaauccuacauuaaugauaaagggaaagaaguccucgugcuauggggcauucaccauccaucugcuagugcugaccaacaaagucucuaucagaaugcagaugcauauguuuuuguggggucaucaagauacagcaagaaggucaagccggaaauagcaauaagacccaaagugagggaucaagaagggagaaugaacuauuacuggacacuaguagagccgggagacaaaauaacauucgaagcaacuggaaaucuagugguaccgagauaugcauucgcaauggaaagaaaugcuggaucugguauuaucauuucagauacaccaguccacgauugcaauacaacuugucagacacccaagggugcuauaaacaccagccucccauuucagaauauacauccgaucacaauuggaaaauguccaaaauauguaaaaagcacaaaauugagacuggccacaggauugaggaaugucccgucuauucaaucuagaggccuauuuggggccauugccgguuucauugaagggggguggacagggaugguagauggaugguacgguuaucaccaucaaaaugagcaggggucaggauaugcagccgaccugaagagcacacagaaugccauugacgagauuacuaacaaaguaaauucuguuauugaaaagaugaauacacaguucacagcaguagguaaagaguucaaccaccuggaaaaaagaauagagaauuuaaauaaaaaaguugaugaugguuuccuggacauuuggacuuacaaugccgaacuguugguucuauuggaaaaugaaagaacuuuggacuaccacgauucaaaugugaagaacuuauaugaaaagguaagaagccagcuaaaaaacaaugccaaggaaauuggaaacggcugcuuugaauuuuaccacaaaugcgauaacacgugcauggaaagugucaaaaaugggacuuaugacuacccaaaauacucagaggaagcaaaauuaaacagagaagaaauagaugggguaaagcuggaaucaacaaggauuuaccagauuuuggcgaucuauucaacugucgccaguucauugguacugguagucucccugggggcaaucaguuucuggaugugcucuaaugggucucuacaguguagaauauguauuuaa

SEQ ID NO: 39899 - RNA, 1701 nt, Artificial Sequence; identical to SEQ ID NO: 34676
  derived and/or modified CDS sequence (wt) from hemagglutinin__InfluenzaA__AEW11263

SEQ ID NO: 39900 - RNA, 1701 nt, Artificial Sequence; identical to SEQ ID NO: 34676
  derived and/or modified CDS sequence (wt) from hemagglutinin__InfluenzaA__AEW11273

SEQ ID NO: 39901 - RNA, 1701 nt, Artificial Sequence; identical to SEQ ID NO: 34676
  derived and/or modified CDS sequence (wt) from hemagglutinin__InfluenzaA__AEW11283

SEQ ID NO: 39902 - RNA, 1701 nt, Artificial Sequence; identical to SEQ ID NO: 34676
  derived and/or modified CDS sequence (wt) from hemagglutinin__InfluenzaA__AEW11293

SEQ ID NO: 39903 - RNA, 1701 nt, Artificial Sequence
  derived and/or modified CDS sequence (wt) from hemagglutinin__InfluenzaA__AEW11303
augaaggcaauacuaguaguucugcuauauacauuugcaaccgcaaaugcagacacauuauguauagguuaucaugcgaacaauucaacagacacuguagacacaguacuagaaaagaauguaacaguaacacacucuguuaaccuucuagaagacaagcauaacgggaaacuaugcaaacuaagagggguagccccauugcauuuggguaaauguaacauugcuggcuggauccugggaaauccagagugugaaucacucuccacagcaagcucaugguccuacauuguggaaacaucuaguucagacaauggaacguguuacccaggagauuucaucgauuaugaggagcuaagagagcaauugagcucagugucaucauuugaaagguuugagauauuccccaagacaaguucauggcccaaucaugacucgaacaaagguguaacgacagcauguccucaugcuggagcaaaaagcuucuacaaaaauuuaauauggcuaguuaaaaaaggaaauucauacccaaagcucagcaaauccuacauuaaugauaaagggaaagaaguccucgugcuauggggcauucaccauccaucuacuagugcugaccaacaaagucucuaucagaaugcagaugcauauguuuuuguggggacaucaagauacagcaagaaguucaagccggaaauagcaauaagacccaaagugagggaucaagaagggagaaugaacuauuacuggacacuaguagagccgggagacaaaauaacauucgaagcaacuggaaaucuagugguaccgagauaugcauucgcaauggaaagaaaugcuggaucugguauuaucauuucagauacaccaguccacgauugcaauacaacuugucagacacccaagggugcuauaaacaccagccucccauuucagaauauacauccgaucacaauuggaaaauguccaaaauauguaaaaagcacaaaauugagacuggccacaggauugaggaaugucccgucuauucaaucuagaggccuauuuggggccauugccgguuucauugaagggggguggacagggaugguagauggaugguacgguuaucaccaucaaaaugagcaggggucaggauaugcagccgaccugaagagcacacagaaugccauugacgagauuacuaacaaaguaaauucuguuauugaaaagaugaauacacaguucacagcaguagguaaagaguucaaccaccuggaaaaaagaauagagaauuuaaauaaaaaaguugaugaugguuuccuggacauuuggacuuacaaugccgaacuguugguucuauuggaaaaugaaagaacuuuggacuaccacgauucaaaugugaagaacuuauaugaaaagguaagaagccaguuaaaaaacaaugccaaggaaauuggaaacggcugcuuugaauuuuaccacaaaugugauaacacgugcauggaaagugucaaaaaugggacuuaugacuacccaaaauacucagaggaagcaaaauuaaacagagaagaaauagaugggguaaagcuggaaucaacaaggauuuaccagauuuuggcgaucuauucaacugucgccaguucauugguacugguagucucccugggggcaaucaguuucuggaugugcucuaaugggucucuacaguguagaguauguauuuaa

SEQ ID NO: 39904 - RNA, 1701 nt, Artificial Sequence; identical to SEQ ID NO: 34676
  derived and/or modified CDS sequence (wt) from hemagglutinin__InfluenzaA__AEW11313

SEQ ID NO: 39905 - RNA, 1701 nt, Artificial Sequence
  derived and/or modified CDS sequence (wt) from hemagglutinin__InfluenzaA__AEW11323
augaaggcaauacuaguaguucugcuauauacauuugcaaccgcaaaugcagacacauuauguauagguuaucaugcgaacaauucaacagacacuguagacacaguacuagaaaagaauguaacaguaacacacucuguuaaccuucuagaagacaagcauaacgggaaacuaugcaaacuaagagggguagccccauugcauuuggguaaauguaacauugcuggcuggauccuaggaaauccagagugugaaucacucuccacagcaagcucaugguccuacauuguggaaacaucuaguucagacaauggaacguguuacccaggagauuucaucgauuaugaggagcuaagagagcaauugagcucagugucaucauuugaaagguuugagauauuccccaagacaaguucauggcccaaucaugacucgaacaaagguguaacggcagcauguccucaugcuggagcaaaaagcuucuacaaaaauuuaauauggcuaguuaaaaaaggaaauucauacccaaagcucagcaaauccuacauuaaugauaaagggaaagaaguccucgugcuauggggcauucaccauccaucuacuagugcugaccaacaaagucucuaucagaaugcagaugcauauguuuuuguggggacaucaagauacagcaagaaguucaagccggaaauagcaauaagacccaaagugaggggucaagaagggagaaugaacuauuacuggacacuaguagagccgggagacaaaauaacauucgaagcaacuggaaaucuagugguaccgagauaugcauucgcaauggaaagaaaugcuggaucugguauuaucauuucagauacaccaguccacgauugcaauacaacuugucagacacccaagggugcuguaaacaccagccucccauuucagaauauacauccgaucacaauuggaaaauguccaaaauauguaaaaagcacaaaauugagacuggccacaggauugaggaaugucccgucuauucaaucuagaggccuauuuggggccauugccgguuucauugaagggggguggacagggaugguagauggaugguacgguuaucaccaucaaaaugagcaggggucaggauaugcagccgaccugaagagcacacagaaugccauugacgagauuacuaacaaaguaaauucuguuauugaaaagaugaauacacaguucacagcaguagguaaagaguucaaccaccuggaaaaaagaauagagaauuuaaauaaaaaaguugaugaugguuuccuggacauuuggacuuacaaugccgaacuguugguucuauuggaaaaugaaagaacuuuggacuaccacgauucaaaugugaagaacuuauaugaaaagguaagaagccaguuaaaaaacaaugccaaggaaauuggaaacggcugcuuugaauuuuaccacaaaugcgauaacacgugcauggaaagugucaaaaaugggacuuaugacuacccaaaauacucagaggaagcaaaauuaaacagagaagaaauagaugggguaaagcuggaaucaacaaggauuuaccagauuuuggcgaucuauucaacugucgccaguucauugguacugguagucucccugggggcaaucaguuucuggaugugcucuaaugggucucuacaguguagaauauguauuuaa

SEQ ID NO: 39906 - RNA, 1701 nt, Artificial Sequence
  derived and/or modified CDS sequence (wt) from hemagglutinin__InfluenzaA__AEW22712
augaaggcaauacuaguaguucugcuauauacauuugcaaccgcaaaugcagacacauuauguauagguuaccaugcgaacaauucaacagacacuauagacacaguacuagaaaagaauguaacaguaacacacucuguuaaucuucuagaagacaagcauaacgggaaacuaugcaagcuaagagggguagccccauugcauuuggguaaauguaacauugcuggcuggauccugggaaauccagagugugaaucacucuccacagcaagcucaugguccuacauuguggaaacaucuaguucagacaauggaacguguuacccaggagauuucaucgauuaugaggagcuaagagagcaauugagcucagugucaucauuugaaagguuugaaauauuccccaagacaaguucauggcccaaucaugacucgaacaaagguguaacggcagcauguccucaugcuggagcaaaaggcuucuacaaaaauuuaauauggcuaguuaaaaaaggaaauucauacccaaagcucagcaaauccuacauuaaugauaaagggaaagaaguccucgugcuauggggcauucaccauccaucuacuacugcugaccaacaaagucucuaucagaaugcagauacauauguuuuuguggggacaucaagauacagcaagaaguucaagccggaaauagcaauaagacccaaagugagggaucaagaagggagaaugaacuauuacuggacacuaguaaagccgggagacaaaauaacauucgaagcaacuggaaaucuagugguaccgagauaugcauucgcaauggaaagaaaugcuggaucugguauuaucauuucagauacaccaguccacgauugcaauacaacuugucagacacccaagggugcuauaaacaccagccucccauuucagaauauacauccgaucacaauuggaaaauguccaaaauauguaaaaagcacaaaauugagacuggccacaggauugaggaaugucccgucuauucaaucuagaggccuauuuggggccauugccggcuucauugaagggggguggacagggaugguagauggaugguacgguuaucaccaucaaaacgagcaggggucaggauaugcagccgaccugaagagcacacagaaugccauugacaagauuacuaacaaaguaaauucuguuauugaaaagaugaauacacaguucacagcaguagguaaagaguucaaccaccuggaaaaaagaauagagaauuuaaauaaaaaaguugaugaugguuuucuggacauuuggacuuacaaugccgaacuguugguucuauuggaaaaugaaagaacuuuggacuaccacgauucaaaugugaagaacuuauaugaaaagguaagaaaccaguuaaaaaacaaugccaaggaaauuggaaauggcugcuuugaauuuuaccacaaaugcgauaacacgugcauggaaagugucaaaaaugggacuuaugacuacccaaaauacucagaggaagcaaaauuaaacagagaagaaauagaugggguaaagcuggaaucaacaaggauuuaccagauuuuggcgaucuauucaacugucgccaguucauugguacugguagucucccugggggcaaucaguuuuuggaugugcucuaaugggucucuacaguguagaauauguauuuaa

SEQ ID NO: 39907 - RNA, 1701 nt, Artificial Sequence
  derived and/or modified CDS sequence (wt) from hemagglutinin__InfluenzaA__AEW22718
augaaggcaauacuaguaguucugcuauauacauuugcaaccgcaaaugcagacacauuauguauagguuaccaugcgaacaauucaacagacacuguagacacaguacuagaaaagaauguaacaguaacacacucuguuaaucuucuagaagacaagcauaacgggaaacuaugcaaacuaagagggguagccccauugcauuuggguaaauguaacauugcuggcuggauccugggaaauccagagugugaaucacucuccacagcaagcucaugguccuacauuguggaaacaucuaguucagacaauggaacguguuacccaggagauuucaucgauuaugaggagcuaagagagcaauugagcucagugucaucauuugaaagguuugaaauauuccccaagacaaguucauggcccaaucaugacucgaacaaagguguaacggcagcauguccucaugcuggagcaaaaggcuucuacaaaaauuuaauauggcuaguuaaaaaaggaaauucauacccaaagcucagcaaauccuacauuaaugauaaagggaaagaaguccucgugcuauggggcauucaccauccaucuacuacugcugaccaacaaagucucuaucagaaugcagauacauauguuuuuguggggacaucaagauacagcaagaaguucaagccggaaauagcaauaagacccaaagugagggaucaagaagggagaaugaacuauuacuggacacuaguaaagccgggagacaaaauaacauucgaagcaacuggaaaucuagugguaccgagauaugcauucgcaauggaaagaaaugcuggaucugguauuaucauuucagauacaccaguccacgauugcaauacaacuugucagacacccaagggugcuauaaacaccagccucccauuucagaauauacauccgaucacaauuggaaaauguccaaaauauguaaaaagcacaaaauugagacuggccacaggauugaggaaugucccgucuauucaaucuagaggccuauuuggggccauugccggcuucauugaagggggguggacagggaugguagauggaugguacgguuaucaccaucaaaacgagcaggggucaggauaugcagccgaccugaagagcacacagaaugccauugacaagauuacuaacaaaguaaauucuguuauugaaaagaugaauacacaguucacagcaguagguaaagaguucaaccaccuggaaaaaagaauagagaauuuaaauaaaaaaguugaugaugguuuucuggacauuuggacuuacaaugccgaacuguugguucuauuggaaaaugaaagaacuuuggacuaccacgauucaaaugugaagaacuuauaugaaaagguaagaaaccaguuaaaaaacaaugccaaggaaauuggaaauggcugcuuugaauuuuaccacaaaugcgauaacacgugcauggaaagugucaaaaaugggacuuaugacuacccaaaauacucagaggaagcaaaauuaaacagagaagaaauagaugggguaaagcuggaaucaacaaggauuuaccagauuuuggcgaucuauucaacugucgccaguucauugguacugguagucucccugggggcaaucaguuuuuggaugugcucuaaugggucucuacaguguagaauauguauuuaa

SEQ ID NO: 39908 - RNA, 1701 nt, Artificial Sequence
  derived and/or modified CDS sequence (wt) from hemagglutinin__InfluenzaA__AEW22720
augaaggcaauacuaguaguucugcuauauacauuugcaaccgcaaaugcagacacauuauguauagguuaccaugcgaacaauucaacagacacuguagacacaguacuagaaaagaauguaacaguaacacacucuguuaaucuucuagaagacaagcauaacgggaaacuaugcaaacuaagagggguagccccauugcauuuggguaaauguaacauugcuggcuggauccugggaaauccagagugugaaucacucuccacagcaagcucaugguccuacauuguggaaacaucuaguucagacaauggaacguguuacccaggagauuucaucgauuaugaggagcuaagagagcaauugagcucagugucaucauuugaaagguuugaaauauuccccaagacaaguucauggcccaaucaugacucgaacaaagguguaacggcagcauguccucaugcuggagcaaaaggcuucuacaaaaauuuaauauggcuaguuaaaaaaggaaauucauacccaaagcucagcaaauccuacauuaaugauaaagggaaagaaguccucgugcuauggggcauucaccauccaucuacuacugcugaccaacaaagucucuaucagaaugcagauacauauguuuuuguggggacaucaagauacagcaagaaguucaagccggaaauagcaauaagacccaaagugagggaucaagaagggagaaugaacuauuacuggacacuaguagagccgggagacaaaauaacauucgaagcaacuggaaaucuagugguaccgagauaugcauucgcaauggaaagaaaugcuggaucugguauuaucauuucagauacaccaguccacgauugcaauacaacuugucagacacccaagggugcuauaaacaccagccucccauuucagaauauacauccgaucacaauuggaaaauguccaaaauauguaaaaagcacaaaauugagacuggccacaggauugaggaaugucccgucuauucaaucuagaggccuauuuggggccauugccggcuucauugaagggggguggacagggaugguagauggaugguacgguuaucaccaucaaaacgagcaggggucaggauaugcagccgaccugaagagcacacagaaugccauugacaagauuacuaacaaaguaaauucuguuauugaaaagaugaauacacaguucacagcaguagguaaagaguucaaccaccuggaaaaaagaauagagaauuuaaauaaaaaaguugaugaugguuuucuggacauuuggacuuacaaugccgaacuguugguucuauuggaaaaugaaagaacuuuggacuaccacgauucaaaugugaagaacuuauaugaaaagguaagaaaccaguuaaaaaacaaugccaaggaaauuggaaauggcugcuuugaauuuuaccacaaaugcgauaacacgugcauggaaagugucaaaaaugggacuuaugacuacccaaaauacucagaggaagcaaaauuaaacagagaagaaauagaugggguaaagcuggaaucaacaaggauuuaccagauuuuggcgaucuauucaacugucgccaguucauugguacugguagucucccugggggcaaucaguuuuuggaugugcucuaaugggucucuacaguguagaauauguauuuaa

SEQ ID NO: 39909 - RNA, 1701 nt, Artificial Sequence; identical to SEQ ID NO: 39908
  derived and/or modified CDS sequence (wt) from hemagglutinin__InfluenzaA__AEW22722

SEQ ID NO: 39910 - RNA, 1701 nt, Artificial Sequence
  derived and/or modified CDS sequence (wt) from hemagglutinin__InfluenzaA__AEW22724
augaaggcaauacuaguaguucugcuauauacauuugcaaccgcaaaugcagacacauuauguauagguuaccaugcgaacaauucaacagacacuguagacacaguacuagaaaagaauguaacaguaacacacucuguuaaucuucuagaagacaagcauaacgggaaacuaugcaaacuaagagggguggccccauugcauuuggguaaauguaacauugcuggcuggauccugggaaauccagagugugaaucacucuccacagcaagcucaugguccuacauuguggaaacaucuaguucagacaauggaacguguuacccaggagauuucaucgauuaugaggagcuaagagagcaauugagcucagugucaucauuugaaagguuugaaauauuccccaagacaaguucauggcccaaucaugacucgaacaaagguguaacggcagcauguccucaugcuggagcaaaaggcuucuacaaaaauuuaauauggcuaguuaaaaaaggaaauucauacccaaagcucagcaaauccuacauuaaugauaaagggaaagaaguccucgugcuauggggcauucaccauccaucuacuacugcugaccaacaaagucucuaucagaaugcagauacauauguuuuuguggggacaucaagauacagcaagaaguucaagccggaaauagcaauaagacccaaagugagggaucaagaagggagaaugaacuauuacuggacacuaguagagccgggagacaaaauaacauucgaagcaacuggaaaucuagugguaccgagauaugcauucgcaauggaaagaaaugcuggaucugguauuaucauuucagauacaccaguccacgauugcaauacaacuugucagacacccaagggugcuauaaacaccagccucccauuucagaauauacauccgaucacaauuggaaaauguccaaaauauguaaaaagcacaaaauugagacuggccacaggauugaggaaugucccgucuauucaaucuagaggccuauuuggggccauugccggcuucauugaagggggguggacagggaugguagauggaugguacgguuaucaccaucaaaacgagcaggggucaggauaugcagccgaccugaagagcacacagaaugccauugacaagauuacuaacaaaguaaauucuguuauugaaaagaugaauacacaguucacagcaguagguaaagaguucaaccaccuggaaaaaagaauagagaauuuaaauaaaaaaguugaugaugguuuucuggacauuuggacuuacaaugccgaacuguugguucuauuggaaaaugaaagaacuuuggacuaccacgauucaaaugugaagaacuuauaugaaaagguaagaaaccaguuaaaaaacaaugccagggaaauuggaaauggcugcuuugaauuuuaccacaaaugcgauaacacgugcauggaaagugucaaaaaugggacuuaugacuacccaaaauacucagaggaagcaaaauuaaacagagaagaaauagaugggguaaagcuggaaucaacaaggauuuaccagauuuuggcgaucuauucaacugucgccaguucauugguacugguagucucccugggggcaaucaguuuuuggaugugcucuaaugggucucuacaguguagaauauguauuuaa

SEQ ID NO: 39911 - RNA, 1701 nt, Artificial Sequence
  derived and/or modified CDS sequence (wt) from hemagglutinin__InfluenzaA__AEW25297
augaaggcaauacuaguaguucugcuauauacauuugcaaccgcaaaugcagacacauuauguauagguuaucaugcgaacaauucaacagacacuguagacacaguacuagaaaagaauguaacaguaacacacucuguuaaccuucuagaagacaagcauaacgggaaacuaugcaaacuaagagggguagccccauugcauuuggguaaauguaacauugcuggcuggaucccgggaaauccagagugugaaucacucuccacagcaagcucaugguccuacauuguggaaacaucuaguucagacaauggaacguguuacccaggagauuucaucgauuaugaggagcuaagagagcaauugagcucagugucaucauuugaaagguuugagauauuccccaagacaaguucauggcccaaucaugacccgaacaaagguguaacggcagcauguccucaugcuggagcaaaaagcuucuacaaaaauuuaauauggcuaguuaaaaaaggaaauucauacccaaagcucagcaaauccuacauuaaugauaaagggaaagaaguccucgugcuauggggcauucaccauccaucuacuagugcugaccaacaaagucucuaucagaaugcagaugcauauguuuuuguggggacaucaagauacagcaagaaguucaagccggaaauagcaauaagacccaaagugagggaucaagaagggagaaugaacuauuacuggacacuaguagagccgggagacaaaauaacauucgaagcaacuggaaaucuagugguaccgagauaugcauucgcaauggaaagaaaugcuggaucugguauuaucauuucagauacaccaguccacgauugcaauacaacuugucagacacccaggggugcuauaaacaccagccucccauuucagaauauacauccgaucacaauuggaaaauguccaaaauauguaaaaagcacaaaauugagacuggccacaggauugaggaaugucccgucuauucaaucuagaggccuauuuggggccauugccgguuucauugaagggggguggacagggaugguagauggaugguacgguuaucaccaucaaaaugagcaggggucaggauaugcagccgaccugaagagcacacagaaugccauugacgagauuacuaacaaaguaaauucuguuauugaaaagaugaauacacaguucacagcaguagguaaagaguucaaccaccuggaaaaaagaauagagaauuuaaauaaaaaaguugaugaugguuuccuggacauuuggacuuacaaugccgaacuguugguucuauuggaaaaugaaagaacuuuggacuaccacgauucaaaugugaagaacuuauaugaaaagguaagaagccaguuaaaaaacaaugccaaggaaauuggaaacggcugcuuugaauuuuaccacaaaugcgauaacacgugcauggaaagugucaaaaaugggacuuaugacuacccaaaauacucagaggaagcaaaauuaaacagagaagaaauagaugggguaaagcuggaaucaacaaggauuuaccagauuuuggcgaucuauucaacugucgccaguucauugguacugguagucucccugggggcaaucaguuucuggaugugcucuaaugggucucuacaguguagaauauguauuuaa

SEQ ID NO: 39912 - RNA, 1701 nt, Artificial Sequence
  derived and/or modified CDS sequence (wt) from hemagglutinin__InfluenzaA__AEW25306
augaaggcaauacuaguaguucugcuauauacauuugcaaccgcaaaugcagacacauuauguauagguuaucaugcgaacaauucaacagacacuguagacacaguacuagaaaagaauguaacaguaacacacucuguuaaccuucuagaagacaagcauaacgggaaacuaugcaaacuaagagggguagccccauugcauuuggguaaaugcaacauugcuggcuggauccugggaaauccagagugugaaucacucuccacagcaagcucaugguccuacauuguggaaacaucuaguucagacaauggaacguguuacccaggagauuucaucgauuaugaggagcuaagagagcaauugagcucagugucaucauuugaaagguuugagauauuccccaagacaaguucauggcccaaucaugacccgaacaaagguguaacggcagcauguccucaugcuggagcaaaaagcuucuacaaaaauuuaauauggcuaguuaaaaaaggaaauucauacccaaagcucagcaaauccuacauuaaugauaaagggaaagaaguccucgugcuauggggcauucaccauccaucuacuagugcugaccaacaaagucucuaucagaaugcagaugcauauguuuuuguggggacaucaagauacagcaagaaguucaagccggaaauagcaauaagacccaaagugagggaucaagaagggagaaugaacuauuacuggacacuaguagagccgggagacaaaauaacauucgaagcaacuggaaaucuagugguaccgagauaugcauucgcaauggaaagaaaugcuggaucugguauuaucauuucagauacaccaguccacgauugcaauacaacuugucagacgcccaagggugcuauaaacaccagccucccauuucagaauauacauccgaucacaauuggaaaauguccaaaauauguaaaaagcacaaaauugagacuggccacaggauugaggaaugucccgucuauucaaucuagaggccuauuuggggccauugccgguuucauugaagggggguggacagggaugguagauggaugguacgguuaucaccaucaaaaugagcaggggucaggauaugcagccgaccugaagagcacacagaaugccauugacgagauuacuaacaaaguaaauucuguuauugaaaagaugaauacacaguucacagcaguagguaaagaguucaaccaccuggaaaaaagaauagagaauuuaaauaaaaaaguugaugaugguuuccuggacauuuggacuuacaaugccgaacuguugguucuauuggaaaaugaaagaacuuuggacuaccacgauucaaaugugaagaacuuauaugaaaagguaagaagccaguuaaaaaacaaugccaaggaaauuggaaacggcugcuuugaauuuuaccacaaaugcgauaacacgugcauggaaagugucaaaaaugggacuuaugacuacccaaaauacucagaggaagcaaaauuaaacagagaagaaauagaugggguaaagcuggaaucaacaaggauuuaccagauuuuggcgaucuauucaacugucgccaguucauugguacugguagucucccugggggcaaucaguuucuggaugugcucuaaugggucucuacaguguagaauauguauuuaa

SEQ ID NO: 39913 - RNA, 1701 nt, Artificial Sequence
  derived and/or modified CDS sequence (wt) from hemagglutinin__InfluenzaA__AEW25315
augaaggcaauacuaguaguucugcuauauacauuugcaaccgcaaaugcagacacauuauguauagguuaucaugcgaacaauucaacagacacuguagacacaguacuagaaaagaauguaacaguaacacacucuguuaaccuucuagaagacaagcauaacgggaaacuaugcaaacuaagagggguagccccauugcauuuggguaaauguaacauugcuggcuggauccugggaaauccagagugugaaucacucuccacagcaagcucaugguccuacauuguggaaacaucuaguucagacaauggaacguguuacccaggagauuucaucgauuaugaggagcuaagagagcaauugagcucagugucaucauuugaaagguuugagauauuccccaagacaaguucauggcccaaucaugacccgaacaaagguguaacggcagcauguccucaugcuggagcaaaaagcuucuacaaaaauuuaauauggcuaguuaaaaaaggaaauucauacccaaagcucagcaaguccuacauuaaugauaaagggaaagaaguccucgugcuauggggcauucaccauccaucuacuagugcugaccaacaaagucucuaucagaaugcagaugcauauguuuuuguggggacaucaagauacagcaagaaguucaagccggaaauagcaauaagacccaaagugagggaucaagaagggagaaugaacuauuacuggacacuaguagagccgggagacaaaauaacauucgaagcaacuggaaaucuagugguaccgagauaugcauucgcaauggaaagaaaugcuggaucugguauuaucauuucagauacaccaguccacgauugcaauacaacuugucagacacccaagggugcuauaaacaccagccucccauuucagaauauacauccgaucacaauuggaaaauguccaaaauauguaaaaagcacaaaauugagacuggccacaggauugaggaaugucccgucuauucaaucuagaggccuauuuggggccauugccgguuucauugaagggggguggacagggaugguagauggaugguacgguuaucaccaucaaaaugagcaggggucaggauaugcagccgaccugaagagcacacagaaugccauugacgagauuacuaacaaaguaaauucuguuauugaaaagaugaauacacaguucacagcaguagguaaagaguucaaccaccuggaaaaaagaauagagaauuuaaauaaaaaaguugaugaugguuuccuggacauuuggacuuacaaugccgaacuguugguucuauuggaaaaugaaagaacuuuggacuaccacgauucaaaugugaagaacuuauaugaaaagguaagaagccaguuaaaaaacaaugccaaggaaauuggaaacggcugcuuugaauuuuaccacaaaugcgauaacacgugcauggaaagugucaaaaaugggacuuaugacuacccaaaauacucagaggaagcaaaauuaaacagagaagaaauagaugggguaaagcuggaaucaacaaggauuuaccagauuuuggcgaucuauucaacugucgccaguucauugguacugguagucucccugggggcaaucaguuucugggugugcucuaaugggucucuacaguguagaauauguauuuaa

SEQ ID NO: 39914 - RNA, 1701 nt, Artificial Sequence
  derived and/or modified CDS sequence (wt) from hemagglutinin__InfluenzaA__AEW25331
augaaggcaauacuaguaguucugcuauauacauuugcaaccgcaaaugcagacacauuauguauagguuaucaugcgaacaauucaacagacacuguagauacaguacuagaaaagaauguaacaguaacacacuccguuaaccuucuagaagacaagcauaacgggaaacuaugcaaacuaagagggguagccccauugcauuuggguaaauguaacauugcuggcuggauccugggaaauccagagugugaaucauucuccacaucaagcucaugguccuacauuguggaaacaucuaguucagacaauggaacguguuacccaggagauuucaucgauuaugaggagcuaagagagcaauugagcucagugucaucauuugaaagguuugagauauuccccaagacaaguucauggcccaaucaugacucgaacaaagguguaacggcagcauguccucaugcuggagcaaaaagcuucuacaaaaauuuaauauggcuaguuaaaaaaggaaauucauacccaaagcucagcaaauccuacauuaaugauaaagggaaagaaguccucgugcuauggggcauucaccauccaucuacuagugcugaccaacaaagucucuaucagaaugcagaugcauauguuuuuguggggacaucaagauacagcaagaaguucaagccggaaauagcaauaagacccaaagugagggaucaagaagggagaaugaacuauuacuggacacuaguagagccgggagacaaaauaacauucgaagcaacuggaaaucuagugguaccgagauaugcauucgcaauggaaagaaaugcuggaucugguauuaucauuucagauacaccaguccacgauugcaauacaacuugucagacacccaagggugcuauaaacaccagccucccauuucagaauauaccuccgaucacaauuggaaaauguccaaaauauguaaaaagcacaaaauuaagacuggccacaggauugaggaaugucccgucuauucaaucuagaggccuauuuggggccauugccgguuucauugaagggggguggacagggaugguagauggaugguacgguuaucaccaucaaaaugagcaggggucaggauaugcagccgaccugaagagcacacagaaugccauugacgagauuacuaacaaaguaaauucuguuauugaaaagaugaauacacaguucacagcaguagguaaagaguucaaccaccuggaaaaaagaauagagaauuuaaauaaaaaaguugaugaugguuuccuggacauuuggacuuacaaugccgaacuguugguucuauuggaaaaugaaagaacuuuggacuaccacgauucaaaugugaagaacuuauaugaaaagguaagaagccaguuaaaaaacaaugccaaggaaauuggaaacggcugcuuugaauuuuaccacaaaugcgauaacacgugcauggaaagugucaaaaaugggacuuaugacuacccaaaauacucagaggaagcaaaauuaaacagagaagaaauagaugggguaaagcuggaaucaacaaggauuuaccagauuuuggcgaucuauucaacugucgccaguucauugguacugguagucucccugggggcaaucaguuucuggaugugcucuaaugggucucuacaguguagaauauguauuuaa

SEQ ID NO: 39915 - RNA, 1701 nt, Artificial Sequence
  derived and/or modified CDS sequence (wt) from hemagglutinin__InfluenzaA__AEW25349
augaaggcaauacuaguaguucugcuauauacauuugcaaccgcaaaugcagacacauuauguauagguuaucaugcgaacaauucaacagacacuguagacacaguacuagaaaagaauguaacaguaacacacucuguuaaccuucuagaagacaagcauaacgggaaacuaugcaaacuaagagggguagccccauugcauuuggguaaauguaacauugcuggcuggauccugggaaauccagagugugaaucauucuccacaucaagcucaugguccuacauuguggaaacaucuaguucagacaauggaacguguuacccaggagauuucaucgauuaugaggagcuaagagagcaauugagcucagugucaucauuugaaagguuugagauauuccccaagacaaguucauggcccaaucaugacucgaacaaagguguaacggcagcauguccucaugcuggagcaaaaagcuucuacaaaaauuuaauauggcuaguuaaaaaaggaaauucauacccaaagcucagcaaauccuacauuaaugauaaagggaaagaaguccucgugcuauggggcauucaccauccaucuacuagugcugaccaacaaagucucuaucagaaugcagaugcauauguuuuuguggggacaucaagauacagcaagaaguucaagccggaaauagcaauaagacccaaagugagggaucaagaagggagaaugaacuauuacuggacacuaguagagccgggagacaaaauaacauucgaagcaacuggaaaucuagugguaccgagauaugcauucgcaauggaaagaaaugcuggaucugguauuaucauuucagauacaccaguccacgauugcaauacaacuugucagacacccaagggugcuauaaacaccagccucccauuucagaauauacauccgaucacaauuggaaaauguccaaaauauguaaaaagcacaaaauugagacuggccacaggauugaggaaugucccgucuauucaaucuagaggccuauuuggggccauugccgguuucauugaagggggguggacagggaugguagauggaugguacgguuaucaccaucaaaaugagcaggggucaggauaugcagccgaccugaagagcacacagaaugccauugacgagauuacuaacaaaguaaauucuguuauugaaaagaugaauacacaguucacagcaguagguaaagaguucaaccaccuggaaaaaagaauagagaauuuaaauaaaaaaguugaugaugguuuccuggacauuuggacuuacaaugccgaacuguugguucuauuggaaaaugaaagaacuuuggacuaccacgauucaaaugugaagaacuuauaugaaaagguaagaagccaguuaaaaaacaaugccaaagaaauuggaaacggcugcuuugaauuuuaccacaaaugcgauaacacgugcauggaaagugucaaaaaugggacuuaugacuacccaaaauacucagaggaagcaaaauuaaacagagaagaaauagaugggguaaagcuggaaucaacaaggauuuaccagauuuuggcgaucuauucaacugucgccaguucauugguacugguagucucccugggggcaaucaguuucuggaugugcucuaaugggucucuacaguguagaauauguauuuaa

SEQ ID NO: 39916 - RNA, 1701 nt, Artificial Sequence
  derived and/or modified CDS sequence (wt) from hemagglutinin__InfluenzaA__AEW25367
augaaggcaauacuaguaguucugcuauauacauuugcaaccgcaaaugcagacacauuauguauagguuaucaugcgaacaauucaacagacacuguagauacaguacuagaaaagaauguaacaguaacacacuccguuaaccuucuagaagacaagcauaacgggaaacuaugcaaacuaagagggguagccccauugcauuuggguaaauguaacauugcuggcuggauccugggaaauccagagugugaaucauucuccacaucaagcucaugguccuacauuguggaaacaucuaguucagacaauggaacguguuacccaggagauuucaucgauuaugaggagcuaagagagcaauugagcucagugucaucauuugaaagguuugagauauuccccaagacaaguucauggcccaaucaugacucgaacaaagguguaacggcagcauguccucaugcuggagcaaaaagcuucuacaaaaauuuaauauggcuaguuaaaaaaggaaauucauacccaaagcucagcaaauccuacauuaaugauaaagggaaagaaguccucgugcuauggggcauucaccauccaucuacuagugcugaccaacaacgucucuaucagaaugcagaugcauauguuuuuguggggacaucaagauacagcaagaaguucaagccggaaauagcaauaagacccaaagugagggaucaagaagggagaaugaacuauuacuggacacuaguagagccgggagacaaaauaacauucgaagcaacuggaaaucuagugguaccgagauaugcauucgcaauggaaagaaaugcuggaucugguauuaucauuucagauacaccaguccacgauugcaauacaacuugucagacacccaagggugcuauaaacaccagccucccauuucagaauauacauccgaucacaauuggaaaauguccaaaauauguaaaaagcacaaaauuaagacuggccacaggauugaggaaugucccgucuauucaaucuagaggccuauuuggggccauugccgguuucauugaagggggguggacagggaugguagauggaugguacgguuaucaccaucaaaaugagcaggggucaggauauacagccgaccugaagagcacacagaaugccauugacgagauuacuaacaaaguaaauucuguuauugaaaagaugaauacacaguucacagcaguagguaaagaguucaaccaccuggaaaaaagaauagagaauuuaaauaaaaaaguugaugaugguuuccuggacauuuggacuuacaaugccgaacuguugguucuauuggaaaaugaaagaacuuuggacuaccacgauucaaaugugaagaacuuauaugaaaagguaagaagccaguuaaaaaacaaugccaaggaaauuggaaacggcugcuuugaauuuuaccacaaaugcgauaacacgugcauggaaagugucaaaaaugggacuuaugacuacccaaaauacucagaggaagcaaaauuaaacagagaagaaauagaugggguaaagcuggaaucaacaaggauuuaccagauuuuggcgaucuauucaacugucgccaguucauugguacugguagucucccugggggcaaucaguuucuggaugugcucuaaugggucucuacaguguagaauauguauuuaa

SEQ ID NO: 39917 - RNA, 1701 nt, Artificial Sequence
  derived and/or modified CDS sequence (wt) from hemagglutinin__InfluenzaA__AEW25377
augaaggcaauacuaguaguucugcuauauacauuugcaaccgcaaaugcagacacauuauguauagguuaucaugcgaacaauucaacagacacuguagacacaguacuagaaaagaauguaacaguaacacacucuguuaaccuucuagaagacaagcauaacgggaaacuaugcaaacuaagagggguagccccauugcauuuggguaaauguaacauugcuggcuggauccugggaaauccagagugugaaucacucuccacagcaagcucaugguccuacauuguggaaacaucuaguucagacaauggaacguguuacccaggagauuucaucgauuaugaggagcuaagagagcaauugagcucagugucaucauuugaaagguuugagauauuccccaagacaaguucauggcccaaucaugacucgaacaaaggugugacgacagcauguccucaugcuggagcaaaaagcuucuacaaaaauuuaauauggcuaguuaaaaaaggaaauucauacccaaagcucagcaaauccuacauuaaugauaaagggaaagaaguccucgugcuauggggcauucaccauccaucuacuagugcugaccaacaaagucucuaucagaaugcagaugcauauguuuuuguggggacaucaagauacagcaagaaguucaagccggaaauagcaauaagacccaaagugagggaucaagaagggagaaugaacuauuacuggacacuaguagagccgggagacaaaauaacauucgaagcaacuggaaaucuagugguaccgagauaugcauucgcaauggaaagaaaugcuggaucugguauuaucauuucagauacaccaguccacgauugcaauacaacuugucagacacccaagggugcuauaaacaccagccucccauuucagaacauacauccgaucacaauuggaaaauguccaaaauauguaaaaagcacaaaauugagacuggccacaggauugaggaaugucccgucuauucaaucuagaggccuauuuggggccauugccgguuucauugaagggggguggacagggaugguagauggaugguacgguuaucaccaucaaaaugagcaggggucaggauaugcagccgaccugaagagcacacagaaugccauugacgagauuacuaacaaaguaaauucuguuauugaaaagaugaauacacaguucacagcaguagguaaagaguucaaccaccuggaaaaaagaauagagaauuuaaauaaaaaaguugaugaugguuuccuggacauuuggacuuacaaugccgaacuguugguucuauuggaaaaugaaagaacuuuggacuaccacgauucaaaugugaagaacuuauaugaaaagguaaaaagccaguuaaagaacaaugccaaggaaauuggaaacggcugcuuugaauuuuaccacaaaugcgauaacgcgugcauggaaagugucaaaaaugggacuuaugacuacccaaaauacucagaggaagcaaaauuaaacagagaagaaauagaugggguaaagcuggaaucaacaaggauuuaccagauuuuggcgaucuauucaacugucgccaguucauugguacugguagucucccugggggcaaucaguuucuggaugugcucuaaugggucucuacaguguagaauauguauuuaa

SEQ ID NO: 39918 - RNA, 1701 nt, Artificial Sequence
  derived and/or modified CDS sequence (wt) from hemagglutinin__InfluenzaA__AEW25385
augaaggcaauacuaguaguucugcuauauacauuugcaaccgcaaaugcagacacauuauguauagguuaucaugcgaacaauucaacagacacuguagacacaguacuagaaaagaauguaacaguaacacacucuguuaaccuucuagaagacaagcauaacgggaaacuaugcaaacuaagagggguagccccauugcauuuggguaaauguaacauugcuggcuggauccugggaaauccagagugugaaucacucuccacagcaagcucaugguccuacauuguggaaacaucuaguucagacaauggaacguguuacccaggagauuucaucgauuaugaggagcuaagagagcaauugagcucagugccaucauuugaaagguuugagauauuccccaagacaaguucauggcccaaucaugacucgaacaaagguguaacggcagcauguccucaugcuggagcaaaaagcuucuacaaaaauuuaauauggcuaguuaaaaaaggaaauucauacccaaagcucagcaaauccuacauuaaugauaaagggaaagaaguccucgugcuauggggcauucaccauccaucuacuagugcugaccaacaaagucucuaucagaaugcagaugcauauguuuuugugggaacaucaagauacagcaagaaguucaagccggaaauagcaauaagacccaaagugagggaucaagaagggagaaugaacuauuacuggacacuaguagagccgggagacaaaauaacauucgaagcaacugggaaucuagugguaccgagauaugcauucgcaauggaaagaaaugcuggaucugguauuaucauuucagauacaccaguccacgauugcaauacaacuugucagacacccaagggugcuauaaacaccagccucccauuucagaauauacauccgaucacaauuggaaaauguccaaaauauguaaaaagcacaaaauugagacuggccacaggauugaggaaugucccgucuauucaaucuagaggccuauuuggggccauugccgguuucauugaagggggguggacagggaugguagauggaugguacgguuaucaccaucaaaaugagcaggggucaggauaugcagccgaccugaagagcacacagaaugccauugacaagauuacuaacaaaguaaauucuguuauugaaaagaugaauacacaguucacagcaguagguaaagaguucaaccaccuggaaaaaagaauagagaauuuaaauaaaaaaguugaugaugguuuccuggacauuuggacuuacaaugccgaacuguugguucuauuggaaaaugaaagaacuuuggacuaccacgauucaaaugugaagaacuuauaugaaaagguaagaagccaguuaaaaaacaaugccaaggaaauuggaaacggcugcuuugaauuuuaccacaaaugcgauaacacgugcauggaaagugucaaaaaugggacuuaugacuacccaaaauacucagaggaagcaaaauuaaacagagaagaaauagaugggguaaagcuggaaucaacaaggauuuaccagauuuuggcgaucuauucaacugucgccaguucauugguacugguagucucccugggggcaaucaguuucuggaugugcucuaaugggucucuacaguguagaauauguauuuaa

SEQ ID NO: 39919 - RNA, 1701 nt, Artificial Sequence
  derived and/or modified CDS sequence (wt) from hemagglutinin__InfluenzaA__AEW25416
augaaggcaauacuaguaguucugcuauauacauuugcaaccgcaaaugcagacacauuauguauagguuaucaugcgaacaauucaacagacacuguagacacaguacuagaaaagaauguaacuguaacacacuccguuaaccuucuagaagacaagcauaacgggaaacuaugcaaacuaagagggguagccccauugcauuuggguaaauguaacauugcuggcuggauccugggaaauccagagugugaaucauucuccacaucaagcucaugguccuacauuguggaaacaucuaguucagacaauggaacguguuacccaggagauuucaucgauuaugaggagcuaagagagcaauugagcucagugucaucauuugaaagguuugagauauuccccaagacaaguucauggcccaaucaugacucgaacaaagguguaacggcagcauguccucaugcuggagcaaaaagcuucuacaaaaauuuaauauggcuaguuaaaaaaggaaauucauacccaaagcucagcaaauccuacauuaaugauaaagggaaagaaguccucgugcuauggggcauucaccauccaucuacuagugcugaccaacaaagucucuaucagaaugcagaugcauauguuuuuguggggacaucaagauacagcaagaaguucaagccggaaauagcaauaagacccaaagugagggaucaagaagggagaaugaacuauuacuggacacuaguagagccgggagacaaaauaacauucgaagcaacuggaaaucuagugguaccgagauaugcauucgcaauggaaagaaaugcuggaucugguauuaucauuucagauacaccaguccacgauugcaauacaacuugucagacacccaagggugcuauaaacaccagccucccauuucagaauauacauccgaucacaauuggaaaauguccaaaauauguaaaaagcacaaaauuaagacuggccacaggauugaggaaugucccgucuauucaaucuagaggccuauuuggggccauugccgguuucauugaagggggguggacagggaugguagauggaugguacgguuaucaccaucaaaaugagcaggggucaggauaugcagccgaccugaagagcacacagaaugccauugacgagauuacuaacaaaguaaauucuguuauugaaaagaugaauacacaguucacagcaguagguaaagaguucaaccaccuggaaaaaagaauagagaauuuaaauaaaaaaguugaugaugguuuccuggacauuuggacuuacaaugccgaacuguugguucuauuggaaaaugaaagaacuuuggacuaccacgauucaaaugugaagaacuuauaugaaaagguaagaagccaguuaaaaaacaaugccaaggaaauuggaaacggcugcuuugaauuuuaccacaaaugcgauaacacgugcauggaaagugucaaaaaugggacuuaugacuacccaaaauacucagaggaagcaaaauuaaacagagaagaaauagaugggguaaagcuggaaucaacaaggauuuaccagauuuuggcgaucuauucaacugucgccaguucauugguacugguagucucccugggggcaaucaguuucuggaugugcucuaaugggucucuacaguguagaauauguauuuaa

SEQ ID NO: 39920 - RNA, 1701 nt, Artificial Sequence
  derived and/or modified CDS sequence (wt) from hemagglutinin__InfluenzaA__AEW25446
augaaggcaauacuaguaguucugcuauauacauuugcaaccgcaaaugcagacacauuauguauagguuaucaugcgaacaauucaacagacacuguagacacaguacuagaaaagaauguaacaguaacacacucuguuaaccuucuagaagacaagcauaacgggaaacuaugcaaacuaagagggguagccccauugcauuuggguaaauguaacauugcuggcuggauccugggaaauccagagugugaaucacucuccacagcaagcucaugguccuacauuguggaaacaucuaguucagacaauggaacguguuacccaggagauuucaucgauuaugaggagcuaagagagcaauugagcucagugucaucauuugaaagguuugagauauuccccaagacaaguucauggcccaaucaugacccgaacaaagguguaacggcagcauguccucaugcuggagcaaaaagcuucuacaaaaauuuaauauggcuaguuaaaaaaggaaauucauacccaaagcucagcaaauccuacauuaaugauaaagggaaagaaguccucgugcuauggggcauucaccauccaucuacuagugcugaccaacaaagucucuaucagaaugcagaugcauauguuuuuguggggacaucaagauacagcaagaaguucaagccggaaauagcaauaagacccaaagugagggaucaagaagggagaaugaacuauuacuggacacuaguagagccgggagacaaaauaacauucgaagcaacuggaaaucuagugguaccgagauaugcauucgcaauggaaagaaaugcuggaucugguauuaucauuucagauacaccaguccacgauugcaauacaacuugucagacacccaagggugcuauaaacaccagccucccauuucagaauauacauccgaucacaauuggaaaauguccaaaauauguaaaaagcacaaaauugagacuggccacaggauugaggaaugucccgucuauucaaucuagaggccuauuuggggccauugccgguuucauugaagggggguggacagggaugguagauggaugguacgguuaucaccaucaaaaugagcaggggucaggauaugcagccgaccugaagagcacacagaaugccauugacgagauuacuaacaaaguaaauucuguuauugaaaagaugaauaaacaguucacagcaguaggcaaagaguucaaccaccuggaaaaaagaauagagaauuuaaauaaaaaaguugaugaugguuuccuggacauuuggacuuacaaugccgaacuguugguucuauuggaaaaugaaagaacuuuggacuaccacgauucaaaugugaagaacuuauaugaaaagguaagaagccaguuaaaaaacaaugccaaggaaauuggaaacggcugcuuugaauuuuaccacaaaugcgauaacacgugcauggaaagugucaaaaaugggacuuaugacuacccaaaauacucagaggaagcaaaauuaaacagagaagaaauagaugggguaaagcuggaaucaacaaggauuuaccagauuuuggcgaucuauucaacugucgccaguucauugguacugguagucucccugggggcaaucaguuucuggaugugcucuaaugggucucuacaguguagaauauguauuuaa

SEQ ID NO: 39921 - RNA, 1701 nt, Artificial Sequence
  derived and/or modified CDS sequence (wt) from hemagglutinin__InfluenzaA__AEW25454
augaaggcaauacuaguaguucugcuauauacauuugcaaccgcaaaugcagacacauuauguauagguuaucaugcgaacaauucaacagacacuguagacacaguacuagaaaagaauguaacaguaacacacuccguuaaccuucuagaagacaagcauaacgggaaacuaugcaaacuaagagggguagccccauugcauuuggguaaauguaacauugcuggcuggauccugggaaauccagagugugaaucauucuccacaucaagcucaugguccuacauuguggaaacaucuaguucagacaauggaacguguuacccaggagauuucaucgauuaugaggagcuaagagagcaauugagcucagugucaucauuugaaagguuugagauauuccccaagacaaguucauggcccaaucaugacucgaacaaagguguaacggcagcauguccucaugcuggagcaaaaagcuucuacaaaaauuuaauauggcuaguuaaaaaaggaaauucauacccaaagcucagcaaauccuacauuaaugauaaagggaaagaaguccucgugcuauggggcauucaccauccaucuacuagugcugaccaacaaagucucuaucagaaugcagaugcauauguuuuuguggggacaucaagauacagcaagaaguucaagccggaaauagcaauaagacccaaagugagggaucaagaagggagaaugaacuauuacuggacacuaguagagccgggagacaaaauaacauucgaagcaacuggaaaucuagugguaccgagauaugcauucgcaauggaaagaaaugcuggaucugguauuaucauuucagauacaccaguccacgauugcaauacaacuugucagacacccaagggugcuauaaacaccagccucccauuucagaauauacauccgaucacaauuggaaaauguccaaaauauguaaaaagcacaaaauugagacuggccacaggauugaggaaugucccgucuauucaaucuagaggccuauuuggggccauugccgguuucauugaagggggguggacagggaugguagacggaugguacgguuaucaccaucaaaaugagcaggggucaggauaugcagccgaccugaagagcacacagaaugccauugacgagauuacuaacaaaguaaauucuguuauugaaaagaugaauacacaguucacagcaguagguaaagaguucaaccaccuggaaaaaagaauagagaauuuaaauaaaaaaguugaugaugguuuccuggacauuuggacuuacaaugccgaacuguugguucuauuggaaaaugaaagaacuuuggacuaccacgauucaaaugugaagaacuuauaugaaaagguaagaagccaguuaaaaaacaaugccaaggaaauuggaaacggcugcuuugaauuuuaccacaaaugcgauaacacgugcauggaaagugucaaaaaugggacuuaugacuacccaaaauacucagaggaagcaaaauuaaacagagaagaaauagaugggguaaagcuggaaucaacaaggauuuaccagauuuuggcgaucuauucaacugucgccaguucauugguacugguagucucccugggggcaaucaguuucuggaugugcucuaaugggucucuacaguguagaauauguauuuaa

SEQ ID NO: 39922 - RNA, 1701 nt, Artificial Sequence
  derived and/or modified CDS sequence (wt) from hemagglutinin__InfluenzaA__AEW25462
augaaggcaauacuaguaguucugcuauauacuuuugcaaccgcaaaugcagacacauuauguauagguuaucaugcgaacaauucaacagacacuguagacacaguacuagaaaagaauguaacaguaacacacucuguuaaccuucuagaagacaagcauaacgggaaacuaugcaaacuaagagggguagccccauugcauuuggguaaauguaacauugcuggcuggauccugggaaauccagagugugaaucacucuccacagcaagcucaugguccuacauuguggaaacaucuaguucagacaauggaacguguuacccaggagauuucaucgauuaugaggagcuaagagagcaauugagcucagugucaucauuugaaagguuugagauauuccccaagacaaguucauggcccaaucaugacccgaacaaagguguaacggcagcauguccucaugcuggagcaaaaagcuucuacaaaaauuuaauauggcuaguuaaaaaaggaaauucauacccaaagcucagcaaacccuacacuaaugauaaagggaaagaaguccucgugcuauggggcauucaccauccaucuacuagugcugaccaacaaagucucuaucagaaugcagaugcauauguuuuuguggggacaucaagauacagcaagaaguucaagccggaaauagcaauaagacccaaagugagggaucaagaagggagaaugaacuauuacuggacacuaguagagccgggagacaaaauaacauucgaagcaacuggaaaucuagugguaccgagauaugcauucgcaauggaaagaaaugcuggaucugguauuaucauuucagauacaccaguccacgauugcaauacaacuugucagacacccaagggugcuauaaacaccagccucccauuucagaauauacauccgaucacaauuggaaaauguccaaaauauguaaaaagcacaaaauugagacuggccacaggauugaggaaugucccgucuauucaaucuagaggccuauuuggggccauugccgguuucauugaagggggguggacagggaugguagauggaugguacgguuaucaccaucaaaaugagcaggggucaggauaugcagccgaccugaagagcacacagaaugccauugacgagauuacuaacaaaguaaauucuguuauugaaaagaugaauacacaguucacagcaguagguaaagaguucaaccaccuggaaaaaagaauagagaauuuaaauaaaaaaguugaugaugguuuccuggacauuuggacuuacaaugccgaacuguugguucuauuggaaaaugaaagaacuuuggacuaccacgauucaaaugugaagaacuuauaugaaaagguaagaagccaguuaaaaaacaaugccaaggaaauuggaaacggcugcuuugaauuuuaccacaaaugcgauaacacgugcauggaaagugucaaaaaugggacuuaugacuacccaaaauacucagaggaagcaaaauuaaacagagaagaaauagaugggguaaagcuggaaucaacaaggauuuaccagauuuuggcgaucuauucaacugucgccaguucauugguacugguagucucccugggggcaaucaguuucuggaugugcucuaaugggucucuacaguguagaauauguauuuaa

SEQ ID NO: 39923 - RNA, 1701 nt, Artificial Sequence
  derived and/or modified CDS sequence (wt) from hemagglutinin__InfluenzaA__AEW25472
augaaggcaauacuaguaguucugcuauauacauuugcaaccgcaaaugcagacacauuauguauagguuaucaugcgaacaauucaacagacacuguagacacaguacuagaaaagaauguaacaguaacacacucuguuaaccuucuagaagacaagcauaacgggaaacuaugcaaacuaagagggguagccccauugcauuuggguaaauguaacauugcuggcuggauccugggaaauccagagugugaaucacucuccacagcaagcucaugguccuacauuguggaaacaucuaguucagacaauggaacguguuacccaggagauuucaucgauuaugaggagcuaagagagcaauugagcucagugucaucauuugaaagguuugagauauuccccaagacaaguucauggcccaaucaugacccgaacaaagguguaacggcagcauguccucaugcuggagcaaaaagcuucuacaaaaauuuaauauggcuaguuaaaaaaggaaauucauacccaaagcucagcaaauccuacauuaaugauaaagggaaagaaguccucgugcuauggggcauucaccauccaucuacuagugcugaccaacaaagucucuaucagaaugcagaugcauauguuuuuguggggacaucaagauacagcaagaaguucaagccggaaauagcaauaagacccaaagugagggaucaagaagggagaaugaacuauuacuggacacuaguagagccgggagacaaaauaacauucgaagcaacuggaaaucuagugguaccgagauaugcauucgcaauggaaagaaaugcuggaucugguauuauuauuucagauacaccaguccacgauugcaauacaacuugucagacacccaagggugcuauaaacaccagccucccauuucagaauauacauccgaucacaauuggaaaauguccaaaauauguaaaaagcacaaaauugagacuggccacaggauugaggaaugucccgucuauucaaucuagaggccuauuuggggccauugccgguuucauugaagggggguggacagggaugguagauggaugguacgguuaucaccaucaaaaugagcaggggucaggauaugcagccgaccugaagagcacacagaaugccauugacgagauuacuaacaaaguaaauucuguuauugaaaagaugaauacacaguucacagcaguagguaaagaguucaaucaccuggaaaaaagaauagagaauuuaaauaaaaaaguugaugaugguuuccuggacauuuggacuuacaaugccgaacuguugguucuauuggaaaaugaaagaacuuuggacuaccacgauucaaaugugaagaacuuauaugaaaagguaagaagccaguuaaaaaacaaugccaaggaaauuggaaacggcugcuuugaauuuuaccacaaaugcgauaacacgugcauggaaagugucaaaaaugggacuuaugacuacccaaaauacucagaggaagcaaaauuaaacagagaagaaauagaugggguaaagcuggaaucaacaaggauuuaccagauuuuggcgaucuauucaacugucgccaguucauugguacugguagucucccugggggcaaucaguuucuggaugugcucuaaugggucucuacaguguagaauauguauuuaa

SEQ ID NO: 39924 - RNA, 1701 nt, Artificial Sequence
  derived and/or modified CDS sequence (wt) from hemagglutinin__InfluenzaA__AEW25482
augaaggcaauacuaguaguucugcuauauacauuugcaaccgcaaaugcagacacauuauguauagguuaucaugcgaacaauucaacagacacuguagacacaguacuagaaaagaaaguaacaguaacacacucuguuaaccuucuagaagacaagcauaacgggaaacuaugcaaacuaagagggguagccccauugcauuuggguaaauguaacauugcuggcuggauccugggaaauccagagugugaaucacucuccacagcaagcucaugguccuacauuguggaaacaucuaauucagacaauggaacguguuacccaggagauuucaucgauuaugaggagcuaagagagcaauugagcucagugucaucauuugaaagguuugagauauuccccaagacaaguucauggcccaaucaugacccgaacaaagguguaacggcagcauguccucaugcuggagcaaaaagcuucuacaaaaauuuaauauggcuaguuaaaaaaggaaauucauacccaaagcucagcaaguccuacauuaaugauaaagggaaagaaguccucgugcuauggggcauucaccauccaucuacuagugcugaccaacaaagucucuaucagaaugcagaugcauauguuuuuguggggacaucaagauacagcaagaaguucaagccggaaauagcaauaagacccaaagugagggaucaaggagggagaaugaacuauuacuggacacuaguagagccgggagacaaaauaacauucgaagcaacuggaaaucuagugguaccgagauaugcauucgcaauggaaagaaaugcuggaucugguauuaucauuucagauacaccaguccacgauugcaauacaacuugucagacacccaagggugcuauaaacaccagccucccauuucagaauauacauccgaucacaauuggaaaauguccaaaauauguaaaaagcacaaaauugagacuggccacaggauugaggaaugucccgucuauucaaucuagaggccuauuuggggccauugccgguuucauugaagggggguggacagggaugguagauggaugguacgguuaucaccaucaaaaugagcaggggucaggauaugcagccgaccugaagagcacacagaaugccauugacgagauuacuaacaaaguaaauucuguuauugaaaagaugaauacacaguucacagcaguagguaaagaguucaaccaccuggaaaaaagaauagagaauuuaaauaaaaaaguugaugaugguuuccuggacauuuggacuuacaaugccgaacuguugguucuauuggaaaaugaaagaacuuuggacuaccacgauucaaaugugaagaacuuauaugaaaagguaagaagccaguuaaaaaacaaugccaaggaaauuggaaacggcugcuuugaauuguaccacaaaugcgauaacacgugcauggaaagugucaaaaaugggacuuaugacuacccaaaauacucagaggaagcaaaauuaaacagagaagaaauagaugggguaaagcuggaaucaacaaggauuuaccagauuuuggcgaucuauucaacugucgccaguucauugguacugguagucucccugggggcaaucaguuucuggaugugcucuaaugggucucuacaguguagaauauguauuuaa

SEQ ID NO: 39925 - RNA, 1701 nt, Artificial Sequence
  derived and/or modified CDS sequence (wt) from hemagglutinin__InfluenzaA__AEW25492
augaaggcaauacuaguaguucugcuauauacauuugcaaccgcaaaugcagacacauuauguauagguuaucaugcaaacaauucaacagacacuguagacacaguacuagaaaagaauguaacaguaacacacucuguuaaccuucuagaagacaagcauaacgggaaacuaugcaaacuaagagggguagccccauugcauuuggguaaauguaacauugcuggcuggauccugggaaauccagagugugaaucacucuccacagcaagcucaugguccuacauuguggaaacaucuaguucagacaauggaacguguuacccaggagauuucaucgauuaugaggagcuaagagagcaauugagcucagugucaucauuugaaagguuugagauauuccccaagacaaguucauggcccaaucaugacccgaacaaagguguaacggcagcauguccucaugcuggagcaaaaagcuucuacaaaaauuuaauauggcuaguuaaaaaaggaaauucauacccaaagcucagcaaauccuacauuaaugauaaagggaaagaaguccucgugcuauggggcauucaccauccaucuacuagugcugaccaacaaagucucuaucagaaugcagaugcauauauuuuuguggggacaucaagauacagcaagaaguucaagccggaaauagcaauaagacccaaagugagggaucaagaagggagaaugaacuauuacuggacacuaguagagccgggagacaaaauaacauucgaagcaacuggaaaucuagugguaccgagauaugcauucgcaauggaaagaaaugcuggaucugguauuaucauuucagauacaccaguccacgauugcaauacaacuugucagacacccaagggugcuauaaacaccagccucccauuucagaauauacauccgaucacaauuggaaaauguccaaaauauguaaaaagcacaaaauugagacuggccacaggauugaggaaugucccgucuauucaaucuagaggccuauuuggggccauugccgguuucauugaagggggguggacagggaugguagauggaugguacgguuaucaccaucaaaaugagcaggggucaggauaugcagccgaccugaagagcacacagaaugccauugacgagauuacuaacaaaguaaauucuguuauugaaaagaugaauacacaguucacagcaguagguaaagaguucaaccaccuggaaaaaagaauagagaauuuaaauaaaaaaguugaugaugguuuccuggacauuuggacuuacaaugccgaacuguugguucuauuggaaaaugaaagaacuuuggacuaccacgauucaaaugugaagaacuuauaugaaaagguaagaagccaguuaaaaaacaaugccaaggaaauuggaaacggcugcuuugaauuuuaccacaaaugcgauaacacaugcauggaaagugucaaaaaugggacuuaugacuacccaaaauacucagaggaagcaaaauuaaacagagaagaaauagaugggguaaagcuggaaucaacaaggauuuaccagauuuuggcgaucuauucaacugucgccaguucauugguacugguagucucccugggggcaaucaguuucuggaugugcucuaaugggucucuacaguguagaauauguauuuaa

SEQ ID NO: 39926 - RNA, 1701 nt, Artificial Sequence
  derived and/or modified CDS sequence (wt) from hemagglutinin__InfluenzaA__AEW25501
augaaggcaauacuaguaguucugcuauauacauuugcaaccgcaaaugcagacacauuauguauagguuaucaugcgaacaauucaacagacacuguagacacaguacuagaaaagaauguaacaguaacacacucuguuaaccuucuagaagacaagcauaacgggaaacuaugcaaacuaagagggguagccccauugcauuuggguaaauguaacauugcuggcuggauccugggaaauccagagugugaaucacucuccacagcaagcucaugguccuacauuguggaaacaucuaguucagacaauggaacguguuacccaggagauuucaucgauuaugaggagcuaagagagcaauugagcucagugucaucauuugaaaaguuugagauauuccccaagacaaguucauggcccaaucaugacucgaacaaagguguaacggcagcauguccucaugcuggagcaaaaagcuucuacaaaaauuuaauaugccuaguuaaaaaaggaaauucauacccaaagcucagcaaauccuacauuaaugauaaagggaaagaaguccucgugcuauggggcauucaccauccaucuacuagugcugaccaacaaagucucuaucagaaugcagaugcauauguuuuuguggggacaucaagauacagcaagaaguucaagccggaaauagcaauaagacccaaagugagggaucaagaagggagaaugaacuauuacuggacacuaguagagccgggagacaaaauaacauucgaagcaacuggaaaucuagugguaccgagauaugcauucgcaauggaaagaaaugcuggaucugguauuaucauuucagauacaccaguccacgauugcaauacaacuugucagacacccaagggugcuauaaacaccagccucccauuucagaauauacauccgaucacaauuggaaaauguccaaaauauguaaaaagcacaaaauugagacuggccacaggauugaggaaugucccgucuauucaaucuagaggccuauuuggggccauugccgguuucauugaagggggguggacagggaugguagauggaugguacgguuaucaccaucaaaaugagcaggggucaggauaugcagccgaccugaagagcacacagaaugccauugacaagauuacuaacaaaguaaauucuguuauugaaaagaugaauacacaguucacagcaguagguaaagaguucaaccaccuggaaaaaagaauagagaauuuaaauaaaaaaguugaugaugguuuccuggacauuuggacuuacaaugccgaacuguugguucuauuggaaaaugaaagaacuuuggacuaccacgauucaaaugugaagaacuuauaugaaaagguaagaagccaguuaaaaaacaaugccaaggaaauuggaaacggcugcuuugaauuuuaccacaaaugcgauaacacgugcauggaaagugucaaaaaugggacuuaugacuacccaaaauacucagaggaagcaaaauuaaacagagaagaaauagaugggguaaagcuggaaucaacaaggauuuaccagauuuuggcgaucuauucaacugucgccaguucauugguacugguagucucccugggggcaaucaguuucuggaugugcucuaaugggucucuacaguguagaauauguauuuaa

SEQ ID NO: 39927 - RNA, 1701 nt, Artificial Sequence
  derived and/or modified CDS sequence (wt) from hemagglutinin__InfluenzaA__AEW25509
augaaggcaauacuaguaguucugcuauauacauuugcaaccgcaaaugcagacacauuauguauagguuaucaugcgaacaauucaacagacacuguagacacaguacuagaaaagaauguaacaguaacacacucuguuaaccuucuagaagacaagcauaacgggaaacuaugcaaacuaagagggguagccccauugcauuuggguaaauguaacauugcuggcuggauccugggaaauccagagugugaaucauucuccacaucaagcucaugguccuacauuguggaaacaucuaguucagacaauggaacguguuacccaggagauuucaucgauuaugaggagcuaagagagcaauugagcucagugucaucauuugaaagguuugagauauuccccaagacaaguucauggcccaaucaugacucgaacaaagguguaacggcagcauguccucaugcuggagcaaaaagcuucuacaaaaauuuaauauggcuaguuaaaaaaggaaauucauacccaaagcucagcaaauccuacauuaaugauaaagggaaagaaguccucgugcuauggggcauucaccauccaucuacuagugcugaccaacaaagucucuaucagaaugcagaugcauauguuuuuguggggacaucaagauacagcaagaaguucaagccggaaauagcaauaagacccaaagugagggaucaagaagggagaaugaacuauuacuggacacuaguagagccgggagacaaaauaacauucgaagcaacuggaaaucuagugguaccgagauaugcauucgcaauggaaagaaaugcuggaucugguauuaucauuucagauacaccaguccacgauugcaauacaacuugucagacacccaagggugcuauaaacaccagccucccauuucagaauauacauccgaucacaauuggaaaauguccaaaauauguaaaaagcacaaaauuaagacuggccacaggauugaggaaugucccgucuauucaaucuagaggccuauuuggggccauugccgguuucauugaagggggguggacagggaugguagauggaugguacgguuaucaccaucaaaaugagcaggggucaggauaugcagccgaccugaagagcacacagaaugccauugacgagauuacuaacaaaguaaauucuguuauugaaaagaugaauacacaguucacagcaguagguaaagaguucaaccaccuggaaaaaagaauagagaauuuaaauaaaaaaguugaugaugguuuccuggacauuuggacuuacaaugccgaacuguugguucuauuggaaaaugaaagaacuuuggacuaccacgauucaaaugugaagaacuuauaugaaaagguaagaagccaguuaaaaaacaaugccaaggaaauuggaaacggcugcuuugaauuuuaccacaaaugcgauaacacgugcauggaaagugucaaaaaugggacuuaugacuacccaaaauacucagaggaagcaaaauuaaacagagaagaaauagaugggguaaagcuggaaucaacaaggauuuaccagauuuuggcgaucuauucaacugucgccaguucauugguacugguagucucccugggggcaaucaguuucuggaugugcucuaaugggucucuacaguguagaauauguauuuaa

SEQ ID NO: 39928 - RNA, 1701 nt, Artificial Sequence
  derived and/or modified CDS sequence (wt) from hemagglutinin__InfluenzaA__AEW25519
augaaggcaauacuaguaguucugcuauauacauuugcaaccgcaaaugcagacacauuauguauagguuaucaugcgaacaauucaacagacacuguagacacaguacuagaaaagaauguaacaguaacacacucuguuaaccuucuagaagacaagcauaacgggaaacuaugcaaacuaagagggguagccccauugcauuuggguaaauguaacauugcuggcuggauccugggaaauccagagugugaaucacucuccacagcaagcucaugguccuacauuguggaaacaucuaguucagacaauggaacguguuacccaggagauuucaucgauuaugaggagcuaagagagcaauugagcucagugucaucauuugaaagguuugagauauuccccaagacaaguucauggcccaaucaugacccgaacaaagguguaacggcagcauguccucauacuggagcaaaaagcuucuacaaaaauuuaauauggcuaguuaaaaaaggaaauucauacccaaagcucagcaaauccuacauuaaugauaaagggaaagaaguccucgugcuauggggcauucaccauccaucuacuagugcugaccaacaaagucucuaucagaaugcagaugcauauguuuuuguggggacaucaagauacagcaagaaguucaagccggaaauagcaauaagacccaaagugagggaucaagaagggagaaugaacuauuacuggacacuaguagagccgggagacaaaauaacauucgaagcaacuggaaaucuagugguaccgagauaugcauucgcaauggaaagaaaugcuggaucugguauuaucauuucagauacaccaguccacgauugcaauacaacuugucagacacccaagggugcuauaaacaccagccucccauuucagaauauacauccgaucacaauuggaaaauguccaaaauauguaaaaagcacaaaauugagacuggccacaggauugaggaaugucccgucuauucaaucuagaggccuauuuggggccauugccgguuucauugaagggggguggacagggaugguagauggaugguacgguuaucaccaucaaaaugagcaggggucaggauaugcagccgaccugaagagcacacagaaugccauugacgagauuacuaacaaaguaaauucuguuauugaaaagaugaauacacaguucacagcaguagguaaagaguucaaccaccuggaaaaaagaauagagaauuuaaauaaaaaaguugaugaugguuuccuggacauuuggacuuacaaugccgaacuguugguucuauuggaaaaugaaagaacuuuggacuaccacgauucaaaugugaagaacuuauaugaaaagguaagaagccaguuaaaaaacaaugccaaggaaauuggaaacggcugcuuugaauuuuaccacaaaugcgauaacacgugcauggaaagugucaaaaaugggacuuaugacuacccaaaauacucagaggaagcaaaauuaaacagagaaaaaauagaugggguaaagcuggaaucaacaaggauuuaccagauuuuggcgaucuauucaacugucgccaguucauugguacugguagucucccugggggcaaucaguuucuggaugugcucuaaugggucucuacaguguagaauauguauuuaa

SEQ ID NO: 39929 - RNA, 1701 nt, Artificial Sequence
  derived and/or modified CDS sequence (wt) from hemagglutinin__InfluenzaA__AEW25528
augaaggcaauacuaguaguucugcuauauacauuugcaaccgcaaaugcagacacauuauguauagguuaucaugcgaacaauucaacagacacuguagacacaguacuagaaaagaauguaacaguaacacacuccguuaaccuucuagaagacaagcauaacgggaaacuaugcaaacuaagagggguagccccauugcauuuggguaaauguaacauugcuggcuggauccugggaaauccagagugugaaucauucuccacaucaagcucaugguccuacauuguggaaacaucuaguucagacaauggaacguguuacccaggagauuucaucgauuaugaggagcuaagagagcaauugagcucagugucaucauuugaaagguuugagauauuccccaagacaaguucauggcccaaucaugacucgaacaaagguguaacggcagcauguccucaugcuggagcaaaaagcuucuacaaaaauuuaauauggcuaguuaaaaaaggaaauucauacccaaagcucagcaaauccuacauuaaugauaaagggaaagaaguccucgugcuauggggcauucaccauccaucuacuagugcugaccaacaaagucucuaucagaaugcagaugcauauguuuuuguggggacaucaagauacagcaagaaguucaagccggaaauagcaauaagacccaaagugagggaucaagaaaggagaaugaacuauuacuggacacuaguagagccgggagacaaaauaacauucgaagcaacuggaaaucuagugguaccgagauaugcauucgcaauggaaagaaaugcuggaucugguauuaucauuucagauacaccaguccacgauugcaauacaacuugucagacacccaagggugcuauaaacaccagccucccauuucagaauauacauccgaucacaauuggaaaauguccaaaauauguaaaaagcacaaaauuaagacuggccacaggauugaggaaugucccgucuauucaaucuagaggccuauuuggggccauugccgguuucauugaagggggguggacagggaugguagacggaugguacgguuaucaccaucaaaaugagcaggggucaggauaugcagccgaccugaagagcacacagaaugccauugacgagauuacuaacaaaguaaauucuguuauugaaaagaugaauacacaguucacagcaguagguaaagaguucaaccaccuggaaaaaagaauagagaauuuaaauaaaaaaguugaugaugguuuccuggacauuuggacuuacaaugccgaacuguugguucuauuggaaaaugaaagaacuuuggacuaccacgauucaaaugugaagaacuuauaugaaaagguaagaagccaguuaaaaaacaaugccaaggaaauuggaaacggcugcuuugaauuuuaccacaaaugcgauaacacgugcauggaaagugucaaaaaugggacuuaugacuacccaaaauacucagaggaagcaaaauuaaacagagaagaaauagaugggguaaagcuggaaucaacaaggauuuaccagauuuuggcgaucuauucaacugucgccaguucauugguacugguagucucccugggggcaaucaguuucuggaugugcucuaaugggucucuacaguguagaauauguauuuaa

SEQ ID NO: 39930 - RNA, 1701 nt, Artificial Sequence
  derived and/or modified CDS sequence (wt) from hemagglutinin__InfluenzaA__AEW25545
augaaggcaauacuaguaguucugcuauauacauuugcaaccgcaaaugcagacacauuauguauagguuaucaugcgaacaauucaacagacacuguagacacaguacuagaaaagaauguaacaguaacacacucuguuaaccuucuagaagacaagcauaacgggaaacuaugcaaacuaagagggguagccccauugcauuuggguaaauguaacauugcuggcuggauccugggaaauccagagugugaaucacucuccacagcaagcucaugguccuacauuguggaaacaucuaguucagacaauggaacguguuacccaggagauuucaucgauuaugaggagcuaagagagcaauugagcucagugucaucauuugaaagguuugagauauuccccaagacaaguucauggcccaaucaugacccgaacaaagguguaacggcagcauguccucaugcuggagcaaaaagcuucuacaaaaauuuaauauggcugguuaaaaaaggaaauucauacccaaagcucagcaaauccuacauuaaugauaaagggaaagaaguccucgugcuauggggcauucaccauccaucuacuagugcugaccaacaaagucucuaucagaaugcagaugcauauguuuuuguggggacaucaagauacagcaagaaguucaagccggaaauagcaauaagacccaaagugagggaucaagaagggagaaugaacuauuacuggacacuaguagagccgggagacaaaauaacauucgaagcaacuggaaaucuagugguaccgagauaugcauucgcaauggaaagaaaugcuggaucugguauuaucauuucagauacaccaguccacgauugcaauacaacuugucagacacccaagggugcuauaaacaccagccucccauuucagaauauacauccgaucacaauuggaaaauguccaaaauauguaaaaagcacaaaauugagacuggccacaggauugaggaaugucccgucuauucaaucuagaggccuauuuggggccauugccgguuucauugaagggggguggacagggaugguagauggaugguacgguuaucaccaucaaaaugagcaggggucaggauaugcagccgaccugaagagcacacagaaugccauugacaagauuacuaacaaaguaaauucuguuauugaaaagaugaauacacaguucacagcaguagguaaagaguucaaccaccuggaaaaaagaauagagaauuuaaauaaaaaaguugaugaugguuuccuggacauuuggacuuacaaugccgaacuguugguucuauuggaaaaugaaagaacuuuggacuaccacgauucaaaugugaagaacuuauaugaaaagguaagaagccaguuaaaaaacaaugccaaggaaauuggaaacggcugcuuugaauuuuaccacaaaugcgauaacacgugcauggaaagugucaaaaaugggaguuaugacuacccaaaauacucagaggaagcaaaauuaaacagagaagaaauagaugggguaaagcuggaaucaacaaggauuuaccagauuuuggcgaucuauucaacugucgccaguucauugguaaugguaguuucccugggggcaaucaguuucuggaugugcucuaauggaucucuacaguguagaauauguauuuaa

SEQ ID NO: 39931 - RNA, 1701 nt, Artificial Sequence
  derived and/or modified CDS sequence (wt) from hemagglutinin__InfluenzaA__AEW25555
augaaggcaauacuaguaguucugcuauauacauuugcaaccgcaaaugcagacacauuauguauagguuaucaugcgaacaauucaacagacacuguagacacaguacuagaaaagaauguaacaguaacacacucuguuaaccuucuggaagacaagcauaacgggaaacuaugcaaacuaagagggguagccccauugcauuuggguaaauguaacauugcuggcuggauccugggaaauccagagugugaaucacucuccacagcaagcucaugguccuacauuguggaaacaucuaguucagacaauggaacguguuacccaggagauuucaucgauuaugaggagcuaagagagcaauugagcucagugucaucauuugaaagguuugagauauuccccaagacaaguucauggcccaaucaugacccgaacaaagguguaacggcagcauguccucaugcuggagcaaaaagcuucuacaaaaauuuaauauggcuaguuaaaaaaggaaauucauacccaaagcucagcaaauccuacauuaaugauaaagggaaagaaguccucgugcuauggggcauucaccauccaucuacuagugcugaccaacaaagucucuaucagaaugcagaugcauauguuuuuguggggacaucaagauacagcaagaaguucaagccggaaauagcaauaagacccaaagugagggaucaagaagggagaaugaacuauuacuggacacuaguagagccgggagacaaaauaacauucgaagcaacuggaaaucuagugguaccgagauaugcauucgcaauggaaagaaaugcuggaucugguauuaucauuucagauacaccaguccacuauugcaauacaacuugucagacacccaagggugcuauaaacaccagccucccauuucagaauauacauccgaucacaauuggaaaauguccaaaauauguaaaaagcacaaaauugagacuggccacaggauugaggaaugucccgucuauucaaucuagaggccuauuuggggccauugccgguuucauugaagggggguggacagggaugguagauggaugguacgguuaucaccaucaaaaugagcaggggucaggauaugcagccgaccugaagagcacacagaaugccauugacgagauuacuaacaaaguaaauucuguuauugaaaagaugaauacacaguucacagcaguagguaaagaguucaaccaccuggaaaaaagaauagagaauuuaaauaaaaaaguugaugaugguuuccuggacauuuggacuuacaaugccgaauuguugguucuauuggaaaaugaaagaacuuuggacuaccacgauucaaaugugaagaacuuauaugaaaagguaagaagccaguuaaaaaacaaugccaaggaaauuggaaacggcugcuuugaauuuuaccacaaaugcgauaacacgugcauggaaagugucaaaaaugggacuuaugacuacccaaaauacucagaggaagcaaaauuaaacagagaagaaauagaugggguaaagcuggaaucaacaaggauuuaccagauuuuggcgaucuauucaacugucgccaguucauugguacugguagucucccugggggcgaucaguuucuggaugugcucuaaugggucucuacaguguagaauauguauuuaa

SEQ ID NO: 39932 - RNA, 1701 nt, Artificial Sequence
  derived and/or modified CDS sequence (wt) from hemagglutinin__InfluenzaA__AEW25564
augaaggcaauacuaguaguucugcuauauacauuugcaaccgcaaaugcagacacauuauguauagguuaucaugcgaacaauucaacagacacuguagacacaguacuagaaaagaauguaacaguaacacacucuguuaaccuucuagaagacaagcauaacgggaaacuaugcaaacuaagagggguagccccauugcauuuggguaaauguaacauugcuggcuggauccugggaaauccagagugugaaucacucuccacagcaagcucaugguccuacauuguggaaacaucuaguucagacaauggaacguguuacccaggagauuucaucgauuaugaggagcuaagagagcaauugagcucagugucaucauuugaaagguuugagauauuccccaagacaaguucauggcccaaucaugacucgaacaaagguguaacggcagcauguccucaugcuggagcaaaaagcuucuacaaaaauuuaauauggcuaguuaaaaaaggaaauucauacccaaagcucagcaaauccuacauuaaugauaaagggaaagagguccucgugcuauggggcauucaccauccaucuacuagugcugaccaacaaagucucuaucagaaugcagaugcauauguuuuuguggggacaucaagauacagcaagaaguucaagccggaaauagcaauaagacccaaagugagggaucaagaagggagaaugaacuauuacuggacacuaguagagccgggagacaaaauaacauucgaagcaacuggaaaucuagugguaccgagauaugcauucgcaauggaaagaaaugcuggaucugguauuaucauuucagauacaccaguccacgauugcaauacaacuugucagacacccaagggugcuuuaaacaccagccucccauuucagaauauacauccgaucacaauuggaaaauguccaaaauauguaaaaagcacaaaauugagacuggccacaggauugaggaaugucccgucuauucaaucuagaggccuauuuggggccauugccgguuucauugaagggggguggacagggaugguagauggaugguacgguuaucaccaucaaaaugagcaggggucaggauaugcagccgaccugaagagcacacagaaugccauugacgagauuacuaacaaaguaaauucuguuauugaaaagaugaauacacaguucacagcaguagguaaagaguucaaccaccuggaaaaaagaauagagaauuuaaauagaaaaguugaugaugguuuccuggacauuuggacuuacaaugccgaacuguugguucuauuggaaaaugaaagaacuuuggacuaccacgauucaaaugugaagaacuuauaugaaaaggugagaagccaguuaaaaaacaaugccaaggaaauuggaaacggcugcuuugaauuuuaccacaaaugcgauaacacgugcauggaaagugucaaaaaugggacuuaugacuacccaaaauacucagaggaagcaaaauuaaacagagaagaaauagaugggguaaagcuggaaucaacagggauuuaccagauuuuggcgaucuauucaacugucgccaguucauugguacugguagucucccugggggcaaucaguuucuggauguguucuaaugggucucuacaguguagaauauguauuuaa

SEQ ID NO: 39933 - RNA, 1701 nt, Artificial Sequence
  derived and/or modified CDS sequence (wt) from hemagglutinin__InfluenzaA__AEW25573
augaaggcaauacuaguaguucugcuauauacauuugcaaccgcaaaugcagacacauuauguauagguuaucaugcgaacaauucaacagacacuguagacacaguacuagaaaagaauguaacaguaacacacucuguuaaccuucuagaagacaagcauaacgggaaacuaugcaaacuaagagggguagccccauugcauuuggguaaauguaacauugcuggcuggauccugggaaauccagagugugaaucacucuccacagcaagcucaugguccuacauuguggaaacaucuaguucagacaauggaacguguuacccaggagauuucaucgauuaugaggagcuaagagagcaauugagcucagugucaucauuugaaagguuugagauauuccccaagacaaguucauggcccaaucaugacccgaacaaagguguaacggcagcauguccucaugcuggagcaaaaagcuucuacaaaaauuuaauauggcuaguuaaaaaaggaaauucauacccaaagcucagcaaauccuacauuaaugauaaagggaaagaaguccucgugcuauggggcauucaccauccaucuacuagugcugaccaacaaagucucuaucagaaugcagaugcauauguuuuuguggggacaucaagauacagcaagaaguucaagccggaaauagcaauaagacccaaagugagggaucaagaagggagaaugaacuauuacuggacacuaguagagccgggagacaaaauaacauucgaagcaacuggaaaucuagugguaccgagauaugcauucgcaauggaaagaaaugcuggaucugguauuaucauuucagauacaccaguccacgauugcaauacaacuugucagacacccaagggugcuauaaacaccagccucccauuucagaauauacauccgaucacaauuggaaaauguccaaaauauguaaaaagcacaaaauugagacuggccacaggauugaggaaugucccgucuauucaaucuagaggccuauuuggggccauugccgguuucauugaagggggguggacagggaugguagauggaugguacgguuaucaccaucaaaaugagcaggggucaggauaugcagccgaccugaagagcacacagaaugccauugacgagauuacuaacaaaguaaauucuguuauugaaaagaugaauacacaguucacagcaguagguaaagaguucaaccaccuggaaaaaagaauagagaauuuaaauaaaaaaguugaugaugguuucuuggacauuuggacuuacaaugccgaacuguugguucuauuggaaaaugaaagaacuuuggacuaccacgauucaaaugugaagaacuuauaugaaaagguaagaagccaguuaaaaaacaaugccaaggaaauuggaaacggcugcuuugaauuuuaccacaaaugcgauaacacgugcauggaaagugucaaaaaugggacuuaugacuacccaaaauacucagaggaagcaaaauuaaacagagaagaaauagaugggguaaagcuggaaucaacaaggauuuaccagauuuuggcgaucuauucaacugucgccaguucauugguacugguagucucccugggggcaaucaguuucuggaugugcucuaaugggucucuacaguguagaauauguauuuaa

SEQ ID NO: 39934 - RNA, 1701 nt, Artificial Sequence
  derived and/or modified CDS sequence (wt) from hemagglutinin__InfluenzaA__AEW25582
augaaggcaauacuaguaguucugcuauauacauuugcaaccgcaaaugcagacacauuauguauagguuaucaugcgaacaauucaacggacacuguagacacaguacuagaaaagaauguaacaguaacacacucuguuaaccuucuagaagacaagcauaacgggaaacuaugcaaacuaagagggguagccccauugcauuuggguaaauguaacauugcuggcuggauccugggaaauccagagugugaaucacucuccacagcaagcucaugguccuacauuguggaaacaucuaguucagacaauggaacguguuacccaggagauuucaucgauuaugaggagcuaagagagcaauugagcucagugucaucauuugaaagguuugagauauuccccaagacaaguucauggcccaaucaugacucgaacaaagguguaacggcagcauguccucaugcuggagcaaaaagcuucuacaaaaauuuaauauggcuaguuaaaaaaggaaauucauacccaaagcucagcaaauccuacauuaaugauaaagggaaagaaguccucgugcuauggggcauucaccauccaucuacuagugcugaccaacaaagucucuaucagaaugcagaugcauauguuuuuguggggacaucaagauacagcaagaaguucaagccggaaauagcaauaagacccaaagugagagaucaagaagggagaaugaacuauuacuggacacuaguagagccgggagacaaaauaacauucgaagcaacuggaaaucuagugguaccgagauaugcauucgcaauggaaagaaaugcuggaucugguauuauccuuucagauacaccaguccacgauugcaauacaacuugucagacacccaagggugcuauaaacacuagccucccauuucagaauauacauccgaucacaauuggaaaauguccaaaauauguaaaaagcacaaaauugagacuggccacaggauugaggaaugucccgucuauucaaucuagaggccuauuuggggccauugccgguuucauugaagggggguggacagggaugguagauggaugguacgguuaucaccaucaaaaugggcaggggucaggauaugcagccgaccugaagagcacacagaaugccauugacaagauuacuaacaaaguaaauucuguuauugaaaagaugaauacacaguucacagcaguagguaaagaguucaaccaccuggaaaaaagaauagagaauuuaaauaaaaaaguugaugaugguuuccuggacauuuggacuuacaaugccgaacuguugguucuauuggaaaaugaaagaacuuuggacuaccacgauucaaaugugaagaacuuauaugaaaagguaagaagccaguuaaaaaacaaugccaaggaaauuggaaacggcugcuuugaauuuuaccacaaaugcgauaacacgugcauggaaagugucaaaaaugggacuuaugacuacccaaaauacucagaggaagcaaaauuaaacagagaagaaauagaugggguaaagcuggaaucaacaaggauuuaccagauuuuggcgaucuauucaacugucgccaguucauugguacugguagucucccugggggcaaucaguuucuggaugugcucuaaugggucucuacaguguagaauauguauuuaa

SEQ ID NO: 39935 - RNA, 1701 nt, Artificial Sequence
  derived and/or modified CDS sequence (wt) from hemagglutinin__InfluenzaA__AEW25590
augaaggcaauacuaguaguucugcuauauacauuugcaaccgcaaaugcagacacauuauguauagguuaucaugcgaacaauucaacagacacuguagacacaguacuagagaagaauguaacaguaacacaaucuguuaaccuucuagaagacaagcauaacgggaaacuaugcaaacuaagagggguagccccauugcauuuggguaaauguaacauugcuggcuggauccugggaaauccagagugugaaucacucuccacagcaagcucaugguccuacauuguggaaacaucuaguucagacaauggaacguguuacccaggagauuucaucgauuaugaggagcuaagagagcaauugagcucagugucaucauuugaaagguuugagauauuccccaagacaaguucauggcccaaucaugacucgaacaaagguguaacggcagcauguccucaugcuggagcaaaaagcuucuacaaaaauuuaauauggcuaguuaaaaaaggaaauucauacccaaagcucagcaaauccuacauuaaugauaaagggaaagagguccucgugcuauggggcauucaccauccaucuacuagcgcugaccaacaaagucucuaucagaaugcagaugcauauguuuuuguggggacaucaagauacagcaagaaguucaagccggaaauagcaauaagacccaaagugagggaucaagaagcgagaaugaacuauuacuggacacuaguagagccgggagacaaaauaacauucgaagcaacuggaaaucuagugguaccgagauaugcauucgcaauggaaagagaugcuggaucugguauuaucauuucagauacaccaguccacgauugcaauacaacuugucagacacccaagggugcuauaaacaccagccucccauuucagaauauacauccgaucacaauuggaaaauguccaaaauauguaaaaagcacaaaauugagacuggccacaggauugaggaaugucccgucuauucaaucuagaggccuauuuggggccauugccgguuucauugaagggggguggacagggaugguagauggaugguacgguuaucaccaucaaaaugaacagggaucaggauaugcagccgaccugaagagcacacagaaugccauugacgagauuacuaacaaaguaaauucuguuauugaaaagaugaauacacaguucacggcaguagguaaagaguucaaccaccuggaaaaaagaauagagaauuuaaauaaaaaaguugaugaugguuuccuggauauuuggacuuacaaugccgaacuguugguucuauuggaaaaugaaagaacuuuggacuaccacgauucaaaugugaagaacuuacaugaaaagguaagaagccaguuaaaaaacaaugccaaggaaauuggaaacggcugcuuugaauuuuaccacaaaugcgauaacacgugcauggaaagugucaaaaaugggacuuaugacuacccaaaauacucagaggaagcaaaauuaaacagagaagaaauagaugggguaaagcuggaaucaacaaggauuuaccagauuuuggcgaucuauucaacugucgccaguucauugguacugguagucucccugggggcaaucaguuucuggauguguucuaaugggucucuacaguguagaauauguaucuaa

SEQ ID NO: 39936 - RNA, 1701 nt, Artificial Sequence; identical to SEQ ID NO: 39933
  derived and/or modified CDS sequence (wt) from hemagglutinin__InfluenzaA__AEW25600

SEQ ID NO: 39937 - RNA, 1701 nt, Artificial Sequence; identical to SEQ ID NO: 35479
  derived and/or modified CDS sequence (wt) from hemagglutinin__InfluenzaA__AEW25620

SEQ ID NO: 39938 - RNA, 1701 nt, Artificial Sequence
  derived and/or modified CDS sequence (wt) from hemagglutinin__InfluenzaA__AEW25629
augaaggcaauacuaguaguucugcuauauacauuugcaaccgcaaaugcagacacauuauguauagguuaucaugcgaacaauucaacagacacuguagacacaguacuagaaaagaauguaacaguaacacacucuguuaaccuucuagaagacaagcauaacgggaaacuaugcaaacuaagagggguagccccauugcauuuggguaaauguaacauugcuggcuggauccugggaaauccagagugugaaucacucuccacagcaagcucaugguccuacauuguggaaacaucuaguucagacaauggaacguguuacccaggagauuucaucgauuaugaggagcuaagagagcaauugagcucagugucaucauuugaaagguuugagauauuccccaagacaaguucauggcccaaucaugacccgaacaaagguguaacggcagcauguccucaugcugaagcaaaaagcuucuacaaaaauuuaauauggcuaguuaaaaaaggaaauucauacccaaagcucagcaaauccuacauuaaugauaaagggaaagaaguccucgugcuauggggcauucaccauccaucuacuagugcugaucaacaaagucucuaucagaaugcagaugcauauguuuuuguggggacaucaagauacagcaagaaguucaagccggaaauagcaauaagacccaaagugagggaucaagaagggagaaugaacuauuacuggacacuaguagagccgggagacaaaauaacauucgaagcaacuggaaaucuagugguaccgagauaugcauucgcaauggaaagaaaugcuggaucugguauuaucauuucagauacaccaguccacgauugcaauacaacuugucagacacccaagggugcuauaaacaccagccucccauuucagaauauacauccgaucacaauuggaaaauguccaaaauauguaaaaagcacaaaauugagacuggccacaggauugaggaaugucccgucuauucaaucuagaggccuauuuggggccauugccgguuucauugaagggggguggacagggaugguagauggaugguacgguuaucaccaucaaaaugagcaggggucaggauaugcagccgaccugaagagcacacagaaugccauugacgagauuaccaacaaaguaaauucuguuauugaaaagaugaauacacaguucacagcaguagguaaagaguucaaccaccuggaaaaaagaauagagaauuuaaauaaaaaaguugaugaugguuuccuggacauuuggacuuacaaugccgaacuguugguucuauuggaaaaugaaagaacuuuggacuaccacgauucaaaugugaagaacuuauaugaaaagguaagaagccaguuaaaaaacaaugccaaggaaauuggaaacggcugcuuugaauuuuaccacaaaugcgauaacaugugcauggaaagugucaaaaaugggacuuaugacuacccaaaauacucagaggaagcaaaauuaaacagagaagaaauagaugggguaaagcuggaaucaacaaggauuuaccagauuuuggcgaucuauucaacugucgccaguucauugguacugguagucucccugggggcaaucaguuucuggaugugcucuaaugggucucuacaguguagaauauguauuuaa

SEQ ID NO: 39939 - RNA, 1701 nt, Artificial Sequence
  derived and/or modified CDS sequence (wt) from hemagglutinin__InfluenzaA__AEW25637
augaaggcaauacuaguaguucugcuauauacauuugcaaccgcaaaugcagacacauuauguauagguuaucaugcaaacaauucaacagacacuguagacacaguacuagaaaagaauguaacaguaacacacucuguuaaccuucuagaagacaagcauaacgggaaacuaugcaaacuaagagggguagccccauugcauuuggguaaauguaacauugcuggcuggauccugggaaauccagagugugaaucacucuccacagcaagcucaugguccuacauuguggaaacaucuaguucagacaauggaacguguuacccaggagauuucaucgauuaugaggagcuaagagagcaauugagcucagugucaucauuugaaagguuugagauauuccccaagacaaguucauggcccaaucaugacucgaacaaagguguaacggcagcauguccucaugcuggagcaaaaagcuucuacaaaaauuuaauauggcuaguuaaaaaaggaaauucauacccaaagcucagcaaauccuacauuaaugauaaagggaaagaaguccucgugcuauggggcauucaccauccaucuacuagugcugaccaacaaagucucuaucagaaugcagaugcauauguuuuuguggggacaucaagauacagcaagaaguucaagccggaaauagcaauaagacccaaagugagggaucaagaagggagaaugaacuauuacuggacacuaguagagccgggagacaaaauaacauucgaagcaacuggaaaucuagugguaccgagauaugcauucgcaauggaaagaaaugcuggaucuggcauuaucauuucagauacaccaguccacgauugcaauacaacuugucagacacccaagggugcuauaaacaccagccucccauuucagaauauacauccgaucacaauuggaaaauguccaaaauauguaaaaagcacaaaauugagacuggccacaggauugaggaaugucccgucuauucaaucuagaggccuauuuggggccauugccgguuucauugaagggggguggacagggaugguagauggaugguacgguuaucaccaucaaaaugagcaggggucaggauaugcagccgaccugaagagcacacagaaugccauugacgagauuacuaacaaaguaaauucuguuauugaaaagaugaauacacaguucacagcaguagguaaagaguucaaccaccuggaaaaaagaauagagaauuuaaauaaaaaaguugaugaugguuuccuggacauuuggacuuacaaugccgaacuguugguucuauuggaaaaugaaagaacuuuggacuaccacgauucaaaugugaagaacuuauaugaaaagguaagaagccaguuaaaaaacaaugccaaggaaauuggaaacggcugcuuugaauuuuaccacaaaugcgauaacacgugcauggaaagugucaaaaaugggacuuaugacuacccaaaauacucagaggaagcaaaauuaaacagagaagaaauagaugggguaaagcuggaaucaacaaggauuuaccagauuuuggcgaucuauucaacugucgccaguucauugguacugguagucucccugggggcaaucaguuucuggaugugcucuaaugggucucuacaguguagaauauguauuuaa

SEQ ID NO: 39940 - RNA, 1701 nt, Artificial Sequence
  derived and/or modified CDS sequence (wt) from hemagglutinin__InfluenzaA__AEW25646
augaaggcaauacuaguaguucugcuauauacauuugcaaccgcaaaugcagacacauuauguauagguuaucaugcgaacaauucaacagacacuguagacacaguacuagaaaagaauguaacaguaacacacucuguuaaccuucuagaagacaagcauaacgggaaacuaugcaaacuaagagggguagccccauugcauuuggguaaauguaacauugcuggcuggauccugggaaauccagagugugaaucacucuccacagcaagcucaugguccuacauuguggaaacaucuaguucagacaauggaacguguuacccaggagauuucaucgauuaugaggagcuaagagagcaauugagcucagugucaucauuugaaagguuugagauauuccccaagacaaguucauggcccaaucaugacccgaacaaagguguaacggcagcauguccucaugcuggagcaaaaagcuucuacaaaaauuuaauauggcuaguuaaaaaaggaaauucauacccaaagcucagcaaauccuacauuaaugauaaagggaaagaaguccucgugcuauggggcauucaccauccaucuacuagugcugaccaacaaagucucuaucagaaugcagaugcauauguuuuuguggggacaucaagauacagcaagaaguucaagccggaaauagcaauaagacccaaagugagggaucaagaagggagaaugaacuauuacuggacacuaguagagccgggagacaaaauaacauucgaagcaacuggaaaucuagugguaccgagauaugcauucgcaauggaaagaaaugcuggaucugguauuaucauuucagauacaccaguccacgauugcaauacaacuugucagacacccaagggugcuauaaacaccagccucccauuucagaauauacauccgaucacaauuggaaaauguccaaaauauguaaaaagcacaaaauugagacuggccacaggauugaggaaugucccgucuauucaaucuagaggccuauuuggggccauugccgguuucauugaagggggguggacagggaugguagauggaugguacgguuaucaccaucaaaaugagcaggggucaggauaugcagccgaccugaagagcacacagaaugccauugacaagauuacuaacaaaguaaauucuguuauugaaaagaugaauacacaguucacagcaguagguaaagaguucaaccaccuggaaaaaagaauagagaauuuaaauaaaaaaguugaugaugguuuccuggacauuuggacuuacaaugccgaacuguugguucuauuggaaaaugaaagaacuuuggacuaccacgauucaaaugugaagaacuuauaugaaaagguaagaagccaguuaaaaaacaaugccaaggaaauuggaaacggcugcuuugaauuuuaccacaaaugcgauaacacgugcauggaaagugucaaaaaugggacuuaugacuacccaaaauacucagaggaagcaaaauuaaacagagaagaaauagaugggguaaagcuggaaucaacaaggauuuaccagauuuuggcgaucuauucaacugucgccaguucauugguacugguagucucccugggggcaaucaguuucuggaugugcucuaauggaucucuacaguguagaauauguauuuaa

SEQ ID NO: 39941 - RNA, 1701 nt, Artificial Sequence
  derived and/or modified CDS sequence (wt) from hemagglutinin__InfluenzaA__AEW25654
augaaggcaauacuaguaguucugcuauauacauuugcaaccgcaaaugcagacacauuauguauagguuaucaugcaaacaauucaacagacacuguagacacaguacuagaaaagaauguaacaguaacacacucuguuaaccuucuagaagacaagcauaacgggaaacuaugcaaacuaagagggguagccccauugcauuuggguaaauguaacauugcuggcuggauccugggaaauccagagugugaaucacucuccacagcaagcucaugguccuacauuguggaaacaucuaguucagacaauggaacguguuacccaggagauuucaucgauuaugaggagcuaagagagcaauugagcucagugucaucauuugaaagguuugagauauuccccaagacaaguucauggcccaaucaugacucgaacaaagguguaacggcagcauguccucaugcuggagcaaaaagcuucuacaaaaauuuaauauggcuaguuaaaaaaggaaauucauacccaaagcucagcaaauccuacauuaaugauaaagggaaagaaguccucgugcuauggggcauucaccauccaucuacuagugcugaccaacaaagucucuaucagaaugcagaugcauauguuuuuguggggacaucaagauacagcaagaaguucaagccggaaauagcaauaagacccaaagugagggaucaagaagggagaaugaacuauuacuggacacuaguagagccgggagacaaaauaacauucgaagcaacuggaaaucuagugguaccgagauaugcauucgcaauggaaagaaaugcuggaucugguauuaucauuucagauacaccaguccacgauugcaauacaacuugucagacacccaagggugcuauaaacaccagccccccauuucagaauauacauccgaucacaauuggaaaauguccaaaauauguaaaaagcacaaaauugagacuggccacaggauugaggaauaucccgucuauucaaucuagaggccuauuuggggccauugccgguuucauugaagggggguggacagggaugguagauggaugguacgguuaucaccaucaaaaugagcaggggucaggauaugcagccgaccugaagagcacacagaaugccauugacgagauuacuaacaaaguaaauucuguuauugaaaagaugaauacacaguucacagcaguagguaaagaguucaaccaccuggaaaaaagaauagagaauuuaaauaaaaaaguugaugaugguuuccuggacauuuggacuuacaaugccgaacuguugguucuauuggaaaaugaaagaacuuuggacuaccacgauucaaaugugaagaacuuauaugaaaagguaagaagccaguuaaaaaacaaugccaaggaaauuggaaacggcugcuuugaauuuuaccacaaaugcgauaacacgugcauggaaagugucaaaaaugggacuuaugacuacccaaaauacucagaggaagcaaaauuaaacagagaagaaauagaugggguaaagcuggaaucaacaaggauuuaccagauuuuggcgaucuauucaacugucgccaguucauugguacugguagucucccugggggcaaucaguuucuggaugugcucuaaugggucucuacaguguagaauauguauuuaa

SEQ ID NO: 39942 - RNA, 1701 nt, Artificial Sequence
  derived and/or modified CDS sequence (wt) from hemagglutinin__InfluenzaA__AEW25662
augaaggcaauacuaguaguucugcuauauacauuugcaaccgcaaaugcagacacauuauguauagguuaucaugcgaacaauucaacagacacuguagacacaguacuagaaaagaauguaacaguaacacacucuguuaaccuucuagaagacaagcauaacgggaaacuaugcaaacuaagagggguagccccauugcauuuggguaaauguaacauugcuggcuggauccugggaaauccagagugugaaucacucuccacagcaagcucaugguccuacauuguggaaacaucuaguucagacaauggaacguguuacccaggagauuucaucgauuaugaggagcuaagagagcaauugagcucagugucaucauuugaaagguuugagauauuccccaagacaaguucauggcccaaucaugacccgaacaaagguauaacggcagcauguccucaugcuggagcaaaaagcuucuacaaaaauuuaauauggcuaguuaaaaaaggaaauucauacccaaagcucagcaaauccuacauuaaugauaaagggaaagaaguccucgugcuauggggcauucaccauccaucuacuagugcugaccaacaaagucucuaucagaaugcagaugcauauguuuuuguggggacaucaagauacagcaagaaguucaagccggaaauagcaauaagacccaaagugagggaucaagaagggagaaugaacuauuacuggacacuaguagagccgggagacaaaauaacauucgaagcaacuggaaaucuagugguaccgagauaugcauucgcaauggaaagaaaugcuggaucugguauuaucauuucagauacaccaguccacgauugcaauacaacuugucagacacccaagggugcuauaaacaccagccucccauuucagaauauacauccgaucacaauuggaaaauguccaaaauauguaaaaagcacaaaauugagacuggccacaggauugaggaaugucccgucuauucaaucuagaggccuauuuggggccauugccgguuucauugaagggggguggacagggaugguagauggaugguacgguuaucaccaucaaaaugagcaggggucaggauaugcagccgaccugaagagcacacagaaugccauugacgagauuacuaacaaaguaaauucuguuauugaaaagaugaauacacaguucacagcaguagguaaagaguucaaccaccuggaaaaaagaauagagaauuuaaauaaaaaaguugaugaugguuuccuggacauuuggacuuacaaugccgaacuguugguucuauuggaaaaugaaagaacuuuggacuaccacgauucaaaugugaagaacuuauaugaaaagguaagaagccaguuaaaaaacaaugccaaggaaauuggaaacggcugcuuugaauuuuaccacaaaugcgauaacacgugcauggaaagugucaaaaaugggacuuaugacuacccaaaauacucagaggaagcaaaauuaaacagagaagaaauagaugggguaaagcuggaaucaacaaggauuuaccagauuuuggcgaucuauucaacugucgccaguucauugguacugguagucucccugggggcaaucaguuucuggaugugcucuaaugggucucuacaguguagaauauguauuuaa

SEQ ID NO: 39943 - RNA, 1701 nt, Artificial Sequence
  derived and/or modified CDS sequence (wt) from hemagglutinin__InfluenzaA__AEW25669
augaaggcaauacuaguaguucugcuauauacauuugcaaccgcaaaugcagacacauuauguauagguuaucaugcgaacaauucaacagacacuguagacacaguacuagaaaagaauguaacaguaacacacucuguuaaccuucuagaagacaagcauaacgggaaacuaugcaaacuaagagggguagccccauugcauuuggguaaauguaacauugcuggcuggauccugggaaauccagagugugaaucacucuccacagcaagcucaugguccuacauuguggaaacaucuaguucagacaauggaacguguuacccaggagauuucaucgauuaugaggagcuaagagagcaauugagcucagugucaucauuugaaagguuugagauauuccccaagacaaguucauggcccaaucaugacccgaacaaagguguaacggcagcauguccucaugcuggagcaaaaagcuucuacaaaaauuuaauauggcuaguuaaaaaaggaaauucauacccaaagcucagcaaauccuacauuaaugauaaagggaaagaaguccucgugcuauggggcauucaccauccaucuacuagugcugaccaacaaagucucuaucagaaugcagaugcauauguuuuuguggggacaucaagauacagcaagaaguucaagccggaaauagcaauaagacccaaagugagggaucaagaagggagaaugaacuauuacuggacacuaguagagccgggagacaaaauaacauucgaagcaacuggaaaucuagugguaccgagauaugcauucgcaauggaaagaaaugcuggaucugguauuaucauuucagauacaccaguccacgauugcaauacaacuugucagacacccaagggugcuauaaacaccagccucccauuucagaauauacauccgaucacaauuggaaaauguccaaaauauguaaaaagcacaaaauugagacuggccacaggauugaggaaugucccgucuauucaaucuagaggccuauuuggggccauugccgguuucauugaagggggguggacagggaugguagagggaugguacgguuaucaccaucaaaaugagcaggggucaggauaugcagccgaccugaagagcacacagaaugccauugacgagauuacuaacaaaguaaauucuguuauugaaaagaugaauacacaguucacagcaguagguaaagaguucaaccaccuggaaaaaagaauagagaauuuaaauaaaaaaguugaugaugguuuccuggacauuuggacuuacaaugccgaacuguugguucuauuggaaaaugaaagaacuuuggacuaccacgauucaaaugugaagaacuuauaugaaaagguaagaagccaguuaaaaaacaaugccaaggaaauuggaaacggcugcuuugaauuuuaccacaaaugcgauaacacgugcauggaaagugucaaaaaugggacuuaugacuacccaaaauacucagaggaagcaaaauuaaacagagaagaaauagaugggguaaagcuggaaucaacaaggauuuaccagauuuuggcgaucuauucaacugucgccaguucauugguacugguagucucccugggggcaaucaguuucuggaugugcucuaauggaucucuacaguguagaauauguauuuaa

SEQ ID NO: 39944 - RNA, 1701 nt, Artificial Sequence
  derived and/or modified CDS sequence (wt) from hemagglutinin__InfluenzaA__AEW25678
augaaggcaauacuaguaguucugcuauauacauuugcaaccgcaaaugcagacacauuauguauagguuaucaugcgaacaauucaacagacacuguagacacaguacuagaaaagaauguaacaguaacacacucuguuaaccuucuagaagacaagcauaacgggaaacuaugcaaacuaagagggguagccccauugcauuuggguaaauguaacauugcuggcuggauccugggaaauccagagugugaaucacucuccacagcaagcucaugguccuacauuguggaaacaucuaguucagacaauggaacguguuacccaggagauuucaucgauuaugaggagcuaagagagcaauugagcucagugucaucauuugaaaaguuugagauauuccccaagacaaguucauggcccaaucaugacucgaacaaagguguaacggcagcauguccucaugcuggagcaaaaagcuucuacaaaaauuuaauauggcuaguuaaaaaaggaaauucauacccaaagcucagcaaauccuacauuaaugauaaagggaaagaaguccucgugcuauggggcauucaccauccaucuacuagugcugaccaacaaagucucuaucagaaugcagaugcauauguuuuuguggggacaucaagauacagcaagaaguucaagccggaaauagcaauaagacccaaagugagggaucaagaagggagaaugaacuauuacuggacacuaguagagccgggagacaaaauaacauucgaagcaacuggaaaucuagugguaccgagauaugcauucgcaauggaaagaaaugcuggaucugguauuaucauuucagauacaccaguccacgauugcaauacaacuugucagacacccaagggugcuauaaacaccagccucccauuucagaauauacauccgaucacaauuggaaaauguccaaaauauguaaaaagcacaaaauuaagacuggccacaggauugaggaaugucccgucuauucaaucuagaggccuauuuggggccauugccgguuucauugaagggggguggacagggaugguagauggaugguacgguuaucaccaucaaaaugagcaggggucaggauaugcagccgaccugaagagcacacagaaugccauugacgagauuacuaacaaaguaaauucuguuauugaaaagaugaauacacaguucacagcaguagguaaagaguucaaccaccuggaaaaaagaauagagaauuuaaauaaaaaaguugaugaugguuuccuggacauuuggacuuacaaugccgaacuguugguucuauuggaaaaugaaaggacuuuggacuaccacgauucaaaugugaagaacuuauaugaaaagguaagaagccaguuaaaaaacaaugccaaggaaauuggaaacggcugcuuugaauuuuaccacaaaugcgauaacacgugcauggaaagugucaaaaaugggacuuaugacuacccaaaauacucagaggaagcaaaauuaaacagagaagaaauagaugggguaaagcuggaaucaacaaggauuuaccagauuuuggcgaucuauucaacugucgccaguucauugguacugguagucucccugagggcaaucaguuucuggaugugcucuaaugggucucuacaguguagaauauguauuuaa

SEQ ID NO: 39945 - RNA, 1701 nt, Artificial Sequence
  derived and/or modified CDS sequence (wt) from hemagglutinin__InfluenzaA__AEW25687
augaaggcaauacuaguaguucugcuauauacauuugcaaccgcaaaugcagacacauuauguauagguuaucaugcgaacaauucaacagacacuguagacacaguacuagaaaagaauguaacaguaacacacucuguuaaccuucuagaagacaagcauaacgggaaacuaugcaaacuaagagggguagccccauugcauuuggguaaauguaacauugcuggcuggauccugggaaauccagagugugaaucacucuccacagcaagcucaugguccuacauuguggaaacaucuaguucagacaauggaacguguuacccaggagauuucaucgauuaugaggagcuaagagagcaauugagcucagugucaucauuugaaagguuugagauauuccccaagacaaguucauggcccaaucaugacccgaacaaagguguaacggcagcauguccuuaugcuggagcaaaaagcuucuacaaaaauuuaauauggcuaguuaaaaaaggaaauucauacccaaagcucagcaaauccuacauuaaugauaaagggaaagaaguccucgugcuauggggcauucaccauccaucuacuagugcugaccaacaaagucucuaucagaaugcagaugcauauguuuuuguggggacaucaagauacagcaagaaguucaagccggaaauagcaauaagacccaaagugagggaucaagaagggagaaugaacuauuacuggacacuaguagagccgggagacaaaauaacauucgaagcaacuggaaaucuagugguaccgagauaugcauucgcaauggaaagaaaugcuggaucugguauuaucauuucagauacaccaguccacgauugcaauacaacuugucagacacccaagggugcuauaaacaccagccucccauuucagaauauacauccgaucacaauuggaaaauguccaaaauauguaaaaagcacaaaauugagacuggccacaggauugaggaaugucccgucuauucaaucuagaggccuauuuggggccauugccgguuucauugaagggggguggacagggaugguagauggaugguacgguuaucaccaucaaaaugagcaggggucaggauaugcagccgaccugaagagcacacagaaugccauugacaagauuacuaacaaaguaaauucuguuauugaaaagaugaauacacaguucacagcaguagguaaagaguucaaccaccuggaaaaaagaauagagaauuuaaauaaaaaaguugaugaugguuuccuggacauuuggacuuacaaugccgaacuguugguucuauuggaaaaugaaagaacuuuggacuaccacgauucaaaugugaagaacuuauaugaaaagguaagaagccaguuaaaaaacaaugccaaggaaauuggaaacggcugcuuugaauuuuaccacaaaugcgauaacacgugcauggaaagugucaaaaaugggacuuaugacuacccaaaauacucagaggaagcaaaauuaaacagagaagaaauagaugggguaaagcuggaaucaacaaggauuuaccagauuuuggcgaucuauucaacugucgccaguucauugguacugguagucucccugggggcaaucaguuucuggaugugcucuaauggaucucuacaguguagaauauguauuuaa

SEQ ID NO: 39946 - RNA, 1701 nt, Artificial Sequence
  derived and/or modified CDS sequence (wt) from hemagglutinin__InfluenzaA__AEW25696
augaaggcaauacuaguaguucugcuauauacauuugcaaccgcaaaugcagacacauuauguauagguuaucaugcgaacaauucaacagacacuguagacacaguacuagaaaagaauguaacaguaacacacucuguuaaccuucuagaagacaagcauaacgggaaacuaugcaaacuaagagggguagccccauugcauuuggguaaauguaacauugcuggcuggauccugggaaauccagagugugaaucauucuccacaucaagcucaugguccuacauuguggaaacaucuaguucagacaauggaacguguuacccaggagauuucaucgauuaugaggagcuaagagagcaauugagcucagugucaucauuugaaagguuugagauauuccccaagacaaguucauggcccaaucaugacucgaacaaagguguaacggcagcauguccucaugcuggagcaaaaagcuucuacaaaaauuuaauauggcuaguuaaaaaaggaaauucauacccaaagcucagcaaauccuacauuaaugauaaagggaaagaaguccucgugcuauggggcauucaccauccaucuacuagugcugaccaacaaagucucuaucagaaugcagaugcauauguuuuuguggggacaucaagauacagcaagaaguucaagccggaaauagcaauaagacccaaagugagggaucaagaagggagaaugaacuauuacuggacacuaguagagccgggagacaaaauaacauucgaagcaacuggaaaucuagugguaccgagauaugcauucgcaauggaaagaaaugcuggaucugguauuaucauuucagauacaccaguccacgauugcaauacaacuugucagacacccaagggugcuauaaacaccagccucccauuucagaauauacauccgaucacaauuggaaaauguccaaaauaugugaaaagcacaaaauuaagacuggccacaggauugaggaaugucccgucuauucaaucuagaggccuauuuggggccauugccgguuucauugaagggggguggacagggaugguagauggaugguacgguuaucaccaucaaaaugagcaggggucaggauaugcagccgaccugaagagcacacagaaugccauugacgagauuacuaacaaaguaaauucuguuauugaaaagaugaauacacaguucacagcaguagguaaagaguucaaccaccuggaaaaaagaauagagaauuuaaauaaaaaaguugaugaugguuuccuggacauuuggacuuacaaugccgaacuguugguucuauuggaaaaugaaagaacuuuggacuaccacgauucaaaugugaagaacuuauaugaaaagguaagaagccaguuaaaaaacaaugccaaggaaauuggaaacggcugcuuugaauuuuaccacaaaugcgauaacacgugcauggaaagugucaaaaaugggacuuaugacuacccaaaauacucagaggaagcaaaauuaaacagagaagaaauagaugggguaaagcuggaaucaacaaggauuuaccagauuuuggcgaucuauucaacugucgccaguucauugguacugguagucucccugggggcaaucaguuucuggaugugcucuaaugggucucuacaguguagaauauguauuuaa

SEQ ID NO: 39947 - RNA, 1701 nt, Artificial Sequence
  derived and/or modified CDS sequence (wt) from hemagglutinin__InfluenzaA__AEW25706
augaaggcaauacuaguaguucugcuauauacauuugcaaccgcaaaugcagacacauuauguauagguuaucaugcgaacaauucaacagacacuguagacacaguacuagaaaagaauguaacaguaacacacucuguuaaccuucuagaagacaagcauaacgggaaacuaugcaaacuaagagggguagccccauugcauuuggguaaauguaacauugcuggcuggauccugggaaauccagagugugaaucacucuccacagcaagcucaugguccuacauuguggaaacaucuaguucagacaauggaacguguuacccaggagauuucaucgauuaugaggagcuaagagagcaauugagcucagugucaucauuugaaagguuugagauauuccccaagacaaguucauggcccaaucaugacccgaacaaagguguaacggcagcauguccucaugcuggagcaaaaagcuucuacaaaaauuuaauauggcuaguuaaaaaaggaaauucauacccaaagcucagcaaauccuacauuaaugauaaagggaaagaaguccucgugcuauggggcauucaccauccaucuacuagugcugaccaacaaagucucuaucagaaugcagaugcauauguuuuuguggggacaucaagauacagcaagaaguucaagccggaaauagcaauaagacccaaagugagggaucaagaagggagaaugaacuauuacuggacacuaguagagccgggagacaaaauaacauucgaagcaacuggaaaucuagugguaccgagauaugcauucgcaauggaaagaaaugcuggaucugguauuaucauuucagauacaccaguccacgauugcaauacaacuugucagacacccaagggugcuauaaacaccagccucccauuucagaauauacauccgaucacaauuggaaaauguccaaaauauguaaaaagcacaaaauugagacuggccacaggauugaggaaugucccgucuauucaaucuagaggccuauuuggggccauugccgguuucauugaagggggguggacagggaugguagauggaugguacgguuaucaccaucaaaaugagcaggggucaggauaugcagccgaccugaagagcacacagaaugccauugacgagauuacuaacaaaguaaauucuguuauugaaaagaugaauacacaguucacagcaguagguaaagaguucaaccaccuggaaaaaagaauagagaauuuaaauaaaaaaguugaugaugguuucuuggacauuuggacuuacaaugccgaacuguugguucuauuggaaaaugaaagaacuuuggacuaccacgauucaaaugugaagaacuuauacgaaaagguaagaagccaguuaaaaaacaaugccaaggaaauuggaaacggcugcuuugaauuuuaccacaaaugcgauaacacgugcauggaaagugucaaaaaugggacuuaugacuacccaaaauacucagaggaagcaaaauuaaacagagaagaaauagaugggguaaagcuggaaucaacaaggauuuaccagauuuuggcgaucuauucaacugucgccaguucauugguacugguagucucccugggggcaaucaguuucuggaugugcucuaaugggucucuacaguguagaauauguauuuaa

SEQ ID NO: 39948 - RNA, 1695 nt, Artificial Sequence
  derived and/or modified CDS sequence (wt) from hemagglutinin__InfluenzaA__AEW91908
auggagaaaauagugcuucuuuuugcaacaaucagccuuguuaaaagcgaucauauuugcauugguuaucaugcaaauaacucgacagagcagguugacacaauaauggaaaagaacgugacuguuacacaugcccaagacauacuggaaaagacacacaacgguaagcucugcgaucuaaauggagugaagccucugauuuuaaaagauuguaguguagcaggauggcuccucggaaauccaaugugugacgaauucaucaaugugccagaauggucuuacauaguagagaaggccaauccagccaaugaccucuguuacccagggaauuucaacgauuaugaagaauugaaacaccuauugagcaggauaaaccauuuugagaaaauacagaucauccccaaaaauucuuggucagaucaugaagccucguugggggugagugcagcauguccauaccagggaaaauccuccuucuucagaaaugugguauggcuuaucaaaaaggacaaugcauacccaacaauaaagaaaggcuacaauaauaccaaccaagaagaucucuugguacugugggggauucaccauccuaaugaugaggcagagcagacaaggcucuaucaaaacccaaccaccuauauuuccauugggacaucaacacuaaaccagagauugguaccaaaaauagccacuagguccaaaauaaacgggcaaaguggcaggauagauuucuucuggacaauuuuaaaaccgaaugaugcaauccacuucgagaguaauggaaauuucauugcuccagaauaugcauacaaaauugucaagaaaggagacucaacaauuaugaaaagugaaguggaauaugguaacugcaacaccaggugucagacuccaauaggggcgauaaacuccaguaugccauuccacaacauacacccucucaccaucggagaaugucccaaauaugugaaaucaaacaaacuaguccuugcgacugggcucagaaauagcccucaaggagagacgcgaggacuguuuggagcuauagcagguuuuauagagggaggauggcagggaaugguagaugguugguauggguaccaccacagcaaugagcaggggaguggguacgcugcagacaaagaaucuacucaaaaggcaauagacggggucaccaauaaggucaacucgaucauugacaaaaugaacacucaguuugaggccguaggaagggaauuuaauaacuuagagaggagaauagagaauuugaacaagaagauggaagauggauuccuagaugucuggacuuauaaugcugaacuucugguucucauggaaaaugagagaacucuagacuuccaugacucaaaugucaggaaccuuuacgacaaggucagacuacagcuuaaggauaaugcaaaagagcuggguaacgguuguuucgaguucuaucacaaaugugauaaugaauguauggaaaguguaagaaacggaacguaugacuacccgcaguauucagaagaagcaagauuaaaaagagaggaaauaaguggaguaaaauuggaaucaauaggaaucuaccaaauacugucaauuuauucaacaguggcgaguucccuaguacuggcaaucaugauggcuggucuaucuuuauggauguguuccaacgggucguuacagugcagaauuugcauuuaa

SEQ ID NO: 39949 - RNA, 1701 nt, Artificial Sequence
  derived and/or modified CDS sequence (wt) from hemagglutinin__InfluenzaA__AEX09175
augaaggcaauacuaguaguucugcuauauacauuugcaaccgcaaaugcagacacauuauguauagguuaucaugcgaacaauucaacagacacuguagacacaguacuagaaaagaauguagcaguaacacacucuguuaaccuucuagaagacaagcauaacgggaaacuaugcaaacuaagagggguagccccauugcauuuggguaaauguaacauugcuggcuggauccugggaaauccagagugugaaucacucuccacagcaagcucaugguccuacauuguggaaacaucuaguucagacaauggaacguguuacccaggagauuucaucgauuaugaggagcuaagagagcaauugagcucagugucaucauuugaaagguuugagauauuccccaagacaaguucauggcccaaucaugacucgaacaaagguguaacggcagcauguccucaugcuggagcaaaaagcuucuacaaaaauuuaauauggcuaguuaaaaaaggaaauucauacccaaagcucagcaaauccuacauuaaugauaaagggaaagagguccucgugcuauggggcauucaccauccaucuacuagugcugaccaacaaagucucuaucagaaugcagaugcauauguuuuuguggggacaucaagauacagcaagaaguucaagccggaaauagcaauaagacccaaagugagggaucgagaagggagaaugaacuauuacuggacacuaguagagccgggagacaaaauaacauucgaagcaacuggaaaucuagugguaccgagauaugcauucgcaauggaaagaaaugcuggaucugguauuaucauuucagauacaccaguccacgauugcaauacaacuugucagacacccaagggugcuauaaacaccagccucccauuucagaauauacauccgaucacaauuggaaaauguccaaaauauguaaaaagcacaaaauugagacuggccacaggauugaggaaugucccgucuauucaaucuagaggccuauuuggggccauugccgguuucauugaagggggguggacagggaugguagauggaugguacgguuaucaccaucaaaaugagcaggggucaggauaugcagccgaccugaagagcacacagaaugccauugacgagauuacuaacaaaguaaauucuguuauugaaaagaugaauacacaguucacagcaguagguaaagaguucaaccaccuggaaaaaagaauagagaauuuaaauaaaaaaguugaugaugguuuccuggacauuuggacuuacaaugccgaacuguugguucuauuagaaaaugaaagaacuuuggacuaccacgauucaaaugugaagaacuuauaugaaaagguaagaagccaguuaaaaaacaaugccaaggaaauuggaaacggcugcuuugaauuuuaccacaaaugcgauaacacgugcauggaaagugucaaaaaugggacuuaugacuacccaaaauacucagaggaagcaaaauuaaacagagaagaaauagaugggguaaagcuggaaucaacaaggauuuaccagauuuuggcgaucuauucaacugucgccaguucauugguacugguagucucccugggggcaaucaguuucuggaugugcucuaaugggucucuacaguguagaauauguauuuaa

SEQ ID NO: 39950 - RNA, 1701 nt, Artificial Sequence; identical to SEQ ID NO: 38221
  derived and/or modified CDS sequence (wt) from hemagglutinin__InfluenzaA__AEX25795

SEQ ID NO: 39951 - RNA, 1701 nt, Artificial Sequence
  derived and/or modified CDS sequence (wt) from hemagglutinin__InfluenzaA__AEX25797
auggaggcaauacuaguaguucugcuauauacauuugcaaccgcaaaugcagacacauuauguauagguuaucaugcgaacaauucaacagacacuguagacacaguacuagaaaagaauguaacaguaacacacucuguuaaccuucuagaagacaagcauaacgggaaacuaugcaaacuaagagggguagccccauugcauuuggguaaauguaacauugcuggcuggauccugggaaauccagagugugaaucacucuccacagcaagcucaugguccuacauuguggaaacaucuaauucagacaaugguacguguuacccaggagauuucaucgauuaugaggagcuaagagagcaauugagcucagugucaucauuugaaagguuugagauauuccccaagacaaguucauggcccaaucaugacucgaacaaagguguaacggcagcauguccucaugcuggagcaaaaagcuucuacaaaaauuuaauauggcuaguuaaaaaaggaaauucauacccaaagcucagcaaauccuacauuaaugauaaagggaaagaaguccucgugcuauggggcauucaccauccaucuacuagugcugaccaacaaagucucuaucagaaugcagaugcauauguuuuuguggggucaucaagauacagcaagaaguucaagccggaaauagcaauaagacccaaagugagggaucaagaagggagaaugaacuauuacuggacacuaguagagccgggagacaaaauaacauucgaagcaacuggaaaucuagugguaccgagauaugcauucgcaauggaaagaaaugcuggaucugguauuaucauuucagauacaccaguccacgauugcaauacaacuugucagacacccaagggugcuauaaacaccagccucccauuucauaauauacauccgaucacaauuggaaaauguccaaaauauguaaaaagcacaaaauugagacuggccacaggauugaggaaugucccgucuauucaaucuagaggccuauuuggggccauugccgguuucauugaagggggguggacagggaugguagauggaugguacgguuaucaccaucaaaaugagcaggggucaggauaugcagccgaccugaagagcacacagaaugccauugacgagauuacuaacaaaguaaauucuguuauugaaaagaugaauacacaguucacagcaguagguaaagaguucaaccaccuggaaaaaagaauagagaauuuaaauaaaaaaguugaugaugguuuccuggacauuuggacuuacaaugccgaacuguugguucuauuggaaaaugaaagaacuuuggacuaccacgauucaaaugugaagaacuuauaugaaaagguaagaagccaguuaaaaaacaaugccaaggaaauuggaaacggcugcuuugaauuuuaccacaaaugcgauaacacgugcauggaaagugucaaaaaugggacuuaugacuacccaaaauacucagaggaagcaaaauuaaacagagaagaaauagaugggguaaagcuggaaucaacaaggauuuaccagauuuuggcgaucuauucaacugucgccaguucauugguacugguagucucccugggggcaaucaguuucuggaugugcucuaaugggucucuacaguguagaauauguauuuaa

SEQ ID NO: 39952 - RNA, 1701 nt, Artificial Sequence
  derived and/or modified CDS sequence (wt) from hemagglutinin__InfluenzaA__AEX25798
augaaggcaauacuaguaguucugcuauauacauuugcaaccgcaaaugcagacacauuauguauagguuaucaugcgaacaauucaacagacacuguagacacaguacuagaaaagaauguaacaguaacacacucuguuaaccuucuagaagacaagcauaacgggaaacuaugcaaacuaagagggguagccccauugcauuuggguaaauguaacauugcuggcuggauccugggaaauccagagugugaaucacucuccacagcaagcucaugguccuacauuguggaaacaucuaguucagacaaugguacguguuacccaggagauuucaucaauuaugaggagcuaagagagcaauugagcucagugucaucauuugaaagguuugagauauuccccaagacaaguucauggcccaaucaugacucgaacaaagguguaacggcagcauguccucaugcuggagcaaaaagcuucuacaaaaauuuaauauggcuaguuaaaaaaggaaauucauacccaaagcucagcaaauccuacauuaaugauaaagggaaagaaguccucgugcuauggggcauucaccauccaucuacuagugcugaccaacaaagucucuaucagaaugcagaugcauauguuuuuguggggacaucaagauacagcaagaaguucaagccggaaauagcaauaagacccaaagugagggaucaagaagggagaaugaacuauuacuggacacuaguagagccgggagacaaaauaacauucgaagcaacuggaaaucuagugguaccgagauaugcauucgcaauggaaagaaaugcuggaucugguauuaucauuucagauacaccaguccacgauugcaauacaacuugucagacacccaagggugcuauaaacaccagccucccauuucauaauauacauccgaucacaauuggaaaauguccaaaauauguaaaaagcacaaaauugagacuggccacaggauugaggaaugucccgucuauucaaucuagaggccuauuuggggccauugccgguuucauugaagggggguggacagggaugguagauggaugguacgguuaucaccaucaaaaugagcaggggucaggauaugcagccgaccugaagagcacacagaaugccauugacgagauuacuaacaaaguaaauucuguuauugaaaagaugaauacacaguucacagcaguagguaaagaguucaaccaccuggaaaaaagaauagagaauuuaaauaaaaaaguugaugaugguuuccuggacauuuggacuuacaaugccgaacuguugguucuauuggaaaaugaaagaacuuuggacuaccacgauucaaaugugaagaacuuauaugaaaagguaagaagccaguuaaaaaacaaugccaaggaaauuggaaacggcugcuuugaauuuuaccacaaaugcgauaacacgugcauggaaagugucaaaaaugggacuuaugacuacccaaaauacucagaggaagcaaaauuaaacagagaagaaauagaugggguaaagcuggaaucaacaaggauuuaccagauuuuggcgaucuauucaacugucgccaguucauugguacugguagucucccugggggcaaucaguuucuggaugugcucuaaugggucucuacaguguagaauauguauuuaa

SEQ ID NO: 39953 - RNA, 1701 nt, Artificial Sequence; identical to SEQ ID NO: 34681
  derived and/or modified CDS sequence (wt) from hemagglutinin__InfluenzaA__AEX25800

SEQ ID NO: 39954 - RNA, 1701 nt, Artificial Sequence; identical to SEQ ID NO: 34681
  derived and/or modified CDS sequence (wt) from hemagglutinin__InfluenzaA__AEX25803

SEQ ID NO: 39955 - RNA, 1701 nt, Artificial Sequence; identical to SEQ ID NO: 34965
  derived and/or modified CDS sequence (wt) from hemagglutinin__InfluenzaA__AEX25808

SEQ ID NO: 39956 - RNA, 1701 nt, Artificial Sequence
  derived and/or modified CDS sequence (wt) from hemagglutinin__InfluenzaA__AEX25810
augaaggcaauacuaguaguucugcuauauacauuugcaaccgcaaaugcagacacauuauguauagguuaucaugcgaacaauucaacagacacuguagacacaguacuagaaaagaauguaacaguaacacacucuguuaaccuucuagaagacaagcauaacgggaaacuaugcaaacuaagagggguagccccauugcauuuggguaaauguaacauugcuggcuggauccugggaaauccagagugugaaucacucuccacagcaagcucaugguccuacauuguggaaacaucuaguucagacaauggaacguguuacccaggagauuucaucgauuaugaggagcuaagagagcaauugagcucagugucaucauuugaaagguuugagauauuccccaagacaaguucauggcccaaucaugacucgaacaaagguguaacggcagcauguccucaugcuggagcaaaaagcuucuacaaaaauuuaauauggcuaguuaaaaaaggaaauucauacccaaagcucagcaaauccuacauuaaugauaaagggaaagaaguccucgugcuauggggcauucaccaucaaucuacuagugcugaccaacaaagucucuaucagaaugcagaugcauauguuuuuguggggacaucaagauacagcaagaaguucaagccggaaauagcaauaagacccaaagugagggaucaagaagggagaaugaacuauuacuggacacuaguagagccgggagacaaaauaacauucgaagcaacuggaaaucuagugguaccgagauaugcauucgcaauggaaagaaaugcuggaucugguauuaucauuucagauacaccaguccacgauugcaauacaacuugucagacacccaagggugcuauaaacaccagccucccauuucagaauauacauccgaucacaauuggaaaauguccaaaauauguaaaaagcacaaaauugagacuggccacaggauugaggaaugucccgucuauucaaucuagaggccuauuuggggccauugccgguuucauugaagggggguggacagggaugguagauggaugguacgguuaucaccaucaaaaugagcaggggucaggauaugcagccgacuugaagagcacacagaaugccauugacgagauuacuaacaaaguaaauucuguuauugaaaagaugaauacacaguucacagcaguagguaaagaguucaaccaccuggaaaaaagaauagagaauuuaaauaaaaagguugaugaugguuuccuggacauuuggacuuacaaugccgaacuguugguucuauuggaaaaugaaagaacuuuggacuaccacgauucaaaugugaagaacuuauaugaaaagguaagaagccaguuaaaaaacaaugccaaggaaauuggaaacggcugcuuugaauuuuaccacaaaugcgauaacacgugcauggaaagugucaaaaaugggacuuaugacuacccaaaauacucagaggaagcaaaauuaaacagagaagaaauagaugggguaaagcuggaaucaacaaggauuuaccagauuuuggcgaucuauucaacugucgccaguucauugguacugguagucucccugggggcaaucaguuucuggaugugcucuaaugggucucuacaguguagaauauguauuuaa

SEQ ID NO: 39957 - RNA, 1701 nt, Artificial Sequence
  derived and/or modified CDS sequence (wt) from hemagglutinin__InfluenzaA__AEX25811
auggaggcaauacuaguaguucugcuauauacauuugcaaccgcaaaugcagacacauuauguauagguuaucaugcgaacaauucaacagacacuguagacacaguacuagaaaagaauguaacaguaacacacucuguuaaccuucuagaagacaagcauaacgggaaacuaugcaaacuaagagggguagccccauugcauuuggguaaauguaacauugcuggcuggauccugggaaauccagagugugaaucacucuucacagcaagcucaugguccuacauuguggaaacaucuaguucagacaauggaacguguuacccaggagauuucaucgauuaugaggagcuaagagagcaauugagcucagugucaucauuugaaagguuugagauauuccccaagacaaguucauggcccaaucaugacucgaacaaagguguaacggcagcauguccucaugcuggagcaaaaagcuucuacaaaaauuuaauauggcuaguuaaaaaaggaaauucauacccaaagcucagcaaauccuacauuaaugauaaagggaaagaaguccucgugcuauggggcauucaccauccaucuacuagugcugaccaacaaagucucuaucagaaugcagaugcauauguuuuuguggggucaucaagauacagcaagaaguucaagccggaaauagcaauaagacccaaagugagggaucaagaagggagaaugaacuauuacuggacacuaguagagccgggagacaaaauaacauucgaagcaacuggaaaucuagugguaccgagauaugcauucgcaauggaaagaaaggcuggaucugguauuaucauuucagauacaccaguccacgauugcaauacaacuugucagacacccaagggugcuauaaacaccagccucccauuucauaauauacauccgaucacaauuggaaaauguccaaaauauguaaaaagcacaaaauugagacuggccacaggauugaggaaugucccgucuauucaaucuagaggccuauuuggggccauugccgguuucauugaagggggguggacagggaugguagauggaugguacgguuaucaccaucaaaaugagcaggggucaggauaugcagccgaccugaagagcacacagaaugccauugacgagauuacuaacaaaguaaauucuguuauugaaaagaugaauacacaguucacagcaguagguaaagaguucaaccaccuggaaaaaagaauagagaauuuaaauaaaaaaguugaugaugguuuccuggacauuuggacuuacaaugccgaacuguugguucuauuggaaaaugaaagaacuuuggacuaccacgauucaaaugugaagaacuuauaugaaaagguaagaagccaguuaaaaaacaaugccaaggaaauuggaaacggcugcuuugaauuuuaccacaaaugcgauaacacgugcauggaaagugucaaaaaugggacuuaugacuacccaaaauacucagaggaagcaaaauuaaacagagaagaaauagaugggguaaagcuggaaucaacaaggauuuaccagauuuuggcgaucuauucaacugucgccaguucauugguacugguagucucccugggggcaaucaguuucuggaugugcucuaaugggucucuacaguguagaauauguauuuaa

SEQ ID NO: 39958 - RNA, 1701 nt, Artificial Sequence; identical to SEQ ID NO: 37651
  derived and/or modified CDS sequence (wt) from hemagglutinin__InfluenzaA__AEX25814

SEQ ID NO: 39959 - RNA, 1701 nt, Artificial Sequence
  derived and/or modified CDS sequence (wt) from hemagglutinin__InfluenzaA__AEX25816
augaaggcaauacuaguaguucugcuauauacauuugcaaccgcaaaugcagacacauuauguauagguuaucaugcgaacaauucaacagacacuguagacacaguacuagaaaagaauguaacaguaacacacucuguuaaccuucuagaagacaagcauaacgggaaacuaugcaaacuaagagggguagccccauugcauuuggguaaauguaacauugcuggcuggauccugggaaauccagagugugaaucacucuccacagcaaacucaugguccuacauuguggaaacaucuaguucagacaauggaacguguuacccaggagauuucaucaauuaugaggagcuaagagagcaauugagcucagugucaucauuugaaagguuugagauauuccccaagacaaguucauggcccaaucaugacucgaacaaagguguaacggcagcauguccucaugcuggagcaaaaagcuucuacaaaaauuuaauauggcuaguuaaaaaaggaaauucauacccaaagcucagcaaauccuacauuaaugauaaagggaaagaaguccucgugcuauggggcauucaccauccaucuacuagugcugaccaacaaagucucuaucagaaugcagaugcauauguuuuuguggggacaucaagauacagcaagaaguucaagccggaaauagcaauaagacccaaagugagggaucaagaagggagaaugaacuauuacuggacacuaguagagccgggagacaaaauaacauucgaagcaacuggaaaucuagugguaccgagauaugcauucgcaauggaaagaaaugcuggaucugguauuaucauuucagauacaccaguccacgauugcaauacaacuugucagacacccaagggugcuauaaacaccagccucccauuucagaauauacauccgaucacaauuggaaaauguccaaaauauguaaaaagcacaaaauugagacuggccacaggauugaggaaugucccgucuauucaaucuagaggccuauuuggggccauugccgguuucauugaagggggguggacagggaugguagauggaugguacgguuaucaccaucaaaaugagcaggggucaggauaugcagccgaccugaagagcacacagaaugccauugacgagauuacuaacaaaguaaauucuguuauugaaaagaugaauacacaguucacagcaguagguaaagaguucaaccaccuggaaaaaagaauagagaauuuaaauaaaaaaguugaugaugguuuccuggacauuuggacuuacaaugccgaacuguugguucuauuggaaaaugaaagaacuuuggacuaccacgauucaaaugugaagaacuuauaugaaaagguaagaagccaguuaaaaaacaaugccaaggaaauuggaaacggcugcuuugaauuuuaccacaaaugcgauaacacgugcauggaaagugucaaaaaugggacuuaugacuacccaaaauacucagaggaagcaaaauuaaacagagaagaaauagaugggguaaagcuggaaucaacaaggauuuaccagauuuuggcgaucuauucaacugucgccaguucauugguacugguagucucccugggggcaaucaguuucuggaugugcucuaaugggucucuacaguguagaauauguauuuaa

SEQ ID NO: 39960 - RNA, 1701 nt, Artificial Sequence
  derived and/or modified CDS sequence (wt) from hemagglutinin__InfluenzaA__AEX25818
auggaggcaauacuaguaguucugcuauauacauuugcaaccgcaaaugcagacacauuauguauagguuaucaugcgaacaauucaacagacacuguagacacaguacuagaaaagaauguaacaguaacacacucuguuaaccuucuagaagacaagcauaacgggaaacuaugcaaacuaagagggguagccccauugcauuuggguaaauguaacauugcuggcuggauccugggaaauccagagugugaaucacucuccacagcaagcucaugguccuacauuguggaaacaucuaauucagacaauggaacguguuacccaggagauuucaucgauuaugaggagcuaagagagcaauugagcucagugucaucauuugaaagguuugagauauuccccaagacaaguucauggcccaaucaugacucgaacaaagguguaacggcagcauguccucaugcuggagcaaaaagcuucuacaaaaauuuaauauggcuaguuaaaaaaggaaauucauacccaaagcucagcaaauccuacauuaaugauaaagggaaagaaguccucgugcuauggggcauucaccaucaaucuacuagugcugaccaacaaagucucuaucagaaugcagaugcauauguuuuuguggggucaucaagauacagcaagaaguucaagccggaaauagcaauaagacccaaagugagggaucaagaagggagaaugaacuauuacuggacacuaguagagccgggagacaaaauaacauucgaagcaacuggaaaucuagugguaccgagauaugcauucgcaauggaaagaaaugcuggaucugguauuaucaucucagauacaccaguccacgauugcaauacaacuugucagacacccaagggugcuauaaacaccagccucccauuucauaauauacauccgaucacaauuggaaaauguccaaaauauguaaaaagcacaaaauugagacuggccacaggauugaggaaugucccgucuauucaaucuagaggccuauuuggggccauugccgguuucauugaagggggguggacagggaugguagauggaugguacgguuaucaccaucaaaaugagcaggggucaggauaugcagccgaccugaagagcacacagaaugccauugacgagauuacuaacaaaguaaauucuguuauugaaaagaugaauacacaguucacagcaguagguaaagaguucaaccaccuggaaaaaagaauagagaauuuaaauaaaaaaguugaugaugguuuccuggacauuuggacuuacaaugccgaacuguugguucuauuggaaaaugaaagaacuuuggacuaccacgauucaaaugugaagaacuuauaugaaaagguaagaagccaguuaaaaaacaaugccaaggaaauuggaaacggcugcuuugaauuuuaccacaaaugcgauaacacgugcauggaaagugucaaaaaugggacuuaugacuacccaaaauacucagaggaagcaaaauuaaacagagaagaaauagaugggguaaagcuggaaucaacaaggauuuaccagauuuuggcgaucuauucaacugucgccaguucauugguacugguagucucccugggggcaaucaguuucuggaugugcucuaaugggucucuacaguguagaauauguauuuaa

SEQ ID NO: 39961 - RNA, 1701 nt, Artificial Sequence
  derived and/or modified CDS sequence (wt) from hemagglutinin__InfluenzaA__AEX25824
augaaggcaauacuaguaguucugcuauauacauuugcaaccgcaaaugcagacacauuauguauagguuaucaugcgaacaauucaacagacacuguagacacaguacuagaaaagaauguaacaguaacacacucuguuaaccuucuagaagacaagcauaacgggaaacuaugcaaacuaagagggguagccccauugcauuuggguaaauguaacauugcuggcuggauccugggaaauccagagugugaaucacucuccacagcaagcucaugguccuacauuguggaaacaucuaguucagacaauggaacguguuacccaggagauuucaucgauuaugaggagcuaagagagcaauugagcucagugucaucauuugaaagguuugagauauuccccaagacaaguucauggcccaaucaugacucgaacaaagguguaacggcagcauguccucaugcuggagcaaaaagcuucuacaaaaauuuaauaugguuaguuaaaaaaggaaauucauacccaaagcucagcaaauccuacauuaaugauaaagggaaagaaguccucgugcuauggggcauucaccauccaucuacuagugcugaccaacaaagucucuaucagaaugcagaugcauauguuuuuguggggacaucaagauacagcaagaaguucaagccggaaauagcaauaagacccaaagugagggaucaagaagggagaaugaacuauuacuggacacuaguagagccgggagacaaaauaacauucgaagcaacuggaaaucuagugguaccgagauaugcauucgcaauggaaagaaaugcuggaucagguauuaucauuucagacacaccaguccacgauugcaauacaacuugucagacacccaagggugcuauaaacaccagccucccauuucagaauauacauccgaucacaauuggaaaauguccaaaauauguagaaagcacaaaauugagacuggccacaggauugaggaaugucccgucuauucaaucuagaggccuauuuggggccauugccgguuucauugaagggggguggacagggaugguagauggaugguacgguuaucaccaucaaaaugagcaggggucaggauaugcagccgaccugaagagcacacagaaugccauugacgagauuacuaacaaaguaaauucuguuauugaaaagaugaauacacaguucacagcaguagguaaagaguucaaccaccuggaaaaaagaauagagaauuuaaauaaaaaaguugaugaugguuuccuggacauuuggacuuacaaugccgaacuguugguucuauuggaaaaugaaagaacuuuggacuaccacgauucaaaugugaagaacuuauaugaaaagguaagaagccaguuaaaaaacaaugccaaggaaauuggaaacggcugcuuugaauuuuaccacaaaugcgauaacacgugcauggaaagugucaaaaaugggacuuaugacuacccaaaauacucagaggaagcaaaauuaaacagagaagaaauagaugggguaaagcuggaaucaacaaggauuuaccagauuuuggcgaucuauucaacugucgccaguucauugguacugguagucucccugggggcaaucaguuucuggaugugcucuaaugggucucuacaguguagaauauguauuuaa

SEQ ID NO: 39962 - RNA, 1698 nt, Artificial Sequence
  derived and/or modified CDS sequence (wt) from hemagglutinin__InfluenzaA__AEX33420
augaaaguaaaacuacugguccuguuauguauauuuacagcuacauaugcagacacaauauguauaggcuaccaugccaacaacucaaccgacacuguugacacaguacuugagaagaaugugacagugacacacucugucaaccuacuugaggacagucacaauggaaaacuaugucuacuaaaaggaauagccccacuacaauuggguaauugcagcguugccggauggaucuuaggaaacccagaaugcgaauuacugauuuccaaggaaucaugguccuacauuguagaaacaccaaauccugagaauggaacauguuacccagguuauuucgccgacuaugaggaacugagggagcaauugaguucaguaucuucauuugagagguucgaaauauuccccaaagaaagcucauggcccaaccacaccguaaccggaguaucagcaucaugcucccauaaugggaaaagcaguuuuuacagaaauuugcuauggcugacggggaagagugguuuguacccaaaccugagcaaguccuaugcaaacaacaaagagaaagaaguccuuguacuaugggguguucaucacccgccuaacauaggggaccaaagggcccucuaucauacagaaaaugcuuaugucucuguagugucuucacauuauagcagaagauucaccccagaaauagccaaaagacccaaaguaagagaucaggaaggaagaaucaacuacuacuggacucugcuggaacccggggauacaauaauauuugaggcaaauggaaaucuaauagcgccaagguaugcuuucgcacugaguagaggcuuuggaucaggaaucaucaccucaaaugcaccaauggaugaaugugaugcgaagugucaaacaccucagggagcuauaaacagcagucuuccuuuccagaauguacacccagucacaauaggagaguguccaaaguaugucaagagugcaaaauuaaggaugguuacaggacuaaggaacaucccauccauucaauccagggguuuguuuggagccauugccgguuucauugaagggggguggacuggaaugguagaugguugguaugguuaucaucaucagaaugagcaaggaucuggcuaugcugcagaucagaaaaguacacaaaaugccauuaacgggauuacaaacaaggugaauucuguaauugagaaaaugaacacucaauucacagcugugggcaaagaauucaacaaauuggaaagaaggauggaaaacuuaaauaaaaaaguugaugauggguuucuagacauuuggacauauaaugcagaauuguugguucuacuggaaaaugaaaggacuuuggauuuccaugacuccaaugugaagaaucuguaugagaaaguaaaaagccaauuaaagaauaaugccaaagaaauaggaaacggguguuuugaguucuaucacaaguguaacgaugaaugcauggagagugugaaaaauggaacuuaugacuauccaaaauauuccgaagaaucaaaguuaaacagggagaaaauugauggagugaaauuggaaucaaugggagucuaucagauucuggcgaucuacucaacagucgccaguucccugguucuuuuggucucccugggggcaaucagcuucuggauguguuccaaugggucuuugcaguguagaauaugcaucuaa

SEQ ID NO: 39963 - RNA, 1701 nt, Artificial Sequence
  derived and/or modified CDS sequence (wt) from hemagglutinin__InfluenzaA__AEX33453
augaagacuaucauugcuuugagcuacauucuaugucugguuuucgcucaaaaacuucccggaaaugacaacagcacggcaacgcugugccuugggcaccaugcaguaccaaacggaacgauagugaaaacaaucacgaaugaccaaauugaaguuacuaaugcuacugagcugguucagaguuccucaacagguggaauaugcgacaguccucaucagauccuugauggagaaaacugcacacuaauagaugcucuauugggagacccucagugugauggcuuccaaaauaagaaaugggaccuuuuuguugaacgcagcaaagccuacagcaacuguuacccuuaugaugugccggauuaugccucccuuaggucacuaguugccucauccggcacacuggaguuuaacaaugaaagcuucaauuggacuggagucacucagaauggaacaagcucugcuugcaaaaggagaucugauaaaaguuucuuuaguagauugaauugguugacccaucuaaaauacaaauacccagcauugaacgugacuaugccaaacaaugaaaaauuugacaaauuguacauuugggggguucaccacccggguacggacagugaccaaaucagccuauaugcucaagcaucaggaagaaucacagucucuaccaaaagaagccaacaaacuguaaucccgaauaucggaucuagacccaggguaagggaugucuccagcagaauaagcaucuauuggacaauaguaaaaccgggagacauacuuuugauuaacagcacagggaaucuaauugcuccucgggguuacuucaaaauacgaagugggaaaagcucaauaaugagaucagaugcacccauuggcaaaugcaauucugaaugcaucacuccaaauggaagcauucccaaugacaaaccauuucaaaauguaaacaggaucacauauggggccugucccagauauguuaagcaaaacacucugaaauuggcaacagggaugcgaaauguaccagagaaacaaacuagaggcauauuuggcgcaaucgcggguuucauagaaaaugguugggagggaaugguggacgguugguacgguuucaggcaucaaaauucugagggcacaggacaagcagcagaucucaaaagcacucaagcagcaaucaaccaaaucaaugggaaacugaauagguuaaucgggaaaacaaacgagaaauuccaucagauugaaaaagaauucucagaaguagaagggagaauucaggaccucgagaaauauguugaggacacuaaaauagaucucuggucauacaacgcggagcuucuuguugcccuggagaaccaacauacaauugaucuaacugacucagaaaugaacaaacuguuugaaaggacaaagaagcaacugagggaaaaugcugaggauaugggcaaugguuguuucaaaauauaccacaaaugugacaaugccugcauagggucaaucagaaauggaacuuaugaccaugauguauacagagaugaagcauuaaacaaccgguuccagaucaaagguguugagcugaagucaggauacaaagauuggauccuauggauuuccuuugccauaucauguuuuuugcuuuguguugcuuuguugggguucaucaugugggccugccaaaaaggcaacauuaggugcaacauuugcauuuga

SEQ ID NO: 39964 - RNA, 1701 nt, Artificial Sequence
  derived and/or modified CDS sequence (wt) from hemagglutinin__InfluenzaA__AEX33464
augaagacuaucauugcuuugagcuacauucuaugucugguuuucgcucaaaaacuucccggaaaugacaacagcacggcaacgcugugccuugggcaccaugcaguaccaaacggaacaauagugaaaacaaucacgaaugaccaaauugaaguuacuaaugcuacugagcugguucagaguuccucaacagguggaauaugcgacaguccucaucagauccuugauggagaaaacugcacacuaauagaugcucuauugggagacccucagugugauggcuuccaaaauaagaaaugggaccuuuuuguugaacgcagcaaagccuacagcaacuguuacccuuaugaugugccggauuaugccucccuuaggucacuaguugccucauccggcacacuggaguuuaacaaugaaagcuucaauuggacuggagucacucaaaauggaacaagcucugcuugcaaaaggagaucuaauaaaaguuucuuuaguagauugaauugguugacccacuuaaaauucaaauacccagcauugaacgugacuaugccaaacaaugaaaaauuugacaaauuguacauuugggggguucaccacccggguacggacaaugaccaaaucagccuauaugcucaagcaucaggaagaaucacagucucuaccaaaagaagccaacaaacuguaaucccgaauaucggaucuagacccaggguaagggauguccccagcagaauaagcaucuauuggacaauaguaaaaccgggagacauacuuuugauuaacagcacagggaaucuaauugcuccucgggguuacuucaaaauacgaagugggaaaagcucaauaaugagaucagaugcacccauuggcaaaugcaauucugaaugcaucacuccaaauggaagcauucccaaugacaaaccauuucaaaauguaaacaggaucacauauggggccugucccagauauguuaagcaaaacacucugaaauuggcaacagggaugcgaaacguaccagagaaacaaacuagaggcauauuuggcgcaaucgcggguuucauagaaaaugguugggagggaaugguggacgguugguacgguuucaggcaucaaaauucugagggaacaggacaagcagcagaucucaaaagcacucaagcagcaaucaaccaaaucaaugggaagcugaauagguugaucgggaaaacaaacgagaaauuccaucagauugaaaaagaauucucagaaguagaagggagaauucaggaccucgagaaauauguugaggacacuaaaauagaucucuggucauacaacgcggagcuucuuguugcccuggagaaccaacauacaauugaucuaacugacucagaaaugaacaaacuguuugaaagaacaaagaagcaacugagggaaaaugcugaggauaugggcaaugguuguuucaaaauauaccacaaaugugacaaugccugcauagggucaaucagaaauggaacuuaugaccaugauguauacagagaugaagcauuaaacaaccgguuccagaucaaagguguugagcugaagucaggauacaaagauuggauccuauggauuuccuuugccauaucauguuuuuugcuuuguguugcuuuguugggguucaucaugugggccugccaaaaaggcaacauuaggugcaacauuugcauuuga

SEQ ID NO: 39965 - RNA, 1701 nt, Artificial Sequence; identical to SEQ ID NO: 39964
  derived and/or modified CDS sequence (wt) from hemagglutinin__InfluenzaA__AEX33475

SEQ ID NO: 39966 - RNA, 1701 nt, Artificial Sequence; identical to SEQ ID NO: 39964
  derived and/or modified CDS sequence (wt) from hemagglutinin__InfluenzaA__AEX33486

SEQ ID NO: 39967 - RNA, 1701 nt, Artificial Sequence; identical to SEQ ID NO: 39964
  derived and/or modified CDS sequence (wt) from hemagglutinin__InfluenzaA__AEX33497

SEQ ID NO: 39968 - RNA, 1701 nt, Artificial Sequence; identical to SEQ ID NO: 39964
  derived and/or modified CDS sequence (wt) from hemagglutinin__InfluenzaA__AEX33508

SEQ ID NO: 39969 - RNA, 1701 nt, Artificial Sequence; identical to SEQ ID NO: 39964
  derived and/or modified CDS sequence (wt) from hemagglutinin__InfluenzaA__AEX33519

SEQ ID NO: 39970 - RNA, 1701 nt, Artificial Sequence
  derived and/or modified CDS sequence (wt) from hemagglutinin__InfluenzaA__AEX33541
augaagacuaucauugcuuugagcuacauucuaugucugguuuucgcucaaaaacuucccggaaaugacaacagcacggcaacgcugugccuugggcaccaugcaguaccaaacggaacgauagugaaaacaaucacgaaugaccaaauugaaguuacuaaugcuacugagcugguucagauuuccucaacagguggaauaugcgacaguccucaucagauccuugauggagaaaacugcacacuaauagaugcucuauugggagacccucagugugauggcuuccagaauaagaaaugggaccuuuuuguugaacgcagcaaagccuacagcaacuguuacccuuaugaugugccggauuaugccucccuuaggucacuaguugccucauccggcacacuggaguuuaacaaugaaagcuucgauuggacuggagucacucagaauggaacaagcucuucuugcaaaaggagaucuaauaaaaguuucuuuaguagauugaauugguugacccacuuaaaauacaaauacccagcauugaacgugacuaugccaaacaaugaaaaauuugacaaauuguacauuugggggguucaccacccggguacggacagugaccaaaucagccuauaugcucaagcaucaggaagaaucacagucucuaccaaaagaagccaacaaacuguaaucccgaauaucggaucuagacccaggguaagggaugucuccagccgaauaagcaucuauuggacaauaguaaaaccgggagacauacuuuugauuaacagcacagggaaucuaauugcuccucgggguuacuucaaaauacgaagugggaaaagcucaauaaugagaucagaugcacccauuggcaaaugcaauucugaaugcaucacuccaaauggaagcauucccaaugacaaaccauuucaaaauguaaacaggaucacauauggggccugucccagauauguuaagcaaaacacucugaaauuggcaacagggaugcgaaauguaccagagaaacaaacuagaggcauauuuggcgcaaucgcggguuucauagaaaaugguugggagggaaugguggacgguugguacgguuucaggcaucaaaauucugagggcacaggacaagcagcagaucucaagagcacucaagcagcaaucaaccaaaucaaugggaaacugaauagguuaaucgggaaaacaaacgagaaauuccaucagauugaaaaagaauucucggaaguagaaggaagaauucaggaccuugagaaauauguugaggacacuaaaauagaucucuggucauacaacgcggagcuucuuguugcccuggagaaccaacauacaauugaucuaacagacucagaaaugaacaaacuguuugaaagaacaaagaagcaacugagggaaaaugcugaggauaugggcaaugguuguuucaaaauauaccacaaaugugacaaugccugcauagggucaaucagaaauggaacuuaugaccaugauguguacagagaugaagcauuaaacaaccgguuccagaucaaagguguugagcugaagucaggauacaaagauuggauccuauggauuuccuuugccauaucauguuuuuugcuuuguguugcuuuguugggguucaucaugugggccugccaaaaaggcaacauuaggugcaacauuugcauuuga

SEQ ID NO: 39971 - RNA, 1701 nt, Artificial Sequence
  derived and/or modified CDS sequence (wt) from hemagglutinin__InfluenzaA__AEX33574
augaagacuaucauugcuuuaagcuacauucuaugucugguuuucgcucaaaaacuucccggaaaugacaacagcacggcaacgcugugccuugggcaccaugcaguaccaaacggaacgauagugaaaacaaucacgaaugaccaaauugaaguuacuaaugcuacugagcugguucagaguuccucaacagguggaauaugcgacaguccucaucagauccuugauggagaaaacugcacacuaauagaugcucuauugggagacccucagugugauggcuuccaaaauaagaaaugggaccuuuuuguugaacgcagcaaagccuacagcaacuguuacccuuaugaugugccggauuaugccucccuuaggucacuaguugccucauccggcacacuggaguuuaacaaugaaagcuucaauuggacuggagucacucaaaauggaacaagcucugcuugcaaaaggagaucuaauaaaaguuucuuuaguagauugaauugguugacccacuuaaaauucaaauacccagcauugaacgugacuaugccaaacaaugaaaaauuugacaaauuguacauuugggggguucaccacccggguacggacaaugaccaaaucagccuauaugcucaagcaucaggaagaaucacagucucuaccaaaagaagccaacaaacuguaaucccgaauaucggaucuagacccaggguaagggauguccccagcagaauaagcaucuauuggacaauaguaaaaccgggagacauacuuuugauuaacagcacagggaaucuaauugcuccucgggguuacuucaaaauacgaagugggaaaagcucaauaaugagaucagaugcacccauuggcaaaugcaauucugaaugcaucacuccaaauggaagcauucccaaugacaaaccauuucaaaauguaaacaggaucacauauggggccugucccagauauguuaagcaaaacacucugaaauuggcaacagggaugcgaaauguaccagagaaacaaacuagaggcauauuuggcgcaaucgcggguuucauagaaaaugguugggagggaaugguggacgguugguacgguuucaggcaucaaaauucugagggaacaggacaagcagcagaucucaaaagcacucaagcagcaaucaaccaaaucaaugggaagcugaauagguugaucgggaaaacaaacgagaaauuccaucagauugaaaaagaauucucagaaguagaagggagaauucaggaccucgagaaauauguugaggacacuaaaauagaucucuggucauacaacgcggagcuucuuguugcccuggagaaccaacauacaauugaucuaacugacucagaaaugaacaaacuguuugaaagaacaaagaagcaacugagggaaaaugcugaggauaugggcaaugguuguuucaaaauauaccacaaaugugacaaugacugcauagggucaaucagaaauggaacuuaugaccaugauguauacagagaugaagcauuaaacaaccgguuccagaucaaagguguugagcugaagucaggauacaaagauuggauccuauggauuuccuuugccauaucauguuuuuugcuuuguguugcuuuguugggguucaucaugugggccugccaaaaaggcaacauuaggugcaacauuugcauuuga

SEQ ID NO: 39972 - RNA, 1701 nt, Artificial Sequence; identical to SEQ ID NO: 39964
  derived and/or modified CDS sequence (wt) from hemagglutinin__InfluenzaA__AEX33585

SEQ ID NO: 39973 - RNA, 1701 nt, Artificial Sequence
  derived and/or modified CDS sequence (wt) from hemagglutinin__InfluenzaA__AEX33596
augaagacuaucauugcuuugagcuacauucuaugucugguuuucgcucaaaaacuucccggaaaugacaacagcacggcaacgcugugccuugggcaccaugcaguaccaaacggaacaauagugaaaacaaucacgaaugaccaaauugaaguuacuaaugcuacugagcugguucagaguuccucaacagguggaauaugcgacaguccucaucagauccuugauggagaaaacugcacacuaauagaugcucuauugggagacccucagugugauggcuuccaaaauaagaaaugggaccuuuuuguugaacgcagcaaagccuacagcaacuguuacccuuaugaugugccggauuaugccucccuuaggucacuaguugccucauccggcacacuggaguuuaacaaugaaagcuucaauuggacuggagucacucaaaauggaacaagcucugcuugcaaaaggagaucuaauaaaaguuucuuuaguagauugaauugguugacccacuuaaaauucaaauacccagcauugaacgugacuaugccaaacaaugaaaaauuugacaaauuguacauuugggggguucaccacccggguacggacaaugaccaaaucagccuauaugcucaagcaucaggaagaaucacagucucuaccaaaagaagccaacaaacuguaaucccgaauaucggaucuagacccaggguaagggauauccccagcagaauaagcaucuauuggacaauaguaaaaccgggagacauacuuuugauuaacagcacagggaaucuaauugcuccucgggguuacuucaaaauacgaagugggaaaagcucaauaaugagaucagaugcacccauuggcaaaugcaauucugaaugcaucacuccaaauggaagcauucccaaugacaaaccauuucaaaauguaaacaggaucacauauggggccugucccagauauguuaagcaaaacacucugaaauuggcaacagggaugcgaaacguaccagagaaacaaacuagaggcauauuuggcgcaaucgcggguuucauagaaaaugguugggagggaaugguggacgguugguacgguuucaggcaucaaaauucugagggaacaggacaagcagcagaucucaaaagcacucaagcagcaaucaaccaaaucaaugggaagcugaauagguugaucgggaaaacaaacgagaaauuccaucagauugaaaaagaauucucagaaguagaagggagaauucaggaccucgagaaauauguugaggacacuaaaauagaucucuggucauacaacgcggagcuucuuguugcccuggagaaccaacauacaauugaucuaacugacucagaaaugaacaaacuguuugaaagaacaaagaagcaacugagggaaaaugcugaggauaugggcaaugguuguuucaaaauauaccacaaaugugacaaugccugcauagggucaaucagaaauggaacuuaugaccaugauguauacagagaugaagcauuaaacaaccgguuccagaucaaagguguugagcugaagucaggauacaaagauuggauccuauggauuuccuuugccauaucauguuuuuugcuuuguguugcuuuguugggguucaucaugugggccugccaaaaaggcaacauuaggugcaacauuugcauuuga

SEQ ID NO: 39974 - RNA, 1701 nt, Artificial Sequence; identical to SEQ ID NO: 39964
  derived and/or modified CDS sequence (wt) from hemagglutinin__InfluenzaA__AEX33618

SEQ ID NO: 39975 - RNA, 1701 nt, Artificial Sequence; identical to SEQ ID NO: 39964
  derived and/or modified CDS sequence (wt) from hemagglutinin__InfluenzaA__AEX33629

SEQ ID NO: 39976 - RNA, 1701 nt, Artificial Sequence; identical to SEQ ID NO: 39973
  derived and/or modified CDS sequence (wt) from hemagglutinin__InfluenzaA__AEX33640

SEQ ID NO: 39977 - RNA, 1701 nt, Artificial Sequence
  derived and/or modified CDS sequence (wt) from hemagglutinin__InfluenzaA__AEX33836
augaagacuaucauugcuuugagcuacauucuaugucugguuuucgcucaaaaacuucccggaaaugacaacagcacggcaacgcugugccuugggcaccaugcaguaccaaacggaacgauagugaaaacaaucacgaaugaccaaauugaaguuacuaaugcuacugagcuggugcagaguuccucaacagguggaauaugcgacaguccucaucagauccuugauggagaaaacugcacacuaauagaugcucuauugggagacccucagugugauggcuuccaaaauaagaaaugggaccuuuuuguugaacgcagcaaagccuacagcaacuguuacccuuaugaugugccggauuaugccucccuuaggucacuaguugccucauccggcacacuggaguuuaacaaugaaagcuucaauuggacuggagucacccaaaauggaacaagcucugcuugcaaaaggagaucuaauaacaguuucuuuaguagauugaauugguugacccacuuaaaauucaaauacccagcauugaacgugacuaugccaaacaaugaaaaauuugacaaauuguacauuugggggguucaccacccggguacggacaaugaccaaaucuuccuguaugcucaagcaucaggaagaaucacagucucuaccaaaagaagccaacaaacuguaaucccgaauaucggaucuagacccagaguaaggaauauccccagcagaauaagcaucuauuggacaauaguaaaaccgggagacauauuuuugauuaacagcacagggaaucuaauugcuccuagggguuacuucaaaauacgaagugggaaaagcucaauaaugagaucagaugcacccauuggcaaaugcaauucugaaugcaucacuccaaauggaagcauucccaaugacaaaccauuucaaaauguaaacaggaucacauauggggccugucccagauauguuaagcaaaacacucugaaauuggcaacagggaugcgaaauguaccagagaaacaaacuagaggcauauuuggcgcaaucgcggguuucauagaaaaugguugggagggaaugguggaugguugguacgguuucaggcaucaaaauucugagggaauaggacaagcagcagaucucaaaagcacucaagcagcaaucaaucaaaucaaugggaagcugaauagguugaucgggaaaaccaacgagaaauuccaucagauugaaaaagaauucucagaaguagaagggagaauucaggaccucgagaaauauguugaggacacuaaaauagaucucuggucauacaacgcggagcuucuuguugcccuggagaaccaacauacaauugaucuaacugacucagaaaugaacaaacuguuugaaagaacaaagaagcaacugagggaaaaugcugaggauaugggcaaugguuguuucaaaauauaccacaaaugugacaaugccugcauaggaucaaucagaaauggaacuuaugaccaugauguauacagagaugaagcauuaaacaaccgguuccagaucaaaggcguugagcugaagucaggauacaaagauuggauccuauggauuuccuuugccauaucauguuuuuugcuuuguguugcuuuguugggguucaucaugugggccugccaaaaaggcaacauuaggugcaacauuugcauuuga

SEQ ID NO: 39978 - RNA, 1701 nt, Artificial Sequence
  derived and/or modified CDS sequence (wt) from hemagglutinin__InfluenzaA__AEX33880
augaagacuaucauugcuuugagcuacauucuaugucugguuuucgcucaaaaacuucccggaaaugacaacagcacggcaacgcugugccuugggcaccaugcaguaccaaacggaacgauagugaaaacaaucacgaaugaccaaauugaaguuacuaaugcuacugagcugguucagaguuccucaacagguggaauaugcgacaguccucaucagauccuugauggagaaaacugcacacuaauagaugcucuauugggagacccucagugugauggcuuccaaaauaagaaaugggaccuuuuuguugaacgcagcaaagccuacagcaacuguuacccuuaugaugugccggauuaugccucccuuaggucacuaguugccucauccggcacacuggaguuuaacaaugaaagcuucaauuggacuggagucacucaaaauggaacaagcucugcuugcaaaaggagaucuaauaacaguuucuuuaguagauugaauugguugacccacuuaaaauucaaauacccagcauugaacgugacuaugccaaacaaugaaaaauuugacaaauuguacauuugggggguucaccacccggguacggacaaugaccaaaucuuccuguaugcucaagcaucaggaagaaucacagucucuaccaaaagaagccaacaaacuguaaucccgaauaucggaucuagacccagaguaaggaauauccccagcagaauaagcaucuauuggacaauaguaaaaccgggagacauacuuuugauuaacagcacagggaaucuaauugcuccuagggguuacuucaaaauacgaagugggaaaagcucaauaaugagaucagaugcacccauuggcaaaugcaauucugaaugcaucacuccaaauggaagcauucccaaugacaaaccauuucaaaauguaaacaggaucacauauggggccugucccagauauguuaagcaaaacacucugaaauuggcaacagggaugcgaaauguaccagagaaacaaacuagaggcauauuuggcgcaaucgcggguuucauagaaaaugguugggagggaaugguagaugguugguacgguuucaggcaucaaaauucugagggaauaggacaagcagcagaucucaaaagcacucaagcagcaaucaaucaaaucaaugggaagcugaauagguugaucgggaaaaccaacgagaaauuccaucagauugaaaaagaauucucagaaguagaagggagaauucaggaccucgagaaauauguugaggacacuaaaauagaucucuggucauacaacgcggagcuucuuguugcccuggagaaccaacauacaauugaucuaacugacucagaaaugaacaaacuguuugaaagaacaaagaagcaacugagggaaaaugcugaggauaugggcaaugguuguuucaaaauauaccacaaaugugacaaugccugcauaggaucaaucagaaauggaacuuaugaccaugauguauacagagaugaagcauuaaacaaccgguuccagaucaaaggcguugagcugaagucaggauacaaagauuggauccuauggauuuccuuugccauaucauguuuuuugcuuuguguugcuuuguugggguucaucaugugggccugccaaaaaggcaacauuaggugcaacauuugcauuuga

SEQ ID NO: 39979 - RNA, 1698 nt, Artificial Sequence
  derived and/or modified CDS sequence (wt) from hemagglutinin__InfluenzaA__AEX33913
augaaaguaaaacuacugguccuguuaugcacauuuacagcuacauaugcagacacaauauguauaggcuaccaugccaacaacucaaccgacacuguugacacaguacuugagaagaaugugacagugacacacucugucaaccugcuugaggacagucacaauggaaaauuaugucuauuaaaaggaauagccccacuacaauuggguaauugcagcguugccggauggaucuuaggaaacccagaaugcgaauuacugauuuccagggaaucaugguccuacauuguagaaaaaccaaauccugagaauggaacauguuacccagggcauuucgccgacuaugaggaacugagggagcaauugaguucaguaucuucauuugagagauucgaaauauuccccaaagaaaacucauggcccaaccacaccacaaccggaguaucagcaucaugcucccauaauggggaaagcaguuuuuacaaaaauuugcuauggcugacggggaagaaugguuuguacccaaaccugagcaaguccuaugcaaacaacaaaaagaaagaaguccuuguacuaugggguguucaucacccgccuaacauagguaaccaaagggcccucuaucauacagaaaaugcuuaugucucuguagugucuucacauuauagcagaaaauucaccccagaaauagccaaaagacccaaaguaagagaucaagaaggaagaaucaacuacuacuggacucuacuugaacccggggauacaauaauauuugaggcaaauggaaaucuaauagcgccaagauaugcuuucgcacugaguagaggcuuuggaucaggaaucaucaacucaaaugcaccaauggaugaaugugaugcgaagugccaaacaccucagggagcuauaaacagcagucuuccuuuccagaauguacacccagucacaauaggagaguguccaaaguaugucaggagugcaaaauuaaggaugguuacaggacuaaggaacaucccauccauucaauccagagguuuguuuggagccauugccgguuucauugaagggggguggacuggaaugguagaugguugguaugguuaucaucaucagaaugagcaaggaucuggcuaugcugcagaucaaaaaagcacacaaaaugccauuaaugggauuacaaacaaggugaauucuguaauugagaaaaugaacacucaauucacagcugugggcaaagaauucaacaaauuggaaagaaggauggaaaacuuaaauaaaaaaguugaugauggguuuauagacauuuggacauauaaugcagaauuguugguucuacuggaaaaugaaaggacuuuggauuuccaugacuccaaugugaagaaucuguaugagaaaguaaaaagccaauuaaagaauaaugccaaagaaauaggaaauggguguuuugaauucuaucacaaguguaacgaugaaugcauggagaguguaaaaaauggaacuuaugacuauccaaaauauuccgaagaaucaaaguuaaacagggagaaaauugauggagugaaauuugaaucaaugggagucuaucagauucuggcgaucuacucaacagucgccaguucucugguucuuuuggucucccugggggcaaucagcuucuggauguguuccaaugggucuuugcaguguagaauaugcaucuaa

SEQ ID NO: 39980 - RNA, 1698 nt, Artificial Sequence
  derived and/or modified CDS sequence (wt) from hemagglutinin__InfluenzaA__AEX33924
augaaaguaaaacuacugguccuguuaugcacauuuacagcuacauaugcagacacaauauguauaggcuaccaugccaacaacucaaccgacacuguugacacaguacuugagaagaaugugacagugacacacucugucaaccugcuugaggacagucacaauggaaaauuaugucuauuaaaaggaauagccccacuacaauuggguaauugcagcguugccggauggaucuuaggaaacccagaaugcgaaucacugauuuccagggaaucaugguccuacauuguagaaaaaccaaguccugagaaugggacauguuacccagggcauuucgccgacuaugaggaacuaagggagcaauugaguucaguaucuucauuugagagauucgaaauauuccccaaagaaagcucauggcccaaccacaccgcaaccggaguaucagcaucaugcucccauaaugggaaaagcaguuuuuacaaaaauuugcuauggcugacggggaagaaugguuuguacccaaaccugagcaaguccuaugcaaacaacaaagagaaagaaguccuuguacuaugggguguucaucacccgcccaacauaggugaccaaagggcccucuaucauacagaaaaugcuuaugucucuguagugucuucacauuauagcagaaaauucaccccagaaauagccaaaagacccaaaguaagagaucaaaaaggaagaaucaacuacuacuggacucuacuugaacccggggauacaauaauauuugaggcaaauggaaaucuaauagcgccaagauaugcuuucgcacugaguagaggcuuuggaucaggaaucaucaacucaaaugcaccaauggaugaaugugaugcgaagugccaaacaccucagggagcuauaaacagcagucuuccuuuccagaauguacacccagucacaauaggagaguguccaaaguaugucaggagugcaaaauuaaggaugguuacaggacuaaggaacaucccauccauucaauccagagguuuguuuggagccauugccgguuucauugaagggggguggacuggaaugguagaugguugguaugguuaucaucaucagaaugagcaaggaucuggcuaugcugcagaucaaaaaagcacacaaaaugccauuaaugggauuacaaacaaggugaauucuguaauugagaaaaugaacacucaauucacagcugugggcaaagaauucaacaaauuggaaagaaggauggaaaacuuaaauaaaaaaguugaugauggguuuauagacauuuggacauauaaugcagaauuguugguucuacuggaaaaugaaaggacuuuggauuuccaugacuccaaugugaagaaucuguaugagaaaguaaaaagccaauuaaagaauaaugccaaagaaauaggaaauggguguuuugaauucuaucacaaguguaacgaugaaugcauggagaguguaaaaaauggaacuuaugacuauccaaaauauuccgaagagucaaaguuaaacagggagaaaauugauggagugaaauuggaaucaaugggagucuaucagauucuggcgaucuacucaacagucgccaguucucugguucuuuuggucucccugggggcaaucagcuucuggauguguuccaaugggucuuugcaguguagaauaugcaucuaa

SEQ ID NO: 39981 - RNA, 1701 nt, Artificial Sequence
  derived and/or modified CDS sequence (wt) from hemagglutinin__InfluenzaA__AEX33957
augaagacuaucauugcuuugagcuacauucuaugucugguuuucgcucaaaaacuucccggaauugacaacagcacggcaacgcugugccuugggcaccaugcaguaccaaacggaacgauagugaaaacaaucacgaaugaccaaguugaaguuacuaaugcuacugagcugguucagaauuccucaacagguggaauaugcgacaguccucaucagauccuugauggagaaaacugcacacuaauagaugcucuauugggagacccucagugugauggcuuccaaaauaagaaaugggaccuuuuuguugaacgcagcaaagccuacagcaacuguuacccuuaugaugugccggauuaugccucccuuaggucacuaguugccucauccggcacacuggaguuuaacaaugaaagcuucaauuggacuggagucacucaaaauggaacaagcucugcuugcaaaaggggaucuaauaacaguuucuuuaguagauugaauugguugacccacucaaaauucaaauacccagcauugaacgugacuaugccaaacaaugaagaauuugacaaauuguacauuugggggguucaccacccggguacggacaaugaccaaaucuuccuguaugcucaagcaucaggaagaaucacagucucuaccaaaagaagccaacaaacuguaaucccgaauaucggaucuagacccagaguaaggaauauccccagcagaauaagcaucuauuggacaauaguaaaaccgggagacauacuuuugauuaacagcacagggaaucuaauugcuccuagggguuacuucaaaauacgaagugggaaaagcucaauaaugagaucagaugcacccauuggcaaaugcaauucugaaugcaucacuccaaauggaagcauucccaaugacaaaccauuucaaaauguaaacaggaucacauacggggccugucccagauauguuaagcaaaacacucugaaauuggcaacagggaugcgaaauguaccagagaaacaaacuagaggcauauuuggcgcaaucgcggguuucauagaaaaugguugggagggaaugguggaugguugguacgguuucaggcaucaaaauucugagggaauaggacaagcagcagaucucaaaagcacucaagcagcaaucgaucaaaucaaugggaagcugaauagguugaucgggaaaaccaacgagaaauuccaccagauugaaaaagaauucucagaaguagaagggagaauucaggaccucgagaaauauguugaggacacuaaaauagaucucuggucauacaacgcggagcuucuuguugcccuggagaaccaacauacaauugaucuaacugacucagaaaugaacaaacuguuugaaaagacaaagaagcaacugagggaaaaugcugaggauaugggcaaugguuguuucaaaauauaccacaaaugugauaaugccugcauaggaucaaucagaaauggaacuuaugaccaugauguauacagagaugaagcauuaaacaaccgguuucagaucaagggcguugagcugaagucaggauacaaagauuggauccuauggauuuccuuugccauaucauguuuuuugcuuuguguugcuuuguugggguucaucaugugggccugccaaaaaggcaacauuaggugcaacauuugcauuuga

SEQ ID NO: 39982 - RNA, 1701 nt, Artificial Sequence
  derived and/or modified CDS sequence (wt) from hemagglutinin__InfluenzaA__AEX33968
augaagacuaucauugcuuugagcuacauucuaugucugguuuucgcucaaaaacuucccggaauugacaacagcacggcaacgcugugccuugggcaccaugcaguaccaaacggaacgauagugaaaacaaucacgaaugaccaaauugaaguuacuaaugcuacugagcugguucagaauuccucaacagguggaauaugcgacaguccucaucagauccuugauggagaaaacugcacacuaauagaugcucuauugggagacccucagugugauggcuuccaaaauaagaaaugggaccuuuuuguugaacgcagcaaagccuacagcaacuguuacccuuaugaugugccggauuaugccucccuuaggucacuaguugccucauccggcacacuggaguuuaacaaugaaagcuucaauuggacuggagucacucaaaauggaacaagcucugcuugcaaaaggggaucuaauaacaguuucuuuaguagauugaauugguugacccacucaaaauucaaauacccagcauugaacgugacuaugccaaacaaugaagaauuugacaaauuguacauuugggggguucaccacccggguacggacaaugaccaaaucuuccugcaugcucaagcaucaggaagaaucacagucucuaccaaaagaagccaacaaacuguaaucccgaauaucggaucuagacccagaguaaggaauauccccagcagaauaagcaucuauuggacaauaguaaaaccgggagacauacuuuugauuaacagcacagggaaucuaauugcuccuagggguuacuucaaaauacgaagugggaaaagcucaauaaugagaucagaugcacccauuggcaaaugcaauucugaaugcaucacuccaaauggaagcauucccaaugacaaaccauuucaaaauguaaacaggaucacauacggggccugucccagauauguuaagcaaaacacucugaaauuggcaacagggaugcgaaauguaccagagaaacaaacuagaggcauauuuggcgcaaucgcggguuucauagaaaaugguugggagggaaugguggaugguugguacgguuucaggcaucaaaauucugagggaauaggacaagcagcagaucucaaaagcacucaagcagcaaucgaucaaaucaaugggaagcugaauagguugaucgggaaaaccaacgagaaauuccaccagauugaaaaagaauucucagaaguagaagggagaauucaggaccucgagaaauauguugaggacacuaaaauagaucucuggucauacaacgcggagcuucuuguugcccuggagaaccaacauacaauugaucuaacugacucagaaaugaacaaacuguuugaaaagacaaagaagcaacugagggaaaaugcugaggauaugggcaaugguuguuucaaaauauaccacaaaugugacaaugccugcauaggaucaaucagaaauggaacuuaugaccaugauguauacagagaugaagcauuaaacaaccgguuucagaucaagggcguugagcugaagucaggauacaaagauuggauccuauggauuuccuuugccauaucauguuuuuugcuuuguguugcuuuguugggguucaucaugugggccugccaaaaaggcaacauuaggugcaacauuugcauuuga

SEQ ID NO: 39983 - RNA, 1701 nt, Artificial Sequence
  derived and/or modified CDS sequence (wt) from hemagglutinin__InfluenzaA__AEX33979
augaagacuaucauugcuuugagcuacauucuaugucugguuuucgcucaaaaacuucccggaaaugacaacagcacggcaacgcugugccuugggcaccaugcaguaccaaacggaacgauagugaaaacaaucacgaaugaccaaauugaaguuacuaaugcuacugagcugguucagaguuccucaacaggugaaauaugcgacaguccucaucagauccuugauggagaaaacugcacacuaauagaugcucuauugggagacccucagugugauggcuuccaaaauaagaaaugggaccuuuuuguugaacgcagcaaagccuacagcaacuguuacccuuaugaugugccggauuaugccucccuuaggucacuaguugccucauccggcacacuggaguuuaacaaugaaagcuucaauuggacuggagucacucaaaacggaacaagcucugcuugcauaaggagaucuaauaacaguuucuuuaguagauugaauugguugacccacuuaaaauucaaauacccagcauugaacgugacuaugccaaacaaugaaaaauuugacaaauuguacauuugggggguucaccacccggguacggacaaugaccaaaucuuccuguaugcucaagcaucaggaagaaucacagucucuaccaaaagaagccaacaaacuguaaucccgaauaucggaucuagacccagaguaaggaauauccccagcagaauaagcauuuauuggacaauaguaaaaccgggagacauacuuuugauuaacagcacagggaaucuaauugcuccuagggguuacuucaaaauacgaagugggaaaagcucaauaaugagaucagaugcacccauuggcaaaugcaauucugaaugcaucacuccaaauggaagcauucccaaugacaaaccauuccaaaauguaaacaggaucacauacggggccugucccagauauguuaagcaaaacacucugaaauuggcaacagggaugcgaaauguaccagagaaacaaacuagaggcauauuuggcgcaaucgcggguuucauagaaaaugguugggagggaaugguggaugguugguacgguuucaggcaucaaaauucugaaggaauaggacaagcagcagaucucaaaagcacucaagcagcaaucgaucaaaucaaugggaagcugaauagguugaucgggaaaaccaacgagaaauuccaucagauugaaaaagaauucucagaagucgaagggagaauucaggaccuugagaaauauguugaggacaccaaaauagaucucuggucauacaacgcggagcuucuuguugcccuggagaaccaacauacaauugaucuaacugacucagaaaugaacaaacuguuugaaaaaacaaagaagcaacugagggaaaaugcugaggauaugggcaaugguuguuucaaaauauaccacaaaugugacaaugccugcauaggaucaaucagaaauggaacuuaugaccacgauguauacagagaugaagcauuaaacaaccgguuccagaucaauggcguugagcugaagucaggauacaaagauuggauccuauggauuuccuuugccauaucauguuuuuugcuuuguguugcuuuguugggguucaucaugugggccugccaaaaaggcaacauuaggugcaacauuugcauuuga

SEQ ID NO: 39984 - RNA, 1701 nt, Artificial Sequence
  derived and/or modified CDS sequence (wt) from hemagglutinin__InfluenzaA__AEX33990
augaagacuaucauugcuuugagcuacauucuauaucugguuuucgcucaaaaacuucccggaaaugacaacagcacggcaacgcugugccuugggcaccaugcaguaccaaacggaacgauagugaaaacaaucacgaaugaccaaauugaaguuacuaaugcuacugagcugguucagaguuccucaacaggugaaauaugcgacaguccucaucagauccuugauggagaaaacugcacacuaauagaugcucuauugggagacccucagugugauggcuuccaaaauaagaaaugggaccuuuuuguugaacgcagcaaagccuacagcaacuguuacccuuaugaugugccggauuaugccucccuuaggucacuaguugccucauccggcacacuggaguuuaacaaugaaagcuucaauuggacuggagucacucaaaacggaacaagcucugcuugcauaaggagaucuaauaacaguuucuuuaguagauugaauugguugacccacuuaaaauucaaauacccagcauugaacgugacuaugccaaacaaugaaaaauuugacaaauuguacauuugggggguucaccacccggguacggacaaugaccaaaucuuccuguaugcucaagcaucaggaagaaucacagucucuaccaaaagaagccaacaaacuguaaucccgaauaucggaucuagacccagaguaaggaauauccccagcagaauaagcaucuauuggacaauaguaaaaccgggagacauacuuuugauuaacagcacagggaaucuaauugcuccuagggguuacuucaaaauacaaagugggaaaagcucaauaaugagaucagaugcacccauuggcaaaugcaauucugaaugcaucacuccaaauggaagcauucccaaugacaaaccauuccaaaauguaaacaggaucacauacggggccugucccagauauguuaagcaagacacucugaaauuggcaacagggaugcgaaauguaccagagaaacaaacuagaggcauauuuggcgcaaucgcggguuucauagaaaaugguugggagggaaugguggaugguugguacgguuucaggcaucaaaauucugagggaauaggacaagcagcagaucucaaaagcacucaagcagcaaucgaucaaaucaaugggaagcugaauagguugaucgggaaaaccaacgagaaauuccaucagauugaaaaagaauucucagaagucgaagggagaauucaggaccuugagaaauauguugaggacaccaaaauagaucucuggucauacaacgcggagcuucuuguugcccuggagaaccaacauacaauugaucuaacugauucagaaaugaacaaacuguuugaaaaaacaaagaagcaacugagggaaaaugcugaggauaugggcaauggcuguuucaaaauauaccacaaaugugacaaugccugcauaggaucaaucagaaauggaacuuaugaccacgauguauacagagaugaagcauuaaacaaccgguuccagaucaagagcguugagcugaagucaggauacaaagauuggauccuauggauuuccuuugccauaucauguuuuuugcuuuguguugcuuuguugggguucaucaugugggccugccaaaaaggcaacauuagguguaacauuugcauuuga

SEQ ID NO: 39985 - RNA, 1701 nt, Artificial Sequence
  derived and/or modified CDS sequence (wt) from hemagglutinin__InfluenzaA__AEX34001
augaagacuaucauugcuuugagcuacauucuaugucugguuuucgcucaaaaacuucccggaaaugacaacagcacggcaacgcugugccuugggcaccaugcaguaccaaacggaacgauagugaaaacaaucacgaaugaccaaauugaaguuacuaaugcuacugagcugguucagaguuccucaacagguggaauaugcgacaguccucaucagauccuugauggagaaaacugcacacuaauagaugcucuauuaggagacccucagugugauggcuuccaaaauaagaaaugggaccuuuuuguugaacgcagcaaggccuacagcaacuguuacccuuaugaugugccggauuaugcuucccuuaggucacuaguugccucauccggcacacuggaguuuaacagugaaagcuucaauuggacuggagucacucaaaauggaacaagcucugcuugcaaaaggagaucuaauaacaguuucuuuaguagauugaauugguugacucacuuaaaauucaaauacccagcauugaacgugacuaugccaaacaaugaaaaauuugacaaauuguacauuugggggguucaccacccggguacggacaaugaccaaaucuuccuguaugcucaagcaucaggaagaaucacagucucuaccaaaagaagccaacaaacuguaauuccgaauaucggaucuagacccagaguaaggaacauccccagcagaauaagcaucuauuggacaauaguaaaaccuggagacauacuuuugauuaacagcacagggaaucuaauugcuccuagggguuacuucaaaauacgaagugggaaaagcucaauaaugagaucagaugcacccauuggcaaaugcaauucugaaugcaucacuccaaauggaagcauucccaaugacaaaccauuucaaaauguaaacaggaucacauauggggccugucccagauauguuaagcaaaacacucugaaauuggcaacagggaugcgaaauguaccagagaaacaaacuagaggcauauuuggcgcaaucgcggguuucauagaaaaugguugggagggaaugguggaugguugguacgguuucaggcaucaaaaugcugagggaauaggacaagcagcagaucucaaaagcacucaagcagcaaucaaucaaaucaaugggaagcugaauagguugaucgggaaaaccaacgagaaauuccaucagauugaaaaagaauucucagaaguagaagggagaauucaggaccucgagaaauauguugaggacacuaaaauagaucucuggucauacaacgcggagcuucuuguugcccuggagaaccaacauacaauugaucuaacugacucagaaaugaacaaacuguuugaaagaacaaagaagcaacugagggagaaugcugaggauaugggcaaugguuguuucaaaauauaccacaaaugugacaaugccugcauaggaucaaucagaaauggaacuuaugaccaugauguauacagagaugaagcauuaaacaaccguuuccagaucaaaggcguugagcugaagucaggauacaaagauuggauccuauggauuuccuuugccauaucauguuuuuugcuuuguguugcuuuguugggguucaucaugugggccugccaaaaaggcaacauuaggugcaacauuugcauuuga

SEQ ID NO: 39986 - RNA, 1701 nt, Artificial Sequence
  derived and/or modified CDS sequence (wt) from hemagglutinin__InfluenzaA__AEX34012
augaagacuaucauugcuuugagcuacauucuauaucugguuuucgcucaaaaacuucccggaaaugacaacagcacggcaacgcugugccuugggcaccaugcaguaccaaacggaacgauagugaaaacaaucacgaaugaccaaauugaaguuacuaaugcuacugagcugguucagaguuccucaacaggugaaauaugcgacaguccucaucagauccuugauggagaaaacugcacacuaauagaugcucuauugggagacccucagugugauggcuuccaaaauaagaaaugggaccuuuuuguugaacgcagcaaagccuacagcaacuguuacccuuaugaugugccggauuaugccucccuuaggucacuaguugccucauccggcacacuggaguuuaacaaugaaagcuucaauuggacuggagucacucaaaacggaacaagcucugcuugcauaaggagaucuaauaacaguuucuuuaguagauugaauugguugacccacuuaaaauucaaauacccagcauugaacgugacuaugccaaacaaugaaaaauuugacaaauuguacauuugggggguucaccacccagguacggacaaugaccaaaucuuccuguaugcucaagcaucaggaagaaucacagucucuaccaaaagaagccaacaaacuguaaucccgaauaucggaucuagacccagaguaagaaauauccccagcagaauaagcaucuauuggacaauaguaaaaccgggagacauacuuuugauuaacagcacagggaaucuaauugcuccuagggguuacuucaaaauacaaagugggaaaagcucaauaaugagaucagaugcacccauuggcaaaugcaauucugaaugcaucacuccaaauggaagcauucccaaugacaaaccauuccaaaauguaaacaggaucacauacggggccugucccagauauguuaagcaaaacacucugaaauuggcaacagggaugcgaaauguaccagagaaacaaacuagaggcauauuuggcgcaaucgcggguuucauagaaaaugguugggagggaaugguggaugguugguacgguuucaggcaucaaaauucugagggaauaggacaagcagcagaucucaaaagcacucaagcagcaaucgaucaaaucaaugggaagcugaauagguugaucgggaaaaccaacgagaaauuccaucagauugaaaaagaauucucagaagucgaagggagaauucaggaccuugagaaauauguugaggacaccaaaauagaucucuggucauacaacgcggagcuucuuguugcucuggagaaccaacauacaauugaucuaacugauucagaaaugaacaaacuguuugaaaaaacaaagaagcaacugagggaaaaugcugaggauaugggcaauggcuguuucaaaauauaccacaaaugugacaaugccugcauaggaucaaucagaaauggaacuuaugaccacgauguauacagagaugaagcauuaaacaaccgguuccagaucaagggcguugagcugaagucaggauacaaagauuggauccuauggauuuccuuugccauaucauguuuuuugcuuuguguugcuuuguugggguucaucaugugggccugccaaaaaggcaacauuagguguaacauuugcauuuga

SEQ ID NO: 39987 - RNA, 1701 nt, Artificial Sequence
  derived and/or modified CDS sequence (wt) from hemagglutinin__InfluenzaA__AEX34023
augaagacuaucauugcuuugagcuacauucuaugucugguuuucgcucaaaaacuuccuggaaaugacaacagcacggcaacgcugugccuugggcaccaugcaguaccaaacggaacgauagugaaaacaaucacgaaugaccaaauugaaguuacuaaugcuacugagcugguucagaguuccucaacaggugaaauaugcgacaguccucaucagauccuugauggagaaaacugcacacuaauagaugcuuuauugggagacccucaaugugauggcuuccaaaauaagaaaugggaccuuuuuguugaacgcagcaaagccuacagcaacuguuacccuuaugaugugccggauuaugccucccuuaggucacuaguugccucauccggcacacuggaguuuaacaaugaaagcuucaauuggacuggagucacucaaaacggaacaagcucugcuugcauaaggagaucuaauaacaguuucuuuaguagauugaauugguugacccacuuaaaauucaaauacccagcauugaacgugacuaugccaaacaaugaacaauuugacaaauuguacauuugggggguucaccacccggguacggacaaugaccaaaucuuccuguaugcucaagcaucaggaagaaucacagucucuaccaaaagaagccaacaaacuguaaucccgaauaucggaucuagacccagaguaaggaauaucccuagcagaauaagcaucuauuggacaauaguaaaaccgggagacauacuuuugauuaacagcacagggaaucuaauugcuccuagggguuacuucaaaauacgaagugggaaaagcucaauaaugagaucagaugcacccauuggcaaaugcaauucugaaugcaucacuccaaauggaagcauucccaaugacaaaccauuccaaaauguaaacaggaucacauacggggccugucccagauauguuaagcaaaacacucugaaauuggcaacagggaugcgaaauguaccagagaaacagacuagaggcauauuuggcgcaaucgcggguuucauagaaaaugguugggagggaaugguggaugguugguacgguuucaggcaucaaaauucugagggaagaggacaagcagcagaucucaaaagcacucaagcagcaaucgaucaaaucaaugggaagcugaauagauugaucgggaaaaccaacgagaaauuccaucagauugaaaaagaauucucagaagucgaagggagaauucaggaccuugagaaauauguugaggacaccaaaauagaucucuggucauacaacgcggagcuucuuguugcccuggagaaccaacauacaauugaucuaacugacucagaaaugaacaaacuguuugaaaaaacaaagaagcaacugagggaaaaugcugaggauaugggcaaugguuguuucaaaauauaccacaaaugugacaaugccugcauaggaucaaucagaaauggaacuuaugaccacgauguauacagagaugaagcauuaaacaaccgguuccagaucaagggaguugagcugaagucaggguacaaagauuggauccuauggauuuccuuugccauaucauguuuuuugcuuuguguugcuuuguugggguucaucaugugggccugccaaaaaggcaacauuaggugcaacauuugcauuuga

SEQ ID NO: 39988 - RNA, 1701 nt, Artificial Sequence
  derived and/or modified CDS sequence (wt) from hemagglutinin__InfluenzaA__AEX34044
augaagacuaucauugcuuuuagcuacauucuaugucugguuuucgcucaaaaacuucccggaauugacaacagcacggcaacgcugugccuugggcaccaugcaguaccaaacggaacaauagugaaaacaaucacgaaugaccaaauugaaguuacuaaugcuacugagcugguucagaguuccucaacagguggaauaugcgacaguccucaucagauccuugauggagaaaacugcacacuaauagaugcucuauugggagacccucagugugauggcuuccaaaauaagaaaugggaccuuuuuguugaacgcagcaaagccuacagcaacuguuacccuuaugaugugccggauuaugccucccuuaggucacuaguugccucauccggcacacuggaguuuaacaaugaaagcuucaauuggacuggagucacucaaaauggaacaagcucugcuugcaaaaggggaucuaauaacaguuucuuuaguagauugaauugguugacccacucaaaauucaaauacccagcauugaacgugacuaugccaaacaaugaagaauuugacaaauuguacauuugggggguucaccacccggguacggacaaugaccaaaucuuccuguaugcucaagcaucaggaagaaucacagucucuaccaaaagaagccaacaaacuguaaucccgaauaucggaucuagacccagaguaaggaauauccccagcagaauaagcaucuauuggacaauaguaaaaccgggagacauacuuuugauuaacagcacagggaaucuaauugcuccuagggguuacuucaaaauacgaagugggaaaagcucaauaaugagaucagaugcacccauuggcaaaugcaauucugaaugcaucacuccaaauggaagcauucccaaugacaaaccauuucaaaauguaaacaggaucacauacggggccugccccagauauguuaagcaaaacacucugaaauuggcaacagggaugcgaaauguaccagagaaacaaacuagaggcauauuuggcgcaaucgcggguuucauagaaaaugguugggagggaaugguggaugguugguacgguuucaggcaucaaaauucugagggaauaggacaagcagcagaucucaaaagcacucaagcagcaaucgaucaaaucaaugggaagcugaauagguugaucgggaaaaccaacgagaaauuccaccagauugaaaaagaauucucagaaguagaagggagaauucaggaccucgagaaauauguugaggacacuaaaauagaucucuggucauacaacgcggagcuucuuguugcccuggagaaccaacauacaauugaucuaacugacucagaaaugaacaaacuguuugaaaagacaaagaagcaacugagggaaaaugcugaggauaugggcaaugguuguuucaaaauauaccacaaaugugacaaugccugcauaggaucaaucagaaauggaacuuaugaccaugauguauacagagaugaagcauuaaacaaccgguuucagaucaagggcguugagcugaagucaggauacaaagauuggauccuauggauuuccuuugccauaucauguuuuuugcuuuguguugcuuuguugggguucaucaugugggccugccaaaaaggcaacauuaggugcaacauuugcauuuga

SEQ ID NO: 39989 - RNA, 1701 nt, Artificial Sequence
  derived and/or modified CDS sequence (wt) from hemagglutinin__InfluenzaA__AEX34089
augaagacuaucauugcuuugagcuacauucuaugucugguuuucgcucaaaaacuucccggaauugacaacagcacggcaacgcugugucuugggcaccaugcaguaccaaacggaacgauagugaaaacaaucacgaaugaccaaauugaaguuacuaaugcuacugagcugguucagaauuccucaacagguggaauaugcgacaguccucaucagauccuugauggagaaaacugcacacuaauagaugcucuauugggagacccucagugugauggcuuccaaaauaagaaaugggaccuuuuuguugaacgcagcaaagccuacagcaacuguuacccuuaugaugugccggauuaugccucccuuaggucacuaguugccucauccggcacacuggaguuuaacaaugaaagcuucaauuggacuggagucacucaaaauggaacaagcucugcuugcaaaaggggaucuaguaacaguuucuuuaguagauugaauugguugacccacucaaaauucaaauacccagcauugaacgugacuaugccaaacaaugaagaauuugacaaauuguacauuugggggguucaccacccggguacggacaaugaccaaaucuuccuguaugcucaagcaucaggaagaaucacagucucuaccaaaagaagccaacaaacuguaaucccuaauaucggaucuagacccagaguaaggaauauccccagcagaauaagcaucuauuggacaauaguaaaaccgggagacauacuuuugauuaacagcacagggaaucuaauugcuccuagggguuacuucaaaauacgaagugggaaaagcucaauaaugagaucagaugcacccauuggcaaaugcaauucugaaugcaucacuccaaauggaagcauucccaaugacaaaccauuucaaaauguaaacaggaucacauacggggccugucccagauauguuaagcaaaacacucugaaauuggcaacagggaugcgaaauguaccagagaaacaaacuagaggcauauuuggcgcaaucgcggguuucauagaaaaugguugggagggaaugguggaugguugguacgguuucaggcaucaaaauucugagggaauaggacaagcagcagaucucaaaagcacucaagcagcaaucgaucaaaucaaugggaagcugaauagguugaucgggaaaaccaacgagaaauuccaccagauugaaaaagaauucucagaaguagaagggagaauucaggaccucgagaaauauguugaggacacuaaaauagaucucuggucauacaacgcggagcuucuuguugcccuggagaaccaacauacaauugaucuaacugacucagaaaugaacaaacuguuugaaaagacaaagaagcaacugagggaaaaugcugaggauaugggcaaugguuguuucaaaauauaccacaaaugugacaaugccugcauaggaucaaucagaaauggaacuuaugaccaugauguauacagagaugaagcauuaaacaaccgguuucagaucaagggcguugagcugaagucaggauacaaagauuggauccuauggauuuccuuugccauaucauguuuuuugcuuuguguugcuuuguugggguucaucaugugggccugccaaaaaggcaacauuaggugcaacauuugcauuuga

SEQ ID NO: 39990 - RNA, 1701 nt, Artificial Sequence
  derived and/or modified CDS sequence (wt) from hemagglutinin__InfluenzaA__AEX34123
augaagacuaucauugcuuugagcuacauucuaugucugguuuucgcucaaaaacuucccggaauugacaacagcacggcaacgcugugccuugggcaccaugcaguaccaaacggaacgauagugaaaacaaucacgaaugaccaaauugaaguuacuaaugcuacugagcugguucagaauuccucaacagguggaauaugcgacaguccucaucagauccuugauggagaaaacugcacacuaauagaugcucuauugggagacccucagugugauggcuuccaaaauaagaaaugggaccuuuuuguugaacgcagcaaagccuacagcaacuguuacccuuaugaugugccggacuaugccucccuuaggucacuaguugccucauccggcacacuggaguuuaacaaugaaagcuucaauuggacuggagucacucaaaauggaacaagcucugcuugcaaaaggggaucuaauaacaguuucuuuaguagauugaauugguugacccacucaaaauucaaauacccagcauugaacgugacuaugccaaacaaugaagaauuugacaaauuguacauuugggggguucaccacccggguacggacaaugaccaaaucuuccuguaugcucaagcaucaggaagaaucacagucucuaccaaaagaagccaacaaacuguaaucccgaauaucggaucuagacccagaguaaggaauauccccagcagaauaagcaucuauuggacaauaguaaaaccgggagacauacuuuugauuaacagcacagggaaucuaauugcuccuagggguuacuucaaaauacgaagugggaaaagcucaauaaugagaucagaugcacccauuggcaaaugcaauucugaaugcaucacuccaaauggaagcauucccaaugacaaaccauuucaaaauguaaacaggaucacauacggggccugucccagauauguuaagcaaaacacucugaaauuggcaacagggaugcgaaauguaccagagaaacaaacuagaggcauauuuggcgcaaucgcggguuucauagaaaaugguugggagggaaugguggaugguugguacgguuucaggcaucaaaauucugagggaauaggacaagcagcagaucucaaaagcacucaagcagcaaucgaucaaaucaaugggaagcugaauagguugaucgggaaaaccaacgagaaauuccaccagauugaaaaagaauucucagaaguagaagggagaauucaggaccucgagaaauauguugaggacacuaaaauagaucucuggucauacaacgcggagcuucuuguugcccuggagaaccaacauacaauugaucuaacugacucagaaaugaacaaacuguuugaaaagacaaagaagcaacugagggaaaaugcugaggauaugggcaaugguuguuucaaaauauaccacaaaugugacaaugccugcauaggaucaaucagaaauggaacuuaugaccaugauguauacagagaugaagcauuaaacaaccgguuucagaucaagggcguugagcugaagucaggauacaaagauuggauccuauggauuuccuuugccauaucauguuuuuugcuuuguguugcuuuguugggguucaucaugugggccugccaaaaaggcaacauuaggugcaacauuugcauuuga

SEQ ID NO: 39991 - RNA, 1701 nt, Artificial Sequence
  derived and/or modified CDS sequence (wt) from hemagglutinin__InfluenzaA__AEX34134
augaagacuaucauugcuuugagcuacauucuaugucugguuuucgcucaaaaacuuccuggaaaugacaacagcauggcaacgcugugccuugggcaccaugcaguaccaaacggaacgauagugaaaacaaucacgaaugaccaaauugaaguuacuaaugcuacugagcugguucagaguuccucaacaggugaaauaugcgacaguccucaucagauccuugauggagaaaacugcacacuaauagaugcucuauugggagacccucagugugauggcuuccaaaauaagaaaugggaccuuuuuguugaacgcagcaaagccuacagcaacuguuacccuuaugaugugccggauuaugccucccuuaggucacuaguugccucauccggcacacuggaguuuaacaaugaaagcuucaauuggacuggagucacucaaaacggaacaagcucugcuugcauaaggagaucuaauaacaguuucuuuaguagauugaauugguugacccacuuaaaauucaaauacccagcauugaacgugacuaugccaaacaaugaaaaauuugacaaauuguacauuugggggguucaccacccggguacggacaaugaccaaaucuuccuguaugcucaagcaucaggaagaaucacagucucuaccaaaagaagccaacaaacuguaaucccgaauaucggaucuagacccagaguaaggaauauccccagcagaauaagcaucuauuggacaauaguaaaaccgggagacauacuuuugauuaacagcacagggaaucuaauugcuccuagggguuacuucaaaauacgaagugggaaaagcucaauaaugagaucagaugcacccauuggcaaaugcaauucugaaugcaucacuccaaauggaagcauucccaaugacaaaccauuccaaaauguaaacaggaucacauacggggccugucccagauauguuaagcaaaacacucugaaauuggcaacagggaugcgaaauguaccagagaaacaaacuagaggcauauuuggcgcaaucgcggguuucauagaaaaugguugggagggaaugguggaugguugguacgguuucaggcaucaaaauucugagggaauaggacaagcagcagaucucaaaagcacucaagcagcaaucgaucaaaucaaugggaagcugaauagguugaucgggaaaaccaacgagaaauuccaucagauugaaaaagaauucucagaagucgaagggagaauucaggaccuugagaaauauguugaggacaccaaaauagaucucuggucauacaacgcggagcuucuuguugcccuggagaaccaacauacaauugaucuaacugacucagaaaugaacaaacuguuugaaaaaacaaagaagcaacugagggaaaaugcugaggauaugggcaaugguuguuucaaaauauaccacaaaugugacaaugccugcauaggaucaaucagaaauggaacuuaugaccacgauguauacagagaugaagcauuaaacaaccgguuccagaucaagggcguugagcugaagucaggauacaaagauuggauccuauggauuuccuuugccauaucauguuuuuugcuuuguguugcuuuguugggguucaucaugugggccugccaaaaaggcaacauuaggugcaacauuugcauuuga

SEQ ID NO: 39992 - RNA, 1701 nt, Artificial Sequence
  derived and/or modified CDS sequence (wt) from hemagglutinin__InfluenzaA__AEX34145
augaagacuaucauugcuuugagcuacauucuaugucugguuuucgcucaaaaacuucccggaauugacaacagcacggcaacgcugugccuugggcaccaugcaguaccaaacggaacgauagugaaaacaaucacgaaugaccaaauugaaguuacuaaugcuacugagcugguucagaauuccucaacagguggaauaugcgacaguccucaucagauccuugauggagaaaacugcacacuaauagaugcucuauugggagacccucagugugauggcuuccaaaauaagaaaugggaccuuuuuguugaacgcagcaaagccuacagcaacuguuacccuuaugaugugccggauuaugccucccuuaggucacuaguugccucauccggcacacuggaguuuaacaaugaaagcuucaauuggacuggagucacucaaaauggaacaagcucugcuugcaaaaggggaucuaauaacaguuucuuuaguagauugaauugguugacccacucaaaauucaaauacccagcauugaacgugacuaugccaaacaaugaagaauuugacaaauuguacauuugggggguucaccacccggguacggacaaugaccaaaucuuccuguaugcucaagcaucaggaagaaucacagucucuaccaaaagaagccaacaaacuguaaucccgaauaucggaucuagacccagaguaaggaauauccccagcagaauaagcaucuauuggacaauaguaaaaccgggagacauacuuuugauuaacagcacagggaaucuaauugcuccuagggguuacuucaaaauacgaagugggaaaagcucaauaaugagaucagaugcacccauuggcaaaugcaauucugaaugcaucacuccaaauggaagcauucccaaugacaaaccauuucaaaauguaaacaggaucacauacggggccugucccagauauguuaagcaaaacacucugaaauuggcaacagggaugcgaaauguaccagagaaacaaacuagaggcauauuuggcgcaaucgcggguuucauagaaaaugguugggagggaaugguggaugguugguacgguuucaggcaucaaaauucugagggaauaggacaagcagcagaucucaaaagcacucaagcagcaaucgaucaaaucaaugggaagcugaauagguugaucgggaaaaccaacgagaaauuccaccagauugaaaaagaauucucagaaguagaagggagaauucaggaccucgagaaauauguugaggacacuaaaauagaucucuggucauacaacgcggagcuucuuguugcccuggagaaccaacauacaauugaucuaacugacucagaaaugaacaaacuguuugaaaagacaaagaagcaacugagggaaaaugcugaggauaugggcaaugguuguuucaaaauauaccacaaaugugacaaugccugcauaggaucaaucagaaauggaacuuaugaccaugauguauacagagaugaagcauuaaacaaccgguuucagaucaagggcguugagcugaagucaggauacaaagauuggauccuauggauuuccuuugccauaucauguuuuuugcuuuguguugcuuuguugggguucaucaugugggccugccaaaaaggcaacauuaggugcaacauuugcauuuga

SEQ ID NO: 39993 - RNA, 1701 nt, Artificial Sequence
  derived and/or modified CDS sequence (wt) from hemagglutinin__InfluenzaA__AEX34156
augaagacuaucauugcuuugagcuacauucuaugucugguuuucgcucaaaaacuuccuggaaaugacaacagcacggcaacgcugugccuugggcaccaugcaguaccaaacggaacgauagugaaaacaaucacgaaugaccaaauugaaguuacuaaugccacugagcugguucagaguuccucaacaggugaaauaugcggcaguccucaucagauccuugauggagaaaacugcacacuaauagaugcucuauugggagacccucagugugauggcuuccaaaauaagaaaugggaccuuuuuguugaacgcagcaaagccuacagcaacuguuacccuuaugaugugccggauuaugccucccuuaggucacuaguugccucauccggcacacuggaguuuaacaaugaaagcuucaauuggacuggagucacucaaaacggaacaagcucugcuugcauaaggagaucuaauaacaguuucuuuaguagauugaauugguugacccacuuaaaauucaaauacccagcauugaacgugacuaugccaaacaaugaaaaauuugacaaauuguacauuugggggguucaccacccggguacggacaaugaccaaaucuuccuguaugcucaagcaucaggaagaaucacagucucuaccaaaagaagccaacaaacuguaaucccgaauaucggaucuagacccagaguaaggaauaucccuagcagaauaagcaucuauuggacaauaguaaaaccgggagacauacuuuugauuaacagcacagggaaucuaauugcuccuagggguuacuucaaaauacgaagugggaaaagcucaauaaugagaucagaugcacccauuggcaaaugcaauucugaaugcaucacuccaaauggaagcauucccaaugacaaaccauuccaaaauguaaacaggaucacauacggggccugucccagauauguuaagcaaaacacucugaaauuggcaacagggaugcgaaauguaccagagaaacaaacuagaggcauauuuggcgcaaucgcggguuucauagaaaaugguugggagggaaugguggaugguugguacgguuucaggcaucaaaauucugagggaacaggacaagcagcagaucucaaaagcacucaagcagcaaucgaucaaaucaaugggaagcugaauagguugaucgggaaaaccaacgagaaauuccaucagauugaaaaagaauucucagaagucgaagggagaauucaggaccucgagaaauauguugaggacaccaaaauagaucucuggucauacaacgcggagcuucuuguugcccuggagaaccaacauacaauugaucuaacugacucagaaaugaacaaacuguuugaaaaaacaaagaagcaacugagggaaaaugcugaggauaugggcaaugguuguuucaaaauauaccacaaaugugacaaugccugcauaggaucaaucagaaauggaacuuaugaccacgauguauacagagaugaagcauuaaacaaccgguuccagaucaagggcguugagcugaagucaggauacaaagauuggauccuauggauuuccuuugccauaucauguuuuuugcuuuguguuguuuuguugggguucaucaugugggccugccaaaaaggcaacauuaggugcaacauuugcauuuga

SEQ ID NO: 39994 - RNA, 1701 nt, Artificial Sequence
  derived and/or modified CDS sequence (wt) from hemagglutinin__InfluenzaA__AEX34178
augaagacuaucauugcuuugagcuacauucuaugucugguuuucgcucaaaaacuucccggaaaugacaacagcacagcaacgcugugccuugggcaccaugcaguaccaaacggaacgauagugaaaacaaucacgaaugaccaaauugaaguuacuaaugcuacugagcugguucagaguuccucaacaggugaaauaugcgacaguccucaucagauccuugauggagaaaacugcacacuaauagaugcucuauugggagacccucagugugauggcuuucaaaauaagaaaugggaccuuuuuguugaacgcagcaaagccuacagcaacuguuacccuuaugaugugccggauuaugccucccuuaggucacuaguugccucauccggcacacuggaguuuaacaaugaaagcuucaauuggacuggagucacucaaaacggaacaagcucugcuugcauaaggagaucuaauaacaguuucuuuaguagauugaauugguugacccacuuaaaauucaaauacccagcauugaacgugacuaugccaaacaaugaaaaauuugacaaauuguacauuugggggguucaucacccggguacggacaaugaccaaaucuuccuguaugcucaagcaucaggaagaaucacagucucuaccaaaagaagccaacaaacuguaaucccgaauaucggaucuagacccagaguaaggaauauccccagcagaauaagcauuuauuggacaauaguaaaaccgggagacauacuuuugauuaacagcacagggaaucuaauugcuccuagggguuauuucaaaauacgaagugggaaaagcucaauaaugagaucagaugcacccauuggcaaaugcaauucugaaugcauaacuccaaauggaagcauucccaaugacaaaccauuccaaaauguaaacaggaucacauacggggccugucccagauauguuaagcaaaacacucugaaauuggcaacagggaugcgaaauguaccagagaaacaaacuagaggcauauuuggcgcaaucgcagguuucauagaaaaugguugggagggaaugguggaugguugguacgguuucaggcaucaaaauucugagggaauaggacaagcagcagaucucaaaagcacucaagcagcaaucgaucaaaucaaugggaagcugaauagguugaucgggaaaaccaacgagaaauuccaucagauugaaaaagaauucucagaagucgaagggagaauucaggaccuugagaaauauguugaggacaccaaaauagaucucuggucauacaacgcggagcuucuuguugcccuggagaaccaacauacaauugaucuaacugacucagaaaugaacaaacuguuugaaaaaacaaagaagcaacugagggaaaaugcugaggauaugggcaaugguuguuucaaaauauaccacaaaugugacaaugccugcauaggaucaaucagaaauggaacuuaugaccacgauguauacagagaugaagcauuaaacaaccgguuccagaucaagggcguugagcugaagucaggauacaaagauuggauccuauggauuuccuuugccauaucauguuuuuugcuuuguguugcuuuguugggguucaucaugugggccugccaaaaaggcaacauuaggugcaacauuugcauuuga

SEQ ID NO: 39995 - RNA, 1701 nt, Artificial Sequence
  derived and/or modified CDS sequence (wt) from hemagglutinin__InfluenzaA__AEX34188
augaagacuaucauugcuuugagcuacauucuaugucugguuuucgcucaaaaauuuccuggaaaugacaacagcacggcaacgcugugccuugggcaccaugcaguaccaaacggaacgauagugaaaacaaucacgaaugaccaaauugaaguuacuaaugcuacugagcugguucagaguuccucaacaggugaaauaugcgacaguccucaucagauccuugauggagaaaacugcacacuaauagaugcucuauugggagacccucagugugauggcuuccaaaauaagaauugggaccuuuuuguugaacgcagcaaagccuacagcaacuguuacccuuaugaugugccggauuaugccucccuuaggucacuaguugccucauccggcacacuggaguuuaacaaugaaagcuucaauuggacuggagucacucaaaacggaacaagcucugcuugcauaaggagaucuaauaacaguuucuuuaguagauugaauugguugacccacuuaaaauucaaauacccagcauugaacgugacuaugccaaacaaugaaaauuuugacaaauuguacauuugggggguucaccacccggguacggacaaugaccaaaucuuccuguaugcucaagcaucaggaagaaucacagucucuaccaaaagaagccaacaaacuguaaucccgaauaucggaucuagacccagaguaaggaauaucccuagcagaauaagcaucuauuggacaauaguaaaaccgggagacauacuuuugauuaacagcacagggaaucuaauugcuccuagggguuacuucaaaauacgaagugggaaaagcucaauaaugagaucagaugcacccauuggcaaaugcaauucugaaugcaucacuccaaauggaagcauucccaaugacaaaccauuccaaaauguaaacaggaucacauacggggccugucccagauauguuaagcaaaacacucugaaauuggcaacagggaugcgaaauguaccagagaaacaaacuagaggcauauuuggcgcaaucgcugguuucauagaaaaugguugggagggaaugguggaugguugguacgguuucaggcaucaaaauucugagggaauaggacaagcagcagaucucaaaagcacucaagcagcaaucgaucaaaucaaugggaagcugaauagguugaucgggaaaaccaacgagaaauuccaucagauugaaaaagaauucucagaagucgaagggagaauucaggaccuugagaaauauguugaggacaccaaaauagaucucuggucauacaacgcggagcuucuuguugcccuggagaaccaacauacaauugaucuaacugauucagaaaugaacaaacuguuugaaaaaacaaagaagcaacugagggaaaaugcugaggauaugggcaaugguuguuucaaaaucuaccacaaaugugacaaugccugcauaggaucaaucagaaauggaacuuaugaccacgauguauacagagaugaagcauuaaacaaccgguuccagaucaagggcguugagcugaagucaggauacaaagauuggauccuauggauuuccuuugccauaucauguuuuuugcuuuguauugcuuuguugggguucaucaugugggccugccaaaaaggcaacauuaggugcaacauuugcauuuga

SEQ ID NO: 39996 - RNA, 1701 nt, Artificial Sequence
  derived and/or modified CDS sequence (wt) from hemagglutinin__InfluenzaA__AEX34199
augaagacuaucauugcuuugagcuacauucuaugucugguuuucgcucaaaaacuuccuggaaaugacaacagcacggcaacgcugugccuugggcaccaugcaguaccaaacggaacaauagugaaaacaaucacgaaugaccaaauugaaguuacuaaugcuacugagcugguucagaguuccucaacaggugaaauaugcgacaguccucaucagauccuugauggagaaaacugcacacuaauagaugcucuauugggagacccucagugugauggcuuccaaaauaagaaaugggaccuuuuuguugaacgcagcaaagccuacagcaacuguuacccuuaugaugugccggauuaugccucccuuaggucacuaguugccucaucuggcacacuggaauuuaacaaugaaagcuucaauuggacuggagucacucaaaauggaacaagcucugcuugcauaaggagaucuaauaacaguuucuuuaguagauugaauugguugacccacuuaaaauucaaauacccagcauugaacgugacuaugccaaacaaugaacaauuugacaaauuguacauuugggggguucaccacccggguacggacaaugaccaaaucuuccuguaugcucaagcaucaggaagaaucacagucucuaccaaaagaagccaacaaacuguaaucccgaauaucggaucuagacccagaguaaggaauaucccuagcagaauaagcaucuauuggacaauaguaaaaccgggagacauacuuuugauuaacagcacagggaaucuaauugcuccuagggguuacuucaaaauacgaagugggaaaagcucaauaaugagaucagaugcacccauuggcaaaugcaauucugaaugcaucacuccaaauggaagcauucccaaugacaaaccauuccaaaauguaaacaggaucacauacggggccugucccagauauguuaagcaaaacacucugaaauuggcaacagggaugcgaaauguaccagagaaacaaacuagaggcauauuuggcgcaaucgcggguuucauagaaaaugguugggagggaaugguggaugguugguacgguuucaggcaucaaaauucugagggaagaggacaagcagcagaucucaaaagcacucaagcagcaaucgaucaaaucaaugggaagcugaauagauugaucgggaaaaccaacgagaaauuccaucagauugaaaaagaauucucagaagucgaagggagaauucaggaccuugagaaauauguugaggacaccaaaauagaucucuggucauacaacgcggagcuucuuguugcccuggagaaccaacauacaauugaucuaacugacucagaaaugaacaaacuguuugaaaaaacaaagaagcaacugagggaaaaugcugaggauaugggcaaugguuguuucaaaauauaccacaaaugugacaaugccugcauaggaucaaucagaaauggaacuuaugaccacgauguauacagagaugaagcauuaaacaaccgguuccagaucaagggaguugagcugaagucaggguacaaagauuggauccuauggauuuccuuugccauaucauguuuuuugcuuuguguugcuuuguugggguucaucaugugggccugccaaaaaggcaacauuaggugcaacauuugcauuuga

SEQ ID NO: 39997 - RNA, 1701 nt, Artificial Sequence
  derived and/or modified CDS sequence (wt) from hemagglutinin__InfluenzaA__AEX34221
augaagacuaucauugcuuugagcuacauucuaugucugguuuucgcucaaaaacuucccggaauugacaacagcacggcaacgcugugccuugggcaccaugcaguaccaaacggaacgauagugaaaacaaucacgaaugaccaaauugaaguuacuaaugcuacugagcugguucagaguuccucaacagguggaauaugcgacaguccucaucagauccuugauggagaaaacugcacacuaauagaugcucuauugggagacccucagugugauggcuuccaaaauaagaaaugggaccuuuuuguugaacgcagcaaagccuacagcaacuguuacccuuaugaugugccggauuaugccucccuuaggucacuaguugccucauccggcacacuggaguuuaacaaugaaagcuucaauuggacuggagucacucaaaauggaacaagcucugcuugcaaaaggggaucuaauaacaguuucuuuaguagauugaauugguugacccacucaaaauucaaauacccagcauugaacgugacuaugccaaacaaugaagaauuugacaaauuguacauuugggggguucaccacccggguacggacaaugaccaaaucuuccuguaugcucaagcaucaggaagaaucacagucucuaccaaaagaagccaacaaacuguaaucccgaauaucggaucuagacccagaguaaggaauauccccagcagaauaagcaucuauuggacaauaguaaaaccgggagacauacuuuugauuaacagcacagggaaucuaauugcuccuagggguuacuucaaaauacgaagugggaaaagcucaauaaugagaucagaugcacccauuggcaaaugcgauucugaaugcaucacuccaaauggaagcauucccaaugacaaaccauuucaaaauguaaacaggaucacauacggggccugucccagauauguuaagcaaaacacucugaaauuggcaacagggaugcgaaauguaccagagaaacaaacuagaggcauauuuggcgcaaucgcggguuucauagaaaaugguugggagggaaugguggaugguugguacgguuucaggcaucaaaauucugagggaauaggacaagcagcagaucucaaaagcacucaagcagcaaucgaucaaaucaaugggaagcugaauagguugaucgggaaaaccaacgagaaauuccaccagauugaaaaagaauucucagaaguagaagggagaauucaggaccucgagaaauauguugaggacacuaaaauagaucucuggucauacaacgcggagcuucuuguugcccuggagaaccaacauacaauugaucuaacugacucagaaaugaacaaacuguuugaaaagacaaagaagcaacugagggaaaaugcugaggauaugggcaaugguuguuucaaaauauaccacaaaugugacaaugccugcauaggaucaaucagaaauggaacuuaugaccaugauguauacagagaugaagcauuaaacaaccgguuucagaucaagggcguugagcugaagucaggauacaaagauuggauccuauggauuuccuuugccauaucauguuuuuugcuuuguguugcuuuguugggguucaucaugugggccugccaaaaaggcaacauuaggugcaacauuugcauuuga

SEQ ID NO: 39998 - RNA, 1701 nt, Artificial Sequence
  derived and/or modified CDS sequence (wt) from hemagglutinin__InfluenzaA__AEX34243
augaagacuaucauugcuuugagcuacauucuaugucugguuuucgcucaaaaacuuccuggaaaugacaacagcacggcaacgcugugccucgggcaccaugcaguaccaaacggaacgauagugaaaacaaucacgaaugaccaaauugaaguuacuaaugcuacugagcugguucagaguuccucaacaggugaaauaugcgacaguccucaucagauccuugauggagaaaacugcacacuaauagaugcucuauugggagacccucagugugauggcuuccaaaauaagaaaugggaccuuuuuguugaacgcagcaaagccuacagcaacuguuacccuuaugaugugccggauuaugccucccuuaggucacuaguugccucauccggcacacuggaguuuaacaaugaaagcuucaauuggacuggagucacucaaaacggaacaagcucugcuugcauaaggagaucuaauaacaguuucuuuaguagauugaauugguugacccacuuaaaauucaaauacccagcauugaacgugacuaugccaaacaaugaaaaauuugacaaauuguacauuugggggguucaccacccggguacggacaaugaccaaaucuuccuguaugcucaagcaucaggaagaaucacagucucuaccaaaagaagccaacaaacuguaaucccgaauaucggaucuagacccagaguaaggaauaucccuagcagaauaagcaucuauuggacaauaguaaaaccgggagacauacuuuugauuaacagcacagggaaucuaauugcuccuagggguuacuucaaaauacgaagugggaaaagcucaauaaugagaucagaugcacccauuggcaaaugcaauucugaaugcaucacuccaaauggaagcauucccaaugacaaaccauuccaaaauguaaacaggaucacauacggggccugucccagauauguuaagcaaaacacucugaaauuggcaacagggaugcgaaauguaccagagaaacaaacuagaggcauauuuggcgcaaucgcggguuucauagaaaaugguugggagggaaugguggaugguugguacgguuucaggcaucaaaauucugagggaauaggacaagcagcagaucucaaaagcacucaagcagcaaucgaucaaaucaaugggaagcugaauagguugaucgggaaaaccaacgagaaauuccaucagauugaaaaagaauucucagaagucgaagggagaauucaggaccuugagaaauauguugaggacaccaaaauagaucucuggucauacaacgcggagcuucuuguugcccuggagaaccaacauacaauugaucuaacugauucagaaaugaacaaacuguuugaaaaaacaaaaaagcaacugagggaaaaugcugaagauaugggcaaugguuguuucaaaauauaccacaaaugugacaaugccugcauaggaucaaucagaaauggaacuuaugaccacgauguauacagagaugaagcauuaaacaaccgguuccagaucaagggcguugagcugaagucaggauacaaagauuggauccuauggauuuccuuugccauaucauguuuuuugcuuuguguugcuuuguugggguucaucaugugggccugccaaaaaggcaacauuaggugcaacauuugcauuuga

SEQ ID NO: 39999 - RNA, 1701 nt, Artificial Sequence
  derived and/or modified CDS sequence (wt) from hemagglutinin__InfluenzaA__AEX34254
augaagacuaucauugcuuugagcuacauucuaugucugguuuucgcucaaaaauuuccuggaaaugacaacagcacggcaacgcugugccuugggcaccaugcaguaccaaacggaacgauagugaaaacaaucacgaaugaccaaauugaaguuacuaaugcuacugagcugguucagaguuccucaacaggugaaauaugcgacaguccucaucagauccuugauggagaaaacugcacacuaauagaugcucuauugggagacccucagugugauggcuuccaaaauaagaauugggaccuuuuuguugaacgcagcaaagccuacagcaacuguuacccuuaugaugugccggauuaugccucccuuaggucacuaguugccucauccggcacacuggaguuuaacaaugaaagcuucaauuggacuggagucacucaaaacggaacaagcucugcuugcauaaggagaucuaauaacaguuucuuuaguagauugaauugguugacccacuuaaaauucaaauacccagcauugaacgugacuaugccaaacaaugaaaauuuugacaaauuguacauuugggggguucaccacccggguacggacaaugaccaaaucuuccuguaugcucaagcaucaggaagaaucacagucucuaccaaaagaagccaacaaacuguaaucccgaauaucggaucuagacccagaguaaggaauaucccuagcagaauaagcaucuauuggacaauaguaaaaccgggagacauacuuuugauuaacagcacagggaaucuaauugcuccuagggguuacuucaaaauacgaagugggaaaagcucaauaaugagaucagaugcacccauuggcaaaugcaauucugaaugcaucacuccaaauggaagcauucccaaugacaaaccauuccaaaauguaaacaggaucacauacggggccugucccagauauguuaagcaaaacacucugaaauuggcaacagggaugcgaaauguaccagagaaacaaacuagaggcauauuuggcgcaaucgcugguuucauagaaaaugguugggagggaaugguggaugguugguacgguuucaggcaucaaaauucugagggaauaggacaagcagcagaucucaaaagcacucaagcagcaaucgaucaaaucaauggaaagcugaauagguugaucgggaaaaccaacgagaaauuccaucagauugaaaaagaauucucagaagucgaagggagaauucaggaccuugagaaauauguugaggacaccaaaauagaucucuggucauacaacgcggagcuucuuguugcccuggagaaccaacauacaauugaucuaacugauucagaaaugaacaaacuguuugaaaaaacaaagaagcaacugagggaaaaugcugaggauaugggcaaugguuguuucaaaaucuaccacaaaugugacaaugccugcauaggaucaaucagaaauggaacuuaugaccacgauguauacagagaugaagcauuaaacaaccgguuccagaucaagggcguugagcugaagucaggauacaaagauuggauccuauggauuuccuuugccauaucauguuuuuugcuuuguauugcuuuguugggguucaucaugugggccugccaaaaaggcaacauuaggugcaacauuugcauuuga

SEQ ID NO: 40000 - RNA, 1701 nt, Artificial Sequence
  derived and/or modified CDS sequence (wt) from hemagglutinin__InfluenzaA__AEX34265
augaagacuaucauugcuuugagcuacauucuaugucugguuuucgcucaaaaacuuccuggaaaugacaacagcacggcaacgcugugccuugggcaccaugcaguaccaaacggaacgauagugaaaacaaucacgaaugaccaaauugaaguuacuaaugcuacugagcugguucagaguuccucaacaggugaaauaugcgauaguccucaucagauccuugauggagaaaacugcacacuaauagaugcucuauugggagacccucagugugauggcuuccaaaauaagaaaugggaccuuuuuguugaacgcagcaaagccuacagcaacuguuacccuuaugaugugccggauuaugccucccuuaggucacuaguugccucauccggcacacuggaguuuaacaaugaaagcuucaauuggacuggagucacucaaaacggaacaagcucugcuugcauaaggagaucuaauaacaguuucuuuaguagauugaauugguugacccacuuaaaauucaaauacccagcauugaacgugacuaugccaaacaaugaaaaauuugacaaauuguacauuugggggguucaccacccggguacggacaaugaccaaaucuuccuguaugcucaagcaucaggaagaaucacagucucuaccaaaagaagccaacaaacuguaaucccgaauaucggaucuagacccagaguaaggaauaucccuagcagaauaagcaucuauuggacaauaguaaaaccgggagacauacuuuugauuaacagcacagggaaucuaauugcuccuagggguuacuucaaaauacgaagugggaaaagcucaauaaugagaucagaugcacccauuggcaaaugcaauucugaaugcaucacuccaaauggaagcauucccaaugacaaaccauuccaaaauguaaacaggaucacauacggggccugucccagauauguuaagcaaaacacucugaaauuggcaacagggaugcgaaacguaccagagaaacaaacuagaggcauauuuggcgcaaucgcggguuucauagaaaaugguugggagggaaugguggaugguugguacgguuucaggcaucaaaauucugagggaauaggacaagcagcagaucucaaaagcacucaagcagcaaucgaucaaaucaaugggaagcugaauagguugaucgggaaaaccaacgagaaauuccaucagauugaaaaagaauucucagaagucgaagggagaauucaggaccuugagaaauauguugaggacaccaaaauagaucucuggucauacaacgcggagcuucuuguugcccuggagaaccaacauacaauugaucuaacugacucagaaaugaacaaacuguuugaaaaaacaaagaagcaacugagggaaaaugcugaggauaugggcaaugguuguuucaaaauauaccacaaaugugacaaugccugcauaggaucaaucagaaauggaacuuaugaccacgauguauacagagaugaagcauuaaacaaccgguuccaaaucaagggcguugagcugaagucaggauacaaagauuggauccuauggauuuccuuugccauaucauguuuuuugcuuuguguugcuuuguugggguucaucaugugggccugccaaaaaggcaacauuaggugcaacauuugcauuuga

SEQ ID NO: 40001 - RNA, 1701 nt, Artificial Sequence
  derived and/or modified CDS sequence (wt) from hemagglutinin__InfluenzaA__AEX34275
augaagacuaucauugcuuugagcuacauucuaugucugguuuucgcucaaaaacuucccggaauugacaacagcacggcaacgcugugccuugggcaccaugcaguaccaaacggaacgauagugaaaacaaucacgaaugaccaaauugaaguuacuaaugcuacugagcugguucagaauuccucaacagguggaauaugcgacaguccucaucagauccuugauggagaaaacugcacacuaauagaugcucuauugggagacccucagugugauggcuuccaaaauaagaaaugggaccuuuuuguugaacgcagcaaagccuacagcaacuguuacccuuaugaugugccggauuaugccucccuuaggucacuaguugccucauccggcacacuggaguuuaacaaugaaagcuucaauuggacuggagucacucaaaauggaacaagcucugcuugcaaaaggggaucuaauaacaguuucuuuaguagauugaauugguugacccacucaaaauucaaauacccagcauugaacgugacuaugccaaacaaugaagaauuugacaaauuguacauuugggggguucuccacccggguacggacaaugaccaaaucuuccuguaugcucaagcaucaggaagaaucacagucucuaccaaaagaagccaacaaacuguaaucccgaauaucggaucuagacccagaguaaggaauauccccagcagaauaagcaucuauuggacaauaguaaaaccgggagacauacuuuugauuaacagcacagggaaucuaauugcuccuagggguuacuucaagauacgaagugggaaaagcucaauaaugagaucagaugcacccauuggcaaaugcaauucugaaugcaucacuccaaauggaagcauucccaaugacaaaccauuucaaaauguaaacaggaucacauacggggccugucccagauauguuaagcaaaacacucugaaauuggcaacagggaugcgaaauguaccagagaaacaaacuagaggcauauuuggcgcaaucgcggguuucauagaaaaugguugggagggaaugguggaugguugguacgguuucaggcaucaaaauucugagggaauaggacaagcagcagaucucaaaagcacucaagcagcaaucgaucaaaucaaugggaagcugaauagguugaucgggaaaaccaacgagaaauuccaccagauugaaaaagaauucucagaaguagaagggagaauucaggaccucgagaaauauguugaggacacuaaaauagaucucuggucauacaacgcggagcuucuuguugcccuggagaaccaacauacaauugaucuaacugacucagaaaugaacaaacuguuugaaaagacaaagaagcaacugagggaaaaugcugaggauaugggcaaugguuguuucaaaauauaccacaaaugugacaaugccugcauaggaucaaucagaaauggaacuuaugaccauuauguauacagagaugaagcauuaaacaaccgguuucagaucaagggcguugagcugaagucaggauacaaagauuggauccuauggauuuccuuugccauaucauguuuuuugcuuuguguugcuuuguugggguucaucaugugggccugccaaaaaggcaacauuaggugcaacauuugcauuuga

SEQ ID NO: 40002 - RNA, 1698 nt, Artificial Sequence
  derived and/or modified CDS sequence (wt) from hemagglutinin__InfluenzaA__AEX34318
augaaaguaaaacuacugguccuguuaugcacauuuacagcuacauaugcagacacaauauguauaggcuaccaugcuaacaacucgaccgacacuguugacacaguacuugaaaagaaugugacagugacacacucugucaaccugcuugagaacagucacaauggaaaacuaugucuauuaaaaggaauagccccacuacaauuggguaacugcagcguugccggguggaucuuaggaaacccagaaugcgaauuacugauuuccaaggagucaugguccuacauuguagaaaaaccaaauccugagaauggaacauguuacccagggcauuucgcugacuaugaggaacugagggagcaauugaguucaguaucuucauuugagagguucgaaauauuccccaaagaaagcucauggcccaaccacaccguaaccggagugucagcaucaugcucccauaauggggaaagcaguuuuuacagaaauuugcuauggcugacggggaagaaugguuuauacccaaaccugagcaaguccuaugcaaacaacaaagaaaaagaaguccuuguacuaugggguguucaucacccgccaaacauaggugaccaaaaggcccucuaucauacagaaaaugcuuauguuucuguagugucuucacauuauagcagaaaauucaccccagaaauagcaaaaagacccaaaguaagagaucaagaaggaagaaucaacuacuacuggacucugcuugaacccggggauacaauaauauuugaggcaaauggaaaucuaauagcgccaagauaugcuuucgcacugaguagaggcuuuggaucaggaaucaucaacucaaaugcaccaauggauaaaugugaugcgaagugccaaacaccucagggagcuauaaacagcagucuuccuuuccagaacguacacccagucacaauaggagagugcccaaaguaugucaggagugcaaaauuaaggaugguuacaggacuaaggaacaucccauccauucaauccagagguuuguuuggagccauugccgguuucauugaagggggguggacuggaaugguagaugguugguaugguuaucaucaucagaaugagcaaggaucuggcuaugcugcagaucaaaaaagcacacaaaaugccauuaaugggauuacaaacaaggugaauucuguaauugagaaaaugaacacucaauucacagcagugggcaaagaauucaacaaauuggaaagaaggauggaaaacuugaauaaaaaaguugaugauggauuuauagacauuuggacauauaaugcagaacuguugguucuacuggaaaaugaaaggacuuuggauuuccaugacuccaaugugaagaaucuguaugagaaaguaaaaagccaguuaaagaauaaugcuaaagaaauaggaaauggguguuuugaauucuaucacaaguguaacgaugaaugcauggagaguguaaagaauggaacuuaugacuauccaaaauauuccgaagaaucaaaguuaaacagggagaaaauugauggagugaaauuggaaucaaugggagucuaucagauucuggcgaucuacucaacagucgccaguucucugguucuuuuagucucccugggggcaaucagcuucuggauguguuccaaugggucuuugcaguguagaauaugcaucuaa

SEQ ID NO: 40003 - RNA, 1698 nt, Artificial Sequence
  derived and/or modified CDS sequence (wt) from hemagglutinin__InfluenzaA__AEX34329
augaaaguaaaacuacugguccuguuaugcacauuuacagcuacauaugcagacacaauauguauaggcuaccaugcuaacaacucgaccgacacuguugacacaguacuugaaaagaaugugacagugacacacucugucaaccugcuugagaacagucacaauggaaaacuaugucuauuaaaaggaauagccccacuacaauuggguaacugcagcguugccggguggaucuuaggaaacccagaaugcgaauuacugguuuccaaggagucaugguccuacauuguagaaaaaccaaauccugagaauggaacauguuacccagggcauuucgcugacuaugaggaacugagggagcaauugaguucaguaucuucauuugagagguucgaaauauuccccaaagaaagcucauggcccaaccacaccguaaccggagugucagcaucaugcucccauaauggggaaagcaguuuuuacagaaauuugcuauggcugacggggaagaaugguuuguacccaaaccugagcaaguccuaugcaaacaacaaagaaaaagaaguccuuguacuaugggguguucaucacccgccaaacauaggugaccaaaaggcccucuaucauacagaaaaugcuuauguuucuguagugucuucacauuauagcagaaaauucaccccagaaauagccaaaagacccaaaguaagagaucaagaaggaagaaucaacuacuacuggacucugcuugaacccggggauacaauaauauuugaggcaaauggaaaucuaauagcgccaagauaugcuuucgcacugaguagaggcuuuggaucaggaaucaucaacucaaaugcaccaauggauaaaugugaugcgaagugccaaacaccucagggagcuauaaacagcagucuuccuuuccagaacguacacccagucacaauaggagaguguccaaaguaugucaggagugcaaaauuaaggaugguuacaggacuaaggaacaucccauccauucaauccagagguuuguuuggagccauugccgguuucauugaagggggguggacuggaaugguagaugguugguaugguuaucaucaucagaaugagcaaggaucuggcuaugcugcagaucaaaaaagcacacaaaaugccauuaaugggauuacaaacaaggugaauucuguaauugagaaaaugaacacucaauucacagcagugggcaaagaauucaacaaauuggaaagaaggauggaaaacuugaauaaaaaaguugaugauggguuuauagacauuuggacauauaaugcagaacuguugguucuacuggaaaaugaaaggacuuuggauuuccaugacuccaaugugaagaaucuguaugagaaaguaaaaagccaguuaaagaauaaugcuaaagaaauaggaaauggguguuuugaauucuaucacaaguguaacgaugaaugcauggagaguguaaagaauggaacuuaugacuauccaaaauauuccgaagaaucaaaguuaaacagggagaaaauugaaggagugaaauuggaaucaaugggagucuaucagauucuggcgaucuacucaacagucgccaguucucugguucuuuuggucucccugggggcaaucagcuucuggauguguuccaaugggucuuugcaguguagaauaugcaucuaa

SEQ ID NO: 40004 - RNA, 1701 nt, Artificial Sequence
  derived and/or modified CDS sequence (wt) from hemagglutinin__InfluenzaA__AEX34352
augaagacuaucauugcuuugagcuacauucuaugucugguuuucgcucaaaaacuucccggaaaugacaacagcacggcaacgcugugccuugggcaccaugcaguaccaaacggaacgauagugaaaacaaucacgaaugaccaaauugaaguuacuaaugcuacugagcugguucagaguuccucaacaggugaaauaugcgacaguccucaucagauccuugauggagaaaacugcacacuaauagaugcucuauugggagacccucagugugauggcuuccaaaauaagaaaugggaccuuuuuguugaacgcagcaaagccuacagcaacuguuacccuuaugaugugccggauuaugccucccuuaggucacuaguugccucauccggcacacuggaguuuaacaaugaaagcuucaauuggacuggagucacucaaaacggaacaagcucugcuugcauaaggagaucuaauaacaguuucuuuaguagauugaauugguugacccacuuaaaauucaaauacccagcauugaacgugacuaugccaaacaaugaaaaauuugacaaauuguacauuugggggguucaccacccggguacggacaaugaccaaaucuuccuguaugcucaagcaucaggaagaaucacagucucuaccaaaagaagccaacaaacuguaaucccgaauaucggaucuagacccagaguaaggaauauccccagcagaauaagcauuuauuggacaauaguaaaaccgggagacauacuuuugauuaacagcacagggaaucuaauugcuccuagggguuacuucaaaauacgaagugggaaaagcucaauaaugagaucagaugcacccauuggcaaaugcaauucugaaugcauaacuccaaauggaagcauucucaaugacaaaccauuccaaaauguaaacaggaucacauacggggccugucccagauauguuaagcaaaacacucugaaauuggcaacagggaugcgaaauguaccagagaaacaaacuagaggcauauuuggcgcaaucgcagguuucauagaaaaugguugggagggaaugguggaugguugguacgguuucaggcaucaaaauucugagggaauaggacaagcagcagaucucaaaagcacucaagcagcaaucgaucaaaucaaugggaagcugaauagguugaucgggaaaaccaacgagaaauuccaucagauugaaaaagaauucucagaagucgaagggagaauucaggaccuugagaaauauguugaggacaccaaaauagaucucuggucauacaacgcggagcuucuuguugcccuggagaaccaacauacaauugaucuaacugacucagaaaugaacaaacuguuugaaaaaacaaagaagcaacugagggaaaaugcugaggauaugggcaaugguuguuucaaaauauaccacaaaugugacaaugccugcauaggaucaaucagaaauggaacuuaugaccacgauguauacagagaugaagcauuaaacaaccgguuccagaucaagggcguugagcugaagucaggauacaaagauuggauccuauggauuuccuuugccauaucauguuuuuugcuuuguguugcuuuguugggguucaucaugugggccugccaaaaaggcaacauuaggugcaacauuugcauuuga

SEQ ID NO: 40005 - RNA, 1701 nt, Artificial Sequence
  derived and/or modified CDS sequence (wt) from hemagglutinin__InfluenzaA__AEX34364
augaagacuaucauugcuuugagcuacauucuaugucuggucuuugcucaaaaacuuccuggaaaugacaacagcacggcaacgcugugccuugggcaccaugcaguaccaaacggaacgauagugaaaacaaucacgaaugaccaaauugaaguuacuaaugcuacugagcugguucagaguuccucaacaggugaaauaugcgacaguccucaucagauccuugauggagaaaacugcacacuaauagaugcucuauugggagacccucagugugauggcuuccaaaauaagaaaugggaccuuuuuguugaacgcagcaaagccuacagcaacuguuacccuuaugaugugccggauuaugccucccuuaggucacuaguugccucauccggcacacuggaguuuaacaaugaaagcuucaauuggacuggagucacucaaaacggaacaagcucugcuugcauaaggagaucuaauaacaguuucuuuaguagauugaauugguugacccacuuaaaauucaaauacccagcauugaacgugacuaugccaaacaaugaacaauuugacaaauuguacauuugggggguucaccacccggguacggacaaugaccaaaucuuccuguaugcucaagcaucaggaagaaucacagucucuaccaaaagaagccaacaaacuguaaucccgaauaucggaucuagacccagaguaaggaauaucccuagcagaauaagcaucuauuggacaauaguaaaaccgggagacauacuuuugauuaacagcacagggaaucuaauugcuccuagggguuacuucaaaauacgaagugggaaaagcucaauaaugagaucagaugcacccauuggcaaaugcaauucugaaugcaucacuccaaauggaagcauucccaaugacaaaccauuccaaaauguaaacaggaucacauacggggccugucccagauauguuaagcaaaacacucugaaauuggcaacaggaaugcgaaauguaccagagaaacaaacuagaggcauauuuggcgcaaucgcggguuucauagaaaaugguugggagggaaugguggaugguugguacgguuucaggcaucaaaauucugagggaagaggacaagcagcagaucucaaaagcacucaagcagcaaucgaucaaaucaaugggaagcugaauagauugaucgggaaaaccaacgagaaauuccaucagauugaaaaagaauucucagaagucgaagggagaauucaggaccuugagaaauauguugaggacaccaaaauagaucucuggucauacaacgcggagcuucuuguugcccuggagaaccaacauacaauugaucuaacugacucagaaaugaacaaacuguuugaaaaaacaaagaagcaacugagggaaaaugcugaggauaugggcaaugguuguuucaaaauauaccacaaaugugacaaugccugcauaggaucaaucagaaauggaacuuaugaccacgauguauacagagaugaagcauuaaacaaucgguuccagaucaagggaguugagcuaaagucaggguacaaagauuggauccuauggauuuccuuugccauaucauguuucuugcuuuguguugcuuuguugggguucaucaugugggccugccaaaaaggcaacauuaggugcaacauuugcauuuga

SEQ ID NO: 40006 - RNA, 1701 nt, Artificial Sequence; identical to SEQ ID NO: 40005
  derived and/or modified CDS sequence (wt) from hemagglutinin__InfluenzaA__AEX34375

SEQ ID NO: 40007 - RNA, 1701 nt, Artificial Sequence
  derived and/or modified CDS sequence (wt) from hemagglutinin__InfluenzaA__AEX34386
augaagacuaucauugcuuugagcuacauucuaugucugguuuucgcucaaaaacuuccuggaaaugacaacagcacggcaacgcugugccuugggcaccaugcaguaccaaacggaacgauagugaaaacaaucacgaaugaccaaauugaaguuacuaaugcuacugagcugguucagaguuccucaacaggugaaauaugcgacaguccucaucagauccuugauggagagaacugcacacuaauagaugcucuauugggagacccucaaugugauggcuuccaaaauaagaaaugggaccuuuuuauugaacgcagcaaagccuacagcaacuguuacccuuaugaugugccggauuaugccucccuuaggucacuaguugccucauccggcacacuggaguuuaacaaugaaagcuucaauuggacuggagucacucaaaacggaacaagcucugcuugcauaaggagaucuaauaacaguuucuuuaguagauugaauugguugacccacuuaaaauucaaauacccagcauugaacgugacuaugccaaacaaugaacaauuugacaaauuguacauuugggggguucaccacccggguacggacaaugaccaaaucuuccuguaugcucaagcaucaggaagaaucacagucucuaccaaaagaagccaacaaacuguaaucccgaauaucggaucuagacccagaguaaggaauaucccuagcagaauaagcaucuauuggacaauaguaaaaccgggagacauacuuuugauuaacaguacagggaaucuaauugcuccuagggguuacuucaaaauacgaagugggaaaagcucaauaaugagaucagaugcacccauuggcaaaugcaauucugaaugcaucacuccaaauggaagcauucccaaugacaaaccauuccaaaauguuaacaggaucacauacggggccugucccagauauguuaagcaaaacacucugaaauuggcaacagggaugcgaaauguaccagagaaacaaacuagaggcauauuuggcgcaaucgcggguuucauagaaaaugguugggagggaaugguggaugguugguacgguuucaggcaucaaaauucugagggaagaggacaagcagcagaucucaaaagcacucaagcagcaaucgaucaaaucaaugggaagcugaauagauugaucgggaaaaccaacgagaaauuccaucaaauugaaaaagaauucucagaagucgaagggagaauucaggaccuugagaaauauguugaggacaccaaaauagaucucuggucauacaacgcggagcuucuuguugcccuggagaaccaacauacaauugaucuaacugacucagaaaugaacaaacuguuugaaaaaacaaagaagcaacugagggaaaaugcugaggauaugggcaaugguuguuucaaaauauaccacaaaugugacaaugccugcauaggaucaaucagaaauggaacuuaugaccacgauguauacagagaugaagcauuaaacaaccgguuccagaucaagggaguugagcugaagucaggguacaaagauuggauccuauggauuuccuuugccauaucauguuuuuugcuuuguguugcuuuguugggguucaucaugugggccugccaaaaaggcaacauuaggugcaacauuugcauuuga

SEQ ID NO: 40008 - RNA, 1701 nt, Artificial Sequence
  derived and/or modified CDS sequence (wt) from hemagglutinin__InfluenzaA__AEX34407
augaagacuaucauugcuuugagcuacauucuaugucugguuuucgcucaaaaacuuccuggaaaugacaacagcauggcaacgcugugccuugggcaccaugcaguaccaaacggaacaauagugaaaacaaucacgaaugaccaaauugaaguuacuaaugcuacugagcugguucagaguuccucaacaggugaaauaugcgacaguccucaucagauccuugauggagagaacugcacacuaauagaugcucuauugggagacccucaaugugauggcuuccaaaauaagaaaugggaccuuuuuguugaacgcagcaaagccuacagcaacuguuacccuuaugaugugccggauuaugccucccuuaggucacuaguugccucauccggcacacuggaguuuaacaaugaaagcuucaauuggacuggagucacucaaaacggaacaagcucugcuugcauaaggagaucuaauaacaguuucuuuaguagauugaauugguugacccacuuaaaauucaaauacccagcauugaacgugacuaugccaaacaaugaacaauuugacaaauuguacauuugggggguucaccacccggguacggacaaugaccaaaucuuccuguaugcucaagcaucaggaagaaucacagucucuaccaaaagaagccaacaaacuguaaucccgaauaucggaucuagacccagaguaaggaauaucccuagcagaauaagcaucuauuggacaauaguaaaaccgggagacauacuuuugauuaacagcacagggaaucuaauugcuccuagggguuacuucaaaauacuaagugggaaaagcucaauaaugagaucagaugcacccauuggcaaaugcaauucugaaugcaucacuccaaauggaagcauucccaaugacaaaccauuccaaaauguuaacaggaucacauacggggccugucccagauauguuaagcaaaacacucugaaauuggcaacagggaugcgaaauguaccagagaaacaaacuagaggcauauuuggcgcaaucgcggguuucauagaaaaugguugggagggaaugguggaugguugguacgguuucaggcaucaaaauucugaaggaagaggacaagcagcagaucucaaaagcacucaagcagcaaucgaucaaaucaaugggaagcugaauagauugaucgggaaaaccaacgagaaauuccaucagauugaaaaagaauucucagaagucgaagggagaauucaggaccuugagaaauauguugaggacaccaaaguagaucucuggucauacaacgcggagcuucuuguugcccuggagaaccaacauacaauugaucuaacugacucagaaaugaacaaacuguuugaaaaaacaaagaagcaacugagggaaaaugcugaggauaugggcaaugguuguuucaaaauauaccacaaaugugacaaugccugcauaggaucaaucagaaauggaacuuaugaccacgauguauacagagaugaagcauuaaacaaccgguuccagaucaagggaguugagcugaagucaggguacaaagauuggauccuauggauuuccuuugccauaucauguuuuuugcuuuguguugcuuuguugggguucaucaugugggccugccaaaaaggcaacauuaggugcaacauuugcauuuga

SEQ ID NO: 40009 - RNA, 1698 nt, Artificial Sequence
  derived and/or modified CDS sequence (wt) from hemagglutinin__InfluenzaA__AEX34440
augaaaguaaaacuacugguucuguuaugcacauuuacagcuacauaugcagacacaauauguauaggcuaccaugccaacaacucaaccgacacuguugacacaguacuugagaagaaugugacagugacacacucugucaaccugcuugaggacagucacaauggaaaauuaugucuauuaaaaggaauagccccacuacaauuggguaauugcagcguugccggauggaucuuaggaaacccagaaugcgaauuacugacuuccagggaaucaugguccuacauuguagaaaaaccaaauccugagaauggaacauguuacccagggcauuucgccgacuaugaggaacugagggagcaauugaguucaguaucuucauuugagagauucgaaauauuccccaaagaaagcucauggcccaaccacaccacaaccggaguaucagcaucaugcucccauaauggggaaagcaguuuuuacaaaaauuugcuauggcugacggggaagaaugguuuguacccaaaccugagcaaguccuaugcaaacaacaaagagaaagaaguccuuguacuaugggguguucaucacccgccuaacauagguaaccaaagggcccucuaucauacagaaaaugcuuaugucucuguagugucuucacauuauagcagaaaauucaccccagaaauagccaaaagacccaaaguaagagaucaagaaggaagaaucaacuacuacuggacucuacuugaacccggggauacaauaauauuugaggcaaauggaaaucuaauagcgccaagauaugcuuucgcacugaguagaggcuuuggaucaggaaucaucaacucaaaugcaccaauggaugaaugugaugcgaagugccaaacaccucagggagcuauaaacagcagucuuccuuuccagaauguacacccagucacaauaggagaguguccaaaguaugucaggagugcaaaauuaaggaugguuacaggacuaaggaacaucccauccauucaauccagagguuuguuuggagccauugccgguuucauugaaggaggguggacuggaaugguagaugguugguaugguuaucaucaucagaaugagcaaggaucuggcuaugcugcagaucaaaaaagcacacaaaaugccauuaaugggauuacaaacaaggugaauucuguaauugagaaaaugaacacucaauucacagcugugggcaaagaauucaacaaauuggaaagaaggauggaaaacuuaaauaaaaaaguugaugauggguuuauagacauuuggacauauaaugcagaauuguugguucuacuggaaaaugaaaggacuuuggauuuccaugacuccaaugugaagaaucuguaugagaaaguaaaaagccaauuaaagaauaaugccaaagaaauaggaaauggguguuuugaauucuaucacaaguguaacgaugaaugcauggagaguguaaaaaauggaacuuaugacuauccaaaauauuccgaagaaucaaaguuaaacagggagaaaauugauggagugaaauuggaaucaaugggagucuaucagauucuggcgaucuacucaacagucgccaguucucugguucuuuuggucucccugggggcaaucagcuucuggauguguuccaaugggucuuugcaguguagaauaugcaucuaa

SEQ ID NO: 40010 - RNA, 1698 nt, Artificial Sequence
  derived and/or modified CDS sequence (wt) from hemagglutinin__InfluenzaA__AEX34462
augaaaguaaaacuacugguccuguuauguacauuuacagcuacauaugcagacacaauauguauaggcuaccaugccaacaacucaaccgacacuguugacacaguacuugagaagaaugugacagugacacacucugucaaccuacuugaggacagucacaauggaaaacuaugucuacuaaaaggaauagccccacuacaauuggguaauugcagcguugccggauggaucuuaggaaacccagaaugcgaauuacugauuuccaaggaaucaugguccuacauuguagaaacaccaaauccugagaauggaacauguuacccaggguauuucgcugauuaugaggaacugagggagcaauugaguucaguaucuucauuugagagguucgaaauauuccccaaagaaagcucauggcccaaccacaccguaaccggaguaucagcaucaugcucccauaaugggaaaagcaguuuuuacagaaauuugcuauggcugacggggaagaaugguuuguacccaaaccugagcaaguccuaugcaaacaacaaagagaaagaaguccuuguacuaugggguguucaucacccgccuaacauaggggaccaaagggcccucuaucauacagaaaaugcuuaugucucuguagugucuucacauuauagcagaagauucaccccagaaauagccaaaagacccaaaguaagagaucaggaaggaagaaucaacuacuacuggacucugcuggaacccggggauacaauaauauuugaggcaaauggaaaucuaauagcgccaagguaugcuuucgcacugaguagaggcuuuggaucaggaaucaucaccucaaaugcaccaauggaugaaugugaugcgaagugucaaacaccucagggagcuauaaacagcagucuuccuuuccagaauguacacccagucacaauaggagaguguccaaaguaugucaggagugcaaaauuaaggaugguuacaggacuaaggaacaucccauccauucaauccagagguuuguuuggagccauugccgguuucauugaagggggguggacuggaaugguagaugguugguaugguuaucaucaucagaaugagcaaggaucuggcuaugcugcagaucaaaaaagcacacaaaaugccauuaacgggauuacaaacaaggugaauucuguaauugagaaaaugaacacucaauucacagcugugggcaaagaauucaacaaauuggaaagaaggauggaaaacuuaaauaaaaaaguugaugauggguuucuagacauuuggacauauaaugcagaauuguugguucuacuggaaaaugaaaggacuuuggauuuccaugacuccaaugugaagaaucuguaugagaaaguaaaaagccaauuaaagaauaaugccaaagaaauaggaaacggguguuuugaauucuaucacaaguguaacgaugaaugcauggagagugugaaaaauggaacuuaugacuacccaaaauauuccgaagaaucaaaguuaaacagggagaaaauugauggagugaaauuggaaucaaugggagucuaucagauucuggcgaucuacucaacggucgccaguucccugguucuuuuggucucccugggggcaaucagcuucuggauguguuccaaugggucuuugcaguguagaauaugcaucuaa

SEQ ID NO: 40011 - RNA, 1698 nt, Artificial Sequence
  derived and/or modified CDS sequence (wt) from hemagglutinin__InfluenzaA__AEX34473
augaaaguaaaacuacugguccuguuauguacauuuacagcuacauaugcagacacaauauguauaggcuaccaugccaacaacucaaccgacacuguugacacaguacuugagaagaaugugacagugacacacucugucaaccuacuugaggacagucacaauggaaaacuaugucuacuaaaaggaauagcuccacuacaauuggguaauugcaguguugccggauggaucuuaggaaacccagaaugcgaauuacugauuuccaaggaaucaugguccuacauuguagaaacaccaaauccugagaauggaacauguuacccagguuauuucgccgacuaugaggaacugagggagcaauugaguucaguaucuucauuugagagguucgaaauauuccccaaagaaagcucauggcccaaccacaccguaaccggaguaucagcaucaugcucccauaaugggaaaagcaguuuuuacagaaauuugcuauggcugacggggaagagugguuuguacccaaaccugagcaaguccuaugcaaacaacaaagagaaagaaguccuuguacuaugggguguucaucacccgccuaacauaggggaccaaagggcccucuaucauacagaaaaugcuuaugucucuguagugucuucacauuauagcagaagauucaccccagaaauagccaaaagacccaaaguaagagaucaggaaggaagaaucaacuacuacuggacucugcuggaacccggggauacaauaauauuugaggcaaauggaaaucuaauagcgccaagguaugcuuucgcacugaguagaggcuuuggaucaggaaucaucaccucaaaugcaccaauggaugaaugugaugcgaagugucaaacaccucagggagcuauaaacagcagucuuccuuuccagaauguacacccagucacaauaggagaguguccaaaguaugucaagagugcaaaauuaaggaugguuacaggacuaaggaacaucccauccauucaauccagagguuuguuuggagccauugccgguuucauugaagggggguggacuggaaugguagaugguugguaugguuaucaucaucagaaugagcaaggaucuggcuaugcugcagaucaaaaaaguacacaaagugccauuaaugggauuacaaacaaggugaauucuguaauugagaaaaugaacacucaauucacagcugugggcaaagaauucaacaaauuggaaagaaggauggaaaacuuaaauaaaaaaguugaugauggguuucuagacauuuggacauauaaugcagaauuguugguucuacuggaaaaugaaaggacuuuggauuuccaugacuccaaugugaagaaucuguaugagaaaguaaaaagccaauuaaagaauaaugccaaagaaauaggaaacggguguuuugaguucuaucacaaguguaacgaugaaugcauggagagugugaaaaauggaacuuaugacuauccaaaauauuccgaagaaucaaaguuaaacagagagaaaauugauggagugaaauuggaaucaaugggagucuaucagauucuggcgaucuacucaacagucgccaguucccugguucuuuuggucucccugggggcaaucagcuucuggauguguuccaaugggucuuugcaauguagaauaugcaucuaa

SEQ ID NO: 40012 - RNA, 1698 nt, Artificial Sequence
  derived and/or modified CDS sequence (wt) from hemagglutinin__InfluenzaA__AEX34495
augaaaguaaaacuacugguccuguuauguauauuuacagcuacauaugcagacacaauauguauaggcuaccaugccaacaacucaaccgacacuguugacacaguacuugagaagaaugugacagugacacacucugucaaccuacuugaggacagucacaauggaaaacuaugucuacuaaaaggaauagccccacuacaauuggguaauugcagcguugccggauggaucuuaggaaacccagaaugcgaauuacugauuuccaaggaaucaugguccuacauuguagaaacaccaaauccugagaauggaacauguuacccagguuauuucgccgacuaugaggaacugagggagcaauugaguucaguaucuucauuugagagguucgaaauauuccccaaagaaagcucauggcccaaccacaccguaaccggaguaucagcaucaugcucccauaaugggaaaagcaguuuuuacagaaauuugcuauggcugacggggaagagugguuuguacccaaaccugagcaaguccuaugcaaacaacaaagagaaagaaguccuuguacuaugggguguucaucacccgccuaacauagggguccaaagggcccucuaucauacagaaaaugcuuaugucucuguagugucuucacauuauagcagaagauucaccccagaaauagccaaaagacccaaaguaagagaucaggaaggaagaaucaacuacuacuggacucugcuggaacccggggauacaauaauauuugaggcaaauggaaaucuaauagcgccaagguaugcuuucgcacugaguagaggcuuuggaucaggaaucaucaccucaaaugcaccaauggaugaaugugaugcgaagugucaaacaccucagggagcuauaaacagcagucuuccuuuccagaauguacacccagucacaauaggagaguguccaaaguaugucaagagugcaaaauuaaggaugguuacaggacuaaggaacaucccauccauucaauccagggguuuguuuggagccauugccgguuucauugaagggggguggacuggaaugguagaugguugguaugguuaucaucaucagaaugagcaaggaucuggcuaugcugcagaucagaaaaguacacaaaaugccauuaacgggauuacaaacaaggugaauucuguaauugagaaaaugaacacucaauucacagcugugggcaaagaauucaacaaauuggaaagaaggauggaaaacuuaaauaaaaaaguugaugauggguuucuagacauuuggacauauaaugcagaauuguugguucuacuggaaaaugaaaggacuuuggauuuccaugacuccaaugugaagaaucuguaugagaaaguaaaaagccaauuaaagaauaaugccaaagaaauaggaaacggguguuuugaguucuaucacaaguguaacgaugaaugcauggagagugugaaaaauggaacuuaugacuauccaaaauauuccgaagaaucaaaguuaaacagggagaaaauugauggagugaaauuggaaucaaugggagucuaucagauucuggcgaucuacucaacagucgccaguucccugguucuuuuggucucccugggggcaaucagcuucuggauguguuccaaugggucuuugcaguguagaauaugcaucuaa

SEQ ID NO: 40013 - RNA, 1698 nt, Artificial Sequence; identical to SEQ ID NO: 40012
  derived and/or modified CDS sequence (wt) from hemagglutinin__InfluenzaA__AEX34506

SEQ ID NO: 40014 - RNA, 1698 nt, Artificial Sequence; identical to SEQ ID NO: 40012
  derived and/or modified CDS sequence (wt) from hemagglutinin__InfluenzaA__AEX34517

SEQ ID NO: 40015 - RNA, 1698 nt, Artificial Sequence; identical to SEQ ID NO: 40012
  derived and/or modified CDS sequence (wt) from hemagglutinin__InfluenzaA__AEX34528

SEQ ID NO: 40016 - RNA, 1698 nt, Artificial Sequence; identical to SEQ ID NO: 40012
  derived and/or modified CDS sequence (wt) from hemagglutinin__InfluenzaA__AEX34539

SEQ ID NO: 40017 - RNA, 1698 nt, Artificial Sequence; identical to SEQ ID NO: 40012
  derived and/or modified CDS sequence (wt) from hemagglutinin__InfluenzaA__AEX34550

SEQ ID NO: 40018 - RNA, 1698 nt, Artificial Sequence; identical to SEQ ID NO: 40012
  derived and/or modified CDS sequence (wt) from hemagglutinin__InfluenzaA__AEX34561

SEQ ID NO: 40019 - RNA, 1698 nt, Artificial Sequence; identical to SEQ ID NO: 40012
  derived and/or modified CDS sequence (wt) from hemagglutinin__InfluenzaA__AEX34572

SEQ ID NO: 40020 - RNA, 1698 nt, Artificial Sequence; identical to SEQ ID NO: 40012
  derived and/or modified CDS sequence (wt) from hemagglutinin__InfluenzaA__AEX34583

SEQ ID NO: 40021 - RNA, 1698 nt, Artificial Sequence; identical to SEQ ID NO: 40012
  derived and/or modified CDS sequence (wt) from hemagglutinin__InfluenzaA__AEX34594

SEQ ID NO: 40022 - RNA, 1698 nt, Artificial Sequence; identical to SEQ ID NO: 40012
  derived and/or modified CDS sequence (wt) from hemagglutinin__InfluenzaA__AEX34605

SEQ ID NO: 40023 - RNA, 1698 nt, Artificial Sequence; identical to SEQ ID NO: 40012
  derived and/or modified CDS sequence (wt) from hemagglutinin__InfluenzaA__AEX34616

SEQ ID NO: 40024 - RNA, 1698 nt, Artificial Sequence; identical to SEQ ID NO: 40012
  derived and/or modified CDS sequence (wt) from hemagglutinin__InfluenzaA__AEX34627

SEQ ID NO: 40025 - RNA, 1698 nt, Artificial Sequence; identical to SEQ ID NO: 40012
  derived and/or modified CDS sequence (wt) from hemagglutinin__InfluenzaA__AEX34638

SEQ ID NO: 40026 - RNA, 1698 nt, Artificial Sequence
  derived and/or modified CDS sequence (wt) from hemagglutinin__InfluenzaA__AEX34650
augaaaguaaaacuacugguucuguuauguacauuuacagcuacauaugcagacacaauauguauaggcuaccaugccaacaacucaaccgacacuguugacacaguacuugagaagaaugugacagugacacacucugucaaccuacuugaggacagucacaauggaaaacuaugucuacuaaaaggaauagccccacuacaauuggguaauugcagcguugccggauggaucuuaggaaacccagaaugugaauuacugauuuccaaggaaucaugguccuacauuguagaaacaccaaauccugagaauggaacauguuacccaggguauuucgccgacuaugaggaacugagagagcaauugaguucaguaucuucauuugagagguucgaaauauuccccaaagagagcucauggcccaaccacaccguaaccggaguaucagcaucaugcucccauaacgggaaaagcaguuuuuacagaaauuugcuauggcugacggggaagaaugguuuguacccaaaccugagcaaguccuaugcaaacaacaaagagaaagaaguccuuguacuaugggguguucaucacccgccuaacauagggaaccaaaggucccucuaucauacagaaaaugcuuaugucucuguaguaucuucacauuauagcagaagauucaccccagaaauagccaaaagacccaaggugagagaucaggaaggaagaaucaacuacuacuggacucugcuggaacccggggauacaauaauauuugaggcaaauggaaaucuaauagcgccaagguuugcuuucgcacugaguagaggcuuuggaucaggaaucaucaccucaaaugcaccaauggaugaaugugaugcgaagugucaaacaccccagggagcuauaaacagcagucuuccuuuccagaauguacacccagucacaauaggagaguguccaaaguaugucaggagugcaaaauugaggaugguuacaggacuaaggaacaucccauccauucaauccagagguuuguuuggagccauugccgguuucauugaagggggguggacuggaaugguagaugguugguaugguuaucaucaucagaaugagcaaggaucuggauaugcugcagaucaaaaaagcacacagaaugccauuaacgggauuacaaacaaggugaauucuguaauugagaaaaugaacacucaauucacagcugugggcaaagaauucaacaaauuggaaagaaggauggaaaacuuaaauaaaaaaguugaugauggguuucuagacauuuggacauauaaugcagaauuguugguucuacuggaaaaugaaaggacuuuggauuuccaugacuccaacgugaagaaucuguaugagaaaguaaaaagccaauuaaagaauaaugccaaagaaauaggaaacggguguuuugaauucuaucacaaguguaacgaugaaugcauggagagugugaaaaauggaacuuaugacuauccaaaguauucugaagaaucaaaguuaaacagggagaaaauugauggagugaaauuggaaucaaugggagucuaucagauucuggcgauauacucaacagucgccaguucccugguucuuuuggucucccugggggcaaucagcuucuggauguguuccaaugggucuuugcaguguagaauaugcaucuaa

SEQ ID NO: 40027 - RNA, 1698 nt, Artificial Sequence
  derived and/or modified CDS sequence (wt) from hemagglutinin__InfluenzaA__AEX34661
augaaaguaaaacuacugguucuguuauguacauuuacagcuacauaugcagacacaauauguauaggcuaccaugccaacaacucaaccgacacuguugacacaguacuugagaagaaugugacagugacacacucugucaaccuacuugaggacagucacaauggaaaacuaugucuacuaaaaggaauagccccacuacaauuggguaauugcagcguugccggauggaucuuaggaaacccagaaugcgaauuacugauuuccaaggaaucaugguccuacauuguagaaacaccaaauccugagaauggaacauguuacccaggguauuucgccgacuaugaggaacugagggagcaauugaguucaguaucuucauuugagagguucgaaauauuccccaaagagagcucauggcccaaccacaccguaaccggaguaucagcaucaugcucccauaacgggaaaagcaguuuuuacagaaauuugcuauggcugacggggaagaaagguuuguacccaaaccugagcaaguccuaugcaaacaacaaagagaaagaaguccuuguacuaugggguguucaucacccgccuaacauaggggaccaaagggcccucuaucauacagaaaaugcuuaugucucuguagugucuucacauuauagcagaagauucaccccagaaauagccaaaagacccaaggugagagaucaggaaggaagaaucaacuacuacuggacucugcuggaacccggggauacaauaauauucgaggcaaauggaaaucuaauagcaccaagguuugcuuucgcacugaguagaggcuuuggaucaggaaucaucaccucaaaugcaccaauggaugaaugugaugcgaagugucaaacaccucaaggagcuauaaacagcagccuuccuuuccagaauguacacccugucacaauaggagaguguccaaaguaugucaggagugcaaaauuaaggauggcuacaggacuaaggaacaucccauccauucaauccagagguuuguuuggagccauugccgguuucauugaagggggguggacuggaaugguagaugguugguaugguuaucaucaucagaaugagcaaggaucuggguaugcugcagaucaaaaaagcacacaaaaugccauuaacgggauuacaaaaaaggugaauucuguaauugagaaaaugaacacucaauucacagcugugggcaaagaauucagcaaauuggagagaaggauggaaaacuuaaauaagaaaguugaugauggguuucuagacauuuggacauauaaugcagaauuguugguucuacuggaaaaugaaaggacuuuggauuuccaugacuccaacgugaagaaccuguaugagaaagugaaaagccaauuaaagaauaaugccaaagaaauaggaaacgggugcuuugaauucuaucacaaguguaacgaugaaugcauggagagugugaaaaauggaacuuaugacuauccaaaauauuccgaagaaucaaaguuaaacagggagaaaauugauggagugaaauuggaaucaaugggagucuaucagauucuggcgaucuacucaacagucgccaguucccugguucuuuuggucucccugggggcaaucagcuucuggauguguuccaaugggucuuugcaguguagaauaugcaucuaa

SEQ ID NO: 40028 - RNA, 1698 nt, Artificial Sequence
  derived and/or modified CDS sequence (wt) from hemagglutinin__InfluenzaA__AEX34672
augaaaguaaaacuacugguucuguuaugcacauuuacagcuacauaugcagacacaauauguauaggcuaccaugccaacaacucaaccgacacuguugacacaguacuugauaagaaugugacagugacacacucugucaaccugcuugaggacagucacaauggaaaauuaugucuauuaaaaggaauagccccacuacaauuggguaauugcagcguugccggauggaucuuaggaaacccagaaugcgaauuacugauuuccagggaaucaugguccuacauuguagaaaaaccaaauccugagaauggaacauguuacccagggcauuucgccgacuaugaggaacugagggagcaauugaguucaguaucuucauuugagagauucgaaauauuccccaaagaaagcucauggcccaaccacaccacaaccggaguaucagcaucaugcucccaugauggggaaagcaguuuuuacaaaaauuugcuauggcugacggggaagaaugguuuguacccaaaccugagcaaguccuaugcaaacaacaaagagaaagaaguccuuguacuaugggguguucaucacccgccuaacauagguguccaaagggcccucuaucauacagaaaaugcuuaugucucuguagugucuucacauuauagcagaaaauucaccccagaaauagccaaaagacccaaaguaagagaucaagaaggaagaaucaacuacuacuggacucuacuugaacccggggauacaauaauauuugaggcaaauggaaaucuaauagcgccaagauaugcuuucgcacugaguagaggcuuuggaucaggaaucaucaacucaaaugcaccaauggaugaaugugaugcgaagugccaaacaccucagggagcuauaaacagcagucuuccuuuccagaauguacacccagucacaauaggagaguguccaaaguaugucaggagugcaaaauuaaggaugguuacaggacuaaggaacaucccauccauucaauccagagguuuguuuggagccauugccgguuucauugaaggaggguggacuggaaugguagaugguugguaugguuaucaucaucagaaugagcaaggaucuggcuaugcugcagaucaaaaaagcacacaaaaugccauuaaugggauuacaaacaaggugaauucuguaauugagaaaaugaacacucaauucacagcugugggcaaagaauucaacaaauuggaaagaaggauggaaaacuuaaauaaaaaaguugaugauggguuuauagacauuuggacauauaaugcagaauuguugguucuacuggaaaaugaaaggacuuuggauuuccaugacuccaaugugaagaaucuguaugagaaaguaaaaagccaauuaaagaauaaugccaaagaaauaggaaauggguguuuugaauucuaucacaaguguaacgaugaaugcauggagaguguaaaaaauggaacuuaugacuauccaaaauauuccgaagaaucaaaguuaaacagggagaaaauugauggagugaaauuggaaucaaugggagucuaucagauucuggcgaucuacucaacagucgccaguucucugguucuuuuggucucccugggggcaaucagcuucuggauguguuccaaugggucuuugcaguguagaauaugcaucuaa

SEQ ID NO: 40029 - RNA, 1698 nt, Artificial Sequence
  derived and/or modified CDS sequence (wt) from hemagglutinin__InfluenzaA__AEX34683
augaaaguaaaacuacugguucuguuaugcacauuuacagcuacauaugcagacacaauauguauaggcuaccaugccaacaacucaaccgacacuguugacacaguacuugagaagaaugugacagugacacacucugucaaccugcuugaggacagucacaauggaaaauuaugucuauuaaaaggaauagccccacuacaauuggguaauugcagcguugccggauggaucuuaggaaacccagaaugcgaauuacugauuuccagggaaucaugguccuacauuguagaaaaaccaaauccugagaauggaacauguuacccagggcauuucgccgacuaugaggaacugagggagcaauugaguucaguaucuucauuugagagauucgaaauauuccccaaagaaagcucauggcccuaccacaccacaaccggaguaucagcaucaugcucccauaauggggaaagcaguuuuuacaaaaauuugcuauggcugacggggaagaaugguuuguacccaaaccugagcaaguccuaugcaaacaacaaagagaaagaaguccuuguacuaugggguguucaucacccgccuaacauaggugaccaaagggcccucuaucauacagaaaaugcuuaugucucuguagugucuucacauuauagcagaaaauucaccccagaaauagccaaaagacccaaaguaagagaucaagaaggaagaaucaacuacuacuggacucuacuugaacccggggauacaauaauauuugaggcaaauggaaaucuaauagcgccaagauaugcuuucgcacugaguagaggcuuuggaucaggaaucaucaacucaaaugcaccaauggaugaaugugaugcgaagugccaaacaccucagggagcuauaaacagcagucuuccuuuccagaauguacacccagucacaauaggagaguguccaaaguaugucaggagugcaaaauuaaggaugguuacaggacuaaggaacaucccauccauucaauccagagguuuguuuggagccauugccgguuucauugaaggaggguggacuggaaugguagaugguugguaugguuaucaucaucagaaugagcaaggauuuggcuaugcugcagaucaaaaaagcacacaaaaugccauuaaugggauuacaaacaaggugaauucuguaauugagaaaaugaacacucaauucacagcugugggcaaagaauucaacaaauuggaaagaaggauggaaaacuuaaauaaaaaaguugaugauggguuuauagacauuuggacauauaaugcagaauuguugguucuacuggaaaaugaaaggacuuuggauuuccaugacuccaaugugaagaaucuguaugagaaaguaaaaagccaauuaaagaauaaugccaaagaaauaggaaauggguguuuugaauucuaucacaaguguaacgaugaaugcauggagaguguaaaaaauggaacuuaugacuauccaaaauauuccgaagaaucaaaguuaaacagggagaaaauugauggagugaaauuggaaucaaugggagucuaucagauucuggcgaucuacucaacagucgccaguucucugguucuuuuggucucccugggggcaaucagcuucuggauguguuccaaugggucuuugcaguguagaauaugcaucuaa

SEQ ID NO: 40030 - RNA, 1698 nt, Artificial Sequence
  derived and/or modified CDS sequence (wt) from hemagglutinin__InfluenzaA__AEX34757
augaaaguaaaacuacugguucuguuaugcacauuuacagcuacauaugcagacacaauauguauaggcuaccaugccaacaacucaaccgacacuguugacacaguacuugagaagaaugugacagugacacacucugucaaccugcuugaggacagucacaauggaaaauuaugucuauuaaaaggaauagccccacuacaauuggguaauugcagcguugccggauggaucuuaggaaacccagaaugcgaauuacugauuuccagggaaucaugguccuacauuguagaaaaaccaaauccugagaauggaacauguuacccagggcauuucgccgacuaugaggaacugagggagcaauugaguucaguaucuucauuugagagauucgaaauauuccccaaagaaagcucauggcccaaccacaccacaaccggaguaucagcaucaugcucccauaaugggggaagcaguuuuuacaaaaauuugcuauggcugacgaggaagaaugguuuguacccaaaccugagcaaguccuaugcaaacaacaaagagaaagaaguccuugugcuaugggguguucaucacccgccuaacauaggugaccaaagggcccucuaucauacagaaaaugcuuaugucucuguagugucuucacauuauagcagaaaauucaccccagaaauagccaaaagacccaaaguaagagaucaagaaggaagaaucaacuacuacuggacucuacuugaacccggggauacaauaauauuugaggcaaauggaaaucuaauagcgccaagauaugcuuucgcacugaguagaggcuuuggaucaggaaucaucaacucaaaugcaccaauggaugaaugugaugcgaagugccaaacaccucagggagcuauaaacagcagucuuccuuuccagaauguacacccagucacaauaggagaguguccaaaguaugucaggagugcaaaauuaaggaugguuacaggacuaaggaacaucccauccauucaauccagagguuuguuuggagccauugccgguuucauugaaggaggguggacuggaaugguagaugguugguaugguuaucaucaucagaaugagcaaggaucuggcuaugcugcagaucaaaaaagcacacaaaaugccauuaaugggauuacaaacaagguuaauucuguaauugagaaaaugaacacucaauucacagcugugggcaaagaauucaacaaauuggaaagaaggauggaaaacuuaaauaaaaaaguugaugauggguuuauagacauuuggacauauaaugcagaauuguugguucuacuggaaaaugaaaggacuuuggauuuccaugacuccaaugugaagaaucuguaugagaaaguaaaaagccaauuaaagaauaaugccaaagaaauaggaaauggguguuuugaauucuaucacaaguguaacgaugaaugcauggagaguguaaaaaauggaacuuaugacuauccaaaauauuccgaagaaucaaaguugaacagggagaaaauugauggagugaaauuggaaucaaugggagucuaucagauucuggcgaucuacucaacagucgccaguucucugguucuuuuggucucccugggggcaaucagcuucuggauguguuccaaugggucuuugcaguguagaauaugcaucuaa

SEQ ID NO: 40031 - RNA, 1698 nt, Artificial Sequence
  derived and/or modified CDS sequence (wt) from hemagglutinin__InfluenzaA__AEX34768
augaaaguaaaacuacugguucuguuaugcacauuuacagcuacauaugcagacacaauauguauaggcuaccaugccaacaacucaaccgacacuguugacacaguacuugagaagaaugugacagugacacacucugucaaccugcuugaggacagucacaauggaaaauuaugucuauuaaaaggaauagccccacuacaauuggguaauugcagcguugccggauggaucuuaggaaacccagaaugcgaauuacugauuuccagggaaucaugguccuacauuguagaaaaaccaaacccugagaauggaacauguuacccagggcauuucgccgacuaugaggaacugagggagcaauugaguucaguaucuucauuugagagauucgaaauauuccccaaagacagcucauggcccaaccacaccacaaccggaguaucagcaucaugcucccauaauggggaaagcaguuuuuacaaaaauuugcuauggcugacggggaagaaugguuuguacccaaaucugagcaaguccuaugcaaacaacaaagagaaagaaguccuuguacuaugggguguucaucacccgccuaacauaggugaccaaagggcccucuaucauacagaaaaugcuuaugucucuguagugucuucacauuauagcagaaaauucaccccagaaauagccaaaagacccaaaguaagagaucaaggaggaagaaucaacuacuacuggacucuacuugaacccggggauacaauaauauuugaggcaaauggaaaucuaauagcgccaagauaugcuuucgcacugaguagaggcuuuggaucaggaaucaucaacucaaaugcaccaauggaugaaugugaugcgaagugccaaacaccucagggagcuauaaacagcagucuuccuuuccagaauguacacccagucacaauaggagaguguccaaaguaugucaggagugcaaaauuaaggaugguuacaggacuaaggaacaucccauccauucaauccagagguuuguuuggagccauugccgguuucauugaaggaggguggacuggaaugguagaugguugguaugguuaucaucaucagaaugagcaaggaucuggcuaugcugcagaucaaaaaagcacacaaaaugccauuaaugggauuacaaacaaggugaauucuguaauugagaaaaugaacacucaauucacagcugugggcaaagaauucaacaaauuggaaagaaggauggaaaacuuaaauaaaaaaguugaugauggguuuauagacauuuggacauauaaugcagaauuguugguucuacuggaaaaugaaaggacuuuggauuuccaugacuccaaugugaagaaucuguaugagaaaguaaaaagccaauuaaagaauaaugccaaagaaauaggaaauggguguuuugaauucuaucacaaguguaacgaugaaugcauggagaguguaaaaaauggaacuuaugacuauccaaaauauuccgaagaaucaaaguuaaacagggagaaaauugauggagugaaauuggaaucaaugggagucuaucagauucuggcgaucuacucaacagucgccaguucucugguucuuuuggucucccugggggcaaucagcuucuggauguguuccaaugggucuuugcaguguagaauaugcaucuaa

SEQ ID NO: 40032 - RNA, 1698 nt, Artificial Sequence
  derived and/or modified CDS sequence (wt) from hemagglutinin__InfluenzaA__AEX34779
augaaaguaaaacuacugguccuguuaugcacauuuacagcuacauaugcagacacaauauguauaggcuaccaugcuaacaacucgaccgacacuguugacacaguacuugaaaagaaugugacagugacacacucugucaaccugcuugagaacagucacaauggaaaacuaugucuauuaaaaggaauagccccacuacaauuggguaacugcagcguugccggguggaucuuaggaaacccagaaugcgaauuacugauuuccaaggagucaugguccuacauuguagaaaaaccaaauccugagaauggaacauguuacccagggcauuucgcugacuaugaggaacugagggagcaauugaguucaguaucuucauuugagagguucgaaauauuccccaaagaaagcucauggcccaaccacaccguaaccggagugucagcaucaugcucccauaauggggaacgcaguuuuuacagaaauuugcuauggcugacggggaagaaugguuuguacccaaaccugagcaaguccuaugcaaacaacaaagaaaaagaaguccuuguacuaugggguguucaucacccgccaaacauagguaaccaaaaggcccucuaucauacagaaaaugcuuauguuucuguagugucuucacauuauagcagaaaauucaccccagaaauagccaaaagacccaaaguaagagaucaagaaggaagaaucaacuacuacuggacucugcuugaacccggggauacaauaauauuugaggcaaauggaaaucuaauagcgccaagauaugcuuucgcacugaguagaggcuuuggaucaggaaucaucaacucaaaugcaccaauggauaaaugugaugcgaagugccaaacgccucagggagcuauaaacagcagucuuccuuuccagaacguacacccagucacaauaggagaguguccaaaguaugucaggagugcaaaauuaaggaugguuacaggacuaaggaacaucccauccauucaauccagagguuuguuuggagccauugccgguuucauugaagggggguggacuggaaugguagaugguugguaugguuaucaucaucagaaugagcaaggaucuggcuaugcugcagaucaaaaaagcacacaaaaugccauuaaugggauuacaaacaaggugaauucuguaauugagaaaaugaacacucaauucacagcagugggcaaagaauucaacaaauuggaaagaaggauggaaaacuugaauaaaaaaguugaugauggguuuauagacauuuggacauauaaugcagaacuguugguucuacuggaaaaugaaaggacuuuggauuuccaugacuccaaugugaagaaucuguaugagaaaguaaaaagccaguuaaagaauaaugcuaaagaaauaggaaauggguguuuugaauucuaucacaaguguaacgaugaaugcauggagaguguaaagaauggaacuuaugacuauccaaaauauuccgaagaaucaaaguuaaacagggagaaaauugauggagugaaauuggaaucaaugggagucuaucagauucuggcgaucuacucaacagucgccaguucucugguucuuuuggucucccugggggcaaucagcuucuggauguguuccaaugggucuuugcaguguagaauaugcaucuaa

SEQ ID NO: 40033 - RNA, 1698 nt, Artificial Sequence
  derived and/or modified CDS sequence (wt) from hemagglutinin__InfluenzaA__AEX34790
augaaaguaaaacuacugguccuauuaugcacauuuacagcuacauaugcagacacaauauguaucggcuaccaugccaacaacucaaccgacacuguugacacaguacuugaaaagaaugugacagugacacacucugucaaccugcuugaggacaaccacaauggaaaacuaugucuauuaaaaggaauagccccauuacaauuggguaacugcagcguugccggguggaucuuaggaaacccagaaugcgaauuacugauuuccaaggagucaugguccuacauuguagaaaaaccaaauccugagaauggaacauguuacccagggcauuucgccgacuaugaggaacugagggagcaauugaguucaguaucuucauuugagagguucgaaauauuccccaaagaaagcucauggcccaaccacaccguaaccggaguauccgcaucaugcucccauaauggggaaagcagcuuuuacaaaaauuugcuauggcugacgggaaagaaugguuuguacccaaaccugagcaaguccuaugcaaacaacaaggagaaagaaguccucguacuaugggguguucaucacccgccaaacauaggugaccaaaugacccucuaccauaaagaaaaugcuuaugucucuguagugucuucacauuauagcagaaaauucaccccagaaauagccaaaagacccaaggugagagaucaagaagggagaaucaacuacuacuggacucugcuugaacccggggauacaauaauauuugaggcaaguggaaaucuaauagcgccaagauaugcuuucgcacugaguagaggcuuuggaucaggaaucaucaacucaaaugcaccaauggaugaaugugaugcgaagugccaaacaccucagggagcuauaaacagcagucuuccuuuccagaauguacacccagucacaauaggagaauguccaaaguaugucagaagugcaaaauuaaggaugguuacaggacuaaggaacaucccauccauucaauccagagguuuguuuggagccauugcugguuucauugaagggggguggacuggaaugguagaugguugguaugguuaucaucaccagaaugagcaaggaucuggcuaugcugcagaucaaaaaagcacacaaaaugccauuaaugggaucacaaacaaggugaauucuguaauugagaagaugaacacucaauucacagcugugggcaaagaauucaacaaauuggaaagaaggauggaaaacuuaaauaaaaaaguugaugacggguuuauagacguuuggacauauaaugcagaacuguugguucuacuggaaaaugagagaacuuuggauuuccaugacuccaaugugaagaauuuguaugagaaaguaaaaaaccaauuaaaaaauaaugccaaagaaauaggaaauggguguuuugaauuuuaucacaaguguaacgaugaaugcauggagaguguaaaaaauggaacuuaugacuauccaaaauauuccgaagaaucaaaguuaagcagggagaaaauugauggagugaaauuggaaucaaugggagucuaucagauucuggcgaucuacucaacagucgccaguucucugguucuuuuggucucccugggggcaaucagcuucuggauguguuccaaugggucuuugcaguguagaauaugcaucuaa

SEQ ID NO: 40034 - RNA, 1698 nt, Artificial Sequence
  derived and/or modified CDS sequence (wt) from hemagglutinin__InfluenzaA__AEX34801
augaaaguaaaacuacugguucuauuaugcacauuuacagcuacauaugcagacacaauauguaucggcuaccaugccaacaacucaaccgacacuguugacacaguacuugaaaagaaugugacagugacacacucugucaaccugcuugaggacaaccacaauggaaaacuaugucuauuaaaaggaauagccccauuacaauuggguaacugcagcguugccggguggaucuuaggaaacccagaaugcgaauuacugauuuccaaggagucaugguccuacauuguagaaaaaccaaauccugagaauggagcauguuacccagggcauuucgccgacuaugaggaacugagggagcaauugaguucuguaucuucauuuaagagguucgaaauauuccccaaagaaagcucauggcccaaccacaccguaaccggaguauccgcaucaugcucccauaauggggaaagcagcuuuuacaaaaauuugcuauggcugacgggaaagaaugguuuguacccaaaccugagcaaguccuaugcaaacaacaaggagaaagaaguccucguacuaugggguguucaucacccgccaaacauaggugaccaaaugacccucuaccauaaagaaaaugcuuaugucucuguagugucuucacauuauagcagaaaauucaccccagaaauagccaaaagacccaaggugagagaucaagaagggagaaucaacuacuacuggacucugcuugaacccggggauacaauaauauuugaggcaaguggaaaucuaauagcgccaagauaugcuuucgcacugaguagaggcuuuggaucaggaaucaucaacucagaugcaccaauggaugaaugugaugcgaagugccaaacaccucagggagcuauaaacagcagucuuccuuuccagaauguacacccagucacaauaggagaauguccaaaguaugucagaagugcaaaauuaaggaugguuacaggacuaaggaacaucccauccauucaauccagagguuuguuuggagccauugcugguuucauugaagggggguggacuggaaugguagaugguugguaugguuaucaucaccagaaugagcaaggaucuggcuaugcugcagaucaaaaaagcacacaaaaugccauuaaugggaucacaaacaaggugaauucuguaauugagaagaugaacacucaauucacagcugugggcaaagaauucaacaaauuggaaagaaggauggaaaacuuaaauaaaaaaguugaugacggguuuauagacguuuggacauauaaugcagaacuguugguucuacuggaaaaugagagaacuuuggauuuccaugacuccaaugugaagaauuuguaugagaaaguaaaaaaccaauuaaaaaauaaugccaaagaaauaggaaauggguguuuugaauuuuaucacaaguguaacgaugaaugcauggagaguguaaaaaauggaacuuaugacuauccaaaauauuccgaagaaucaaaguuaagcagggagaaaauugauggagugaaauuggaaucaaugggagucuaucagauucuggcgaucuacucaacagucgccaguucucugguucuuuuggucucccugggggcaaucagcuucuggauguguuccaaugggucuuugcaguguagaauaugcaucuaa

SEQ ID NO: 40035 - RNA, 1698 nt, Artificial Sequence
  derived and/or modified CDS sequence (wt) from hemagglutinin__InfluenzaA__AEX34812
augaaaguaaaacuacugguccuguuaugcacauuuacagcuacauaugcagacacaauauguauaggcuaccaugcuaacaacucgaccgacacuguugacacaguacuugaaaagaaugugacagugacacacucugucaaccugcuugagaacagucacaauggaaaacuaugucuauuaaaaggaauagccccacuacaauuggguaacugcagcguugccggguggaucuuaggaaacccagaaugcgaauuacugauuuccaaggagucaugguccuacauuguagaaaaaccaaauccugagaauggaacauguuacccagggcauuucgcugacuaugaggaacugagggagcaauugaguucaguaucuucauuugagagguucgaaauauuccccaaagaaagcucauggcccaaccacacuguaaccggagugucagcaucaugcucccauaauggggaaagcaguuuuuacagaaauuugcuauggcugacggggaagaaugguuuguacccaaaccugagcaaguccuaugcaaacaacaaagaaaaagaaguccuuguacuaugggguguucaucacccgccaaacauaggugaccaaaaggcccucuaucauacagaaaaugcuuauguuucuguagugucuucacauuauagcagaaaauucaccccagaaauagccaaaagacccaaaguaagagaucaagaaggaagaaucaacuacuacuggacucugcuugaacccggggauacaauaauauuugaggcaaauggaaaucuaauagcgccaagauaugcuuucgcacugaguagaggcuuuggaucaggaaucaucaacucaaaugcaccaauggauaaaugugaugcgaagugccaaacaccucagggagcuauaaacagcagucuuccuuuccagaacguacacccagucacaauaggagaguguccaaaguaugucaggagugcaaaauuaaggauggucacaggacuaaggaacaucccauccauucaauccagagguuuguuuggagcuauugccgguuucauugaagggggguggacuggaaugguagaugguugguaugguuaucaucaucagaaugagcaaggaucuggcuaugcugcagaucaaaaaagcacacaaaaugccauugaugggauuacaaacaaggugaauucuguaauugagaaaaugaacacucaauucacagcagugggcaaagaauucaacaaauuggaaagaaggauggaaaacuugaauaaaaaaguugaugauggguuuauagacauuuggacauauaaugcagaacuguugguucuacuggaaaaugaaaggacuuuggauuuccaugacuccaaugugaagaaucuguaugagaaaguaaaaagccaguuaaagaauaaugcuaaagaaauaggaaauggguguuuugaauucuaucacaaguguaacgaugaaugcauggagaguguaaagaauggaacuuaugacuauccaaaauauuccgaagaaucaaaguuaaacagggagaaaauugauggagugaaauuggaaucaaugggagucuaucagauucuggcgaucuacucaacagucgccaguucucugguucuuuuggucucccugggggcaaucagcuucuggauguguuccaaugggucuuugcaguguagaauaugcaucuaa

SEQ ID NO: 40036 - RNA, 1698 nt, Artificial Sequence
  derived and/or modified CDS sequence (wt) from hemagglutinin__InfluenzaA__AEX34834
augaaaguaaaacuacugguucuauuaugcacauuuacagcuacauaugcagacacaauauguaucggcuaccaugccaacaacucaaccgacacuguugacacaguacuugaaaagaaugugacagugacacacucugucaaccugcuugaggacaaccacaauggaaaacuaugucuauuaaaaggaauagccccauuacaauuggguaacugcagcguugccggguggaucuuaggaaacccagaaugcgaauuacugaauuccaaggagucaugguccuacauuguagaaaaaccaaauccugagaauggaacauguuacccagggcauuucgccgacuaugaggaacugagggagcaauugaguucaguaucuucauuuaagagguucgaaauauuccccaaagaaagcucauggcccaaccacaccguaaccggaguauccgcaucaugcucccauaauggggaaagcagcuuuuacaaaaauuugcuauggcugacgggaaagaaugguuuguacccaaaccugagcaaguccuaugcaaacaacaaggagaaagaaguccucguacuaugggguguucaucacccgccaaacauaggugaccaaaugacccucuaccauaaagaaaaugcuuaugucucuguagugucuucacauuauagcagaaaauucaccccagaaauaaccaaaagacccaaggugagagaucaagaagggagaaucaacuacuacuggacucugcuugaacccggggauacaauaauauuugaggcaaguggaaaucuaauagcgccaagauaugcuuucgcacugaguagaggcuuuggaucaggaaucaucaacucaaaugcaccaauggaugaaugugaugcgaagugccaaacaccucagggagcuauaaacagcagucuuccuuuccagaauguacacccagucacaauaggagaauguccaaaguaugucagaagugcaaaauuaaggaugguuacaggacuaaggaacaucccauccauucaaucuagagguuuguuuggagccauugcugguuucauugaagggggguggacuggaaugguagaugguugguaugguuaucaucaccagaaugagcaaggaucuggcuaugcugcagaucaaaaaagcacacaaaaugccauuaaugggaucacaaacaaggugaauucuguaauugagaagaugaacacucaauucacagcugugggcaaagaauucaacaaauuggaaagaaggauggaaaacuuaaauaaaaaaguugaugacggguuuauagacguuuggacauauaaugcagaacuguugguucuacuggaaaaugagagaacuuuggauuuccaugacuccaaugugaagaauuuguaugagaaaguaaaaaaccaauuaaaaaauaaugccaaagaaauaggaaauggguguuuugaauuuuaucacaaguguaacgaugaaugcauggagaguguaaaaaauggaacuuaugacuauccaaaauauuccgaagaaucaaaguuaagcagggagaaaauugauggagugaaauuggaaucaaugggagucuaucagauucuggcgaucuacucaacagucgccaguucucugguucuuuuggucucccugggggcaaucagcuucuggauguguuccaaugggucuuugcaguguagaauaugcaucuaa

SEQ ID NO: 40037 - RNA, 1698 nt, Artificial Sequence
  derived and/or modified CDS sequence (wt) from hemagglutinin__InfluenzaA__AEX34845
augaaaguaaaacuacugguccuguuaugcacauuuacagcuacauaugcagacacaauauguauaggcuaccaugcuaacaacucgaccgacacuguugacacaguacuugaaaagaaugugacagugacacacucugucaaccugcuugagaacagucacaauggaaaacuaugucuauuaaaaggaauagccccacuacaauuggguaacugcagcguugccggguggaucuuaggaaacccagaaugcgaauuacugguucccaaggagucaugguccuacauuguagaaaaaccaaauccugagaauggaacauguuacccagggcauuucgcugacuaugaggaacugagggagcaauugaguucaguaucuucauuugagagguucgaaauauuccccaaagaaagcucauggcccaaccacaccguaaccggagugucagcaucaugcucccauaauggggaaagcaguuuuuacagaaauuugcuauggcugacggggaagaaugguuuguacccaaaccugagcaaguccuaugcaaacaacaaagaaaaagaaguccuuguacuaugggguguucaucacccgccaaacauaggugaccaaaaggcccucuaucauacagaaaaugcuuauguuucuguagugucuucacauuauagcagaaaauucaccccagaaauagccaaaagacccaaaguaagagaccaagaaggaagaaucaacuacuacuggacucugcuugaacccggggauacaauaauauuugaggcaaauggaaaucuaauagcgccaagauaugcuuucgcacugaguagaggcuuuggaucaggaaucaucaacucaaaugcaccaauggauaaaugugaugcgaagugccaaacaccucagggagcuauaaacagcagucuuccuuuccagaacguacacccagucacaauaggagaguguccaaaguaugucaggagugcaaaauuaaggaugguuacaggacuaaggaacaucccauccauucaauccagagguuuguuuggagccauugccgguuucauugaagggggguggacuggaaugguagaugguugguaugguuaucaucaucagaaugagcaaggaucuggcuaugcugcagaucaaaaaagcacacaaaaugccauuaaugggauuacaaacaaggugaauucuguaauugagaaaaugaacacucaauucacagcagugggcaaagaauucaacaaauuggaaagaaggauggaaaacuugaauaaaaaaguugaugauggguuuauagacauuuggacauauaaugcagaacuguugguucuacuggaaaaugaaaggacuuuggauuuccaugacuccaaugugaagaaucuguaugagaaaguaaaaagccaguuaaagaauaaugcuaaagaaauaggaaauggguguuuugaauucuaucacaaguguaacgaugaaugcauggagaguguaaagaauggaacuuaugacuauccaaaauauuccgaagaaucaaaguuaaacagggagaaaauugaaggagugaaauuggaaucaaugggagucuaucagauucuggcgaucuacucaacagucgccaguucucugguucuuuuggucucccugggggcaaucagcuucuggauguguuccaaugggucuuugcaguguagaauaugcaucuaa

SEQ ID NO: 40038 - RNA, 1698 nt, Artificial Sequence; identical to SEQ ID NO: 40033
  derived and/or modified CDS sequence (wt) from hemagglutinin__InfluenzaA__AEX34856

SEQ ID NO: 40039 - RNA, 1698 nt, Artificial Sequence
  derived and/or modified CDS sequence (wt) from hemagglutinin__InfluenzaA__AEX34867
augaaaguaaaacuacugguccuguuaugcacauuuacagcuacauaugcagacacaauauguauaggcuaccaugcuaacaacucgaccgacacuguugacacaguacuugaaaagaaugugacagugacacacucugucaaccugcuugagaacagucacaauggaaaacuaugucuauuaaaaggaauagccccacugcaauuggguaacugcagcguugccggguggaucuuaggaaacccagaaugcgaauuacugguuuccaaggagucaugguccuacauuguagaaaaaccaaauccugagaauggaacauguuacccagggcauuucgcugacuaugaggaacugagggagcaauugauuucaguaucuucauuugagagguucgaaauauuccccaaagaaagcucauggcccaaccacaccguaaccggagugucagcaucaugcucccauaauggggaaagcaguuuuuacagaaauuugcuauggcugacggggaagaaugguuuguacccaaaccugagcaaguccuaugcaaacaacaaagaaaaagaaguccuuguacuaugggguguucaucacccgccaaacauaggugaccaaaaggcccucuaucauacagaaaaugcuuauguuucuguagugucuucacauuauagcagaaaauucaccccagaaauagccaaaagacccaaaguaagagaucaagaaggaagaaucaacuacuacuggacucugcuugaacccggggauacaauaauauuugaggcaaauggaaaucuaauagcgccaagauaugcuuucgcacugaguagaggcuuuggaucaggaaucaucaacucaaaugcaccaauggauaaaugugaugcgaagugccaaacaccucggggagcuauaaacagcagucuuccuuuccagaacguacacccagucacaauaggagaguguccaaaguaugucaggagugcaaaauuaaggaugguuacaggacuaaggaacaucccauccauucaauccagagguuuguuuggagccauugccgguuucauugaagggggguggacuggaaugguagaugguugguaugguuaucaucaucagaaugagcaaggaucuggcuaugcugcagaucaaaaaagcacacaaaaugccauuaaugggauuacaaacaaggugaauucuguaauugagaaaaugaacacucaauucacagcagugggaaaagaauucaacaaauuggaaagaaggauggaaaacuugaauaaaaaaguugaugauggguuuauagacauuuggacauauaaugcagaacuguugguucuacuggaaaaugaaaggacuuuggauuuccaugacuccaaugugaagaaucuguaugagaaaguaaaaagccaguuaaagaauaaugcuaaagaaauaggaaauggguguuuugaauucuaucacaaguguaacgaugaaugcauggagaguguaaagaauggaacuuaugacuauccaaaauauuccgaagaaucaaaguuaaacagggagaaaauugaaggagugaaauuggaaucaaugggagucuaucagauucuggcgaucuacucaacagucgccaguucucugguucuuuuggucucccugggggcaaucagcuucuggauguguuccaaugggucuuugcaguguagaauaugcaucuaa

SEQ ID NO: 40040 - RNA, 1698 nt, Artificial Sequence; identical to SEQ ID NO: 40033
  derived and/or modified CDS sequence (wt) from hemagglutinin__InfluenzaA__AEX34878

SEQ ID NO: 40041 - RNA, 1698 nt, Artificial Sequence
  derived and/or modified CDS sequence (wt) from hemagglutinin__InfluenzaA__AEX34889
augaaaguaaaucuacugguccuguuaugcacauuuacagcuacauaugcagacacaauauguauaggcuaccaugcuaacaacucgaccgacacuguugacacaguacuugaaaagaaugugacagugacacacucugucaaccugcuugagaacagucacaauggaaaacuaugucuauuaaaaggaauagccccacuacaauuggguaacugcagcguugccggguggaucuuaggaaacccagaaugugaauuacugauuuccaaggagucaugguccuacauuguagaaaaaccaaauccugagaauggaacauguuacccagggcauuucgcugacuaugaggaacugagggagcaauugaguucaguaucuucauuugagagguucgaaauauuccccaaagaaagcucauggcccaaccacaccguaaccggagugucagcaucaugcucccauaauggggaaagcaguuuuuacagaaauuugcuauggcugacggggaagaaugguuuguacccaaaccugagcaaguccuaugcaaacaacaaagaaaaagaaguccuuguacuaugggguguucaucacccgccaaacauaggugaccaaaaggcccucuaucauacagaaaaugccuauguuucuguagugucuucacauuauagcagaaaauucaccccagaaauagccaaaagacccaaaguaagagaucaagaaggaagaaucaacuacuacuggacucugcuugaacccggggauacaauaauauuugaggcaaauggaaaucuaauagcgccaagauaugcuuucgcacugaguagaggcuuuggaucaggaaucaucaacucaaaugcaccaauggauaaaugugaugcgaagugccaaacaccucagggagcuauaaacagcagucuuccuuuccagaacguacacccagucacaauaggagaguguccaaaguaugucaggagugcaaaauuaaggaugguuacaggacuaaggaacaucccauccauucaauccagagguuuguuuggagccauugccgguuucauugaagggggguggacuggaaugguagaugguugguaugguuaucaucaucagaaugagcaaggaucuggcuaugcugcagaucaaaaaagcacacaaaaugccauuaaugggauuacaaacaaggugaauucuguaauugagaaaaugaacacucaauucacagcagugggcaaagaauucaacaaauuggaaagaaggauggaaaacuugaauaaaaaaguugaugauggguuuauagacauuuggacauauaaugcagaacuguugguucuacuggaaaaugaaaggacuuuggauuuccaugacuccaaugugaagaaucuguaugagaaaguaaaaagccaguuaaagaauaaugcuaaagaaauaggaaauggguguuuugaauucuaucacaaguguaacgaugaaugcauggagaguguaaagaauggaacuuaugacuauccaaaauauuccgaagaaucaaaguuaaacagggagaaaauugauggagugaaauuggaaucaaugggagucuaucagauucuggcgaucuacucaacagucgccaguucucugguucuuuuggucucccugggggcaaucagcuucuggauguguuccaaugggucuuugcaguguagaauaugcaucuaa

SEQ ID NO: 40042 - RNA, 1698 nt, Artificial Sequence
  derived and/or modified CDS sequence (wt) from hemagglutinin__InfluenzaA__AEX34900
augaaaguaaaacuacugguccuauuaugcacauuuacagcuacauaugcagacacaauauguaucggcuaccaugccaacaacucaaccgacacuguugacacaguacuugaaaagaaugugacagugacacacucugucaaccugcuugaggacaaccacaauggaaaacuaugucuauuaaaaggaauagccccauuacaauuggguaacugcagcguugccggguggaucuuaggaaacccagaaugcgaauuacugauuuccaaggagucaugguccuacauuguagaaaaaccaaauccugagaauggaacauguuacccagggcauuucgccgacuaugaggaacugagggagcaauugaguucaguaucuucauuugagagguucgaaauauuccccaaagaaagcucauggcccaaccacaccguaaccggaguauccgcaucaugcucccauaauggggaaagcagcuuuuacaaaaauuugcuauggcugacgggaaagaaugguuuguacccaaaccugagcaaguccuaugcaaacaacaaggagaaagaaguccucguacuaugggguguucaucacccgccaaacauaggugaccaaaugacccucuaccauaaagaaaaugcuuaugucucuguagugucuucacauuauagcagaaaauucaccccagaaauagccaaaagacccaaggugagagaucaagaagggagaaucaacuacuacuggacucugcuugaacccggggauacaauaauauuugaggcaaguggaaaucuaauagcgccaagauaugcuuucgcacugaguagaggcuuuggaucaggaaucaucaacucaaaugcaccaauggaugaaugugaugcgaagugccaaacaccucagggagcuauaaacagcagucuuccuuuccagaauguacacccagucacaauaggagaauguccaaaguaugucagaagugcaaaauuaaggaugguuacaggacuaaggaacaucccauccauucaauccagagguuuguuuggagccauugcugguuucauugaagggggguggacuggaaugguagaugguugguaugguuaucaucaccagaaugagcaaggaucuggcuaugcugcagaucaaaaaagcacacaaaaugccauuaauggggucacaaacaaggugaauucuguaauugagaagaugaacacucaauucacagcugugggcaaagaauucaacaaauuggaaagaaggauggaaaacuuaaauaaaaaaguugaugacggguuuauagacguuuggacauauaaugcagaacuguugguucuacuggaaaaugagagaacuuuggauuuccaugacuccaaugugaagaauuuguaugagaaaguaaaaaaccaauuaaaaaauaaugccaaagaaauaggaaauggguguuuugaauuuuaccacaaguguaacgaugaaugcauggagaguguaaaaaauggaacuuaugacuauccaaaauauuccgaagaaucaaaguuaagcagggagaaaauugauggaguggaauuggaaucaaugggagucuaucagauucuggcgaucuacucaacagucgccaguucucugguucuuuuggucucccugggggcaaucagcuucuggauguguuccaaugggucuuugcaguguagaauaugcaucuaa

SEQ ID NO: 40043 - RNA, 1698 nt, Artificial Sequence
  derived and/or modified CDS sequence (wt) from hemagglutinin__InfluenzaA__AEX34911
augaaaguaaaacuacugguccuguuaugcacauuuacagcuacauaugcagacacaauauguauaggcuaccaugcuaacaacucgaccgacacuguugacacaguacuugaaaagaaugugacagugacacacucugucaaccugcuugagaacagucacaauggaaaacuaugucuauuaaaaggaauagccccacuacaauuggguaacugcagcguugccggguggaucuuaggaaacccagaaugcgaauuacugauuucccaggagucaugguccuacauuguagaaaaaccaaauccugagaauggaacauguuacccagggcauuucgcugacuaugaggaacugagggagcaauugaguucaguaucuucauuugagagguucgaaauauuccccaaagaaagcucauggcccaaccacaccguaaccggagugucagcaucaugcucccauaauggggaaagcaguuuuuacagaaauuugcuauggcugacggggaagaaugguuuguacccaaaccugagcaaguccuaugcaaacaacaaagaaaaagaaguccuuguacuaugggguguucaucacccgccaaacauaggugaccaaaaggcccucuaucauacagaaaaugcuuauguuucuguagugucuucacauuauagcagaaaauucaccccagaaauagccaaaagacccaaaguaagagaucaagaaggaagaaucaacuacuacuggacucugcuugaacccggggauacaauaauauuugaggcaaauggaaaucuaauagcgccaagauaugcuuucgcacugaguagaggcuuuggaucaggaaucaucaacucaaaugcaccaauggauaaaugugaugcgaagugccaaacaccucagggagcuauaaacagcagucuuccuuuccagaacguacacccagucacaauaggagaguguccaaaguaugucaggagugcaaaauuaaggaugguuacaggacuaaggaacaucccauccauucaauccagagguuuguuuggagccauugccgguuucauugaagggggguggacuggaaugguagaugguugguaugguuaucaucaucagaaugagcaaggaucuggcuaugcugcagaucaaaaaagcacacaaaaugccauuaaugggauuacaaacaaggugaauucuguaauugagaaaaugaacacucaauucacagcagugggcaaagaauucaacaaauuggaaagaaggauggaaaacuugaauaaaaaaguugaugauggguuuauagacauuuggacauauaaugcagaacuguugguucuacuggaaaaugaaaggacuuuggauuuccaugacuccaaugugaagaaucuguaugagaaaguaaaaagccaguuaaagaauaaugcuaaagaaauaggaaauggguguuuugaauucuaucacaaguguaacgaugaaugcauggagaguguaaagaauggaacuuaugacuauccaaaauauuccgaagaaucaaaguuaaacagggagaaaauugauggagugaaauugggaucaaugggagucuaucagauucuggcgaucuacucaacagucgccaguucucugguucuuuuggucucccugggggcaaucagcuucuggauguguuccaaugggucuuugcaguguagaauaugcaucuaa

SEQ ID NO: 40044 - RNA, 1698 nt, Artificial Sequence
  derived and/or modified CDS sequence (wt) from hemagglutinin__InfluenzaA__AEX34922
augaaaguaaaacuacugguccuguuaugcacauuuacagcuacauaugcagacacaauauguauaggcuaccaugccaacaacucgaccgacacuguugacacaguacuugaaaagaaugugacagugacacacucugucaaccugcuugagaacagucacaauggaaaacuaugucuauuaaaaggaauagccccacuacaauuggguaacugcagcguugccggguggaucuuaggaaacccagaaugcgaauugcugauuuccaaggagucaugguccuacauuguagaaaaaccaaauccugagaauggaacauguuacccagggcauuucgcugacuaugaggaacugagggagcaauugaguucaguaucuucauuugagagguucgaaauauuccccaaagaaagcucauggcccaaccacaccguaaccggagugucagcaucaugcucccauaauggggaaagcaguuuuuacagaaauuugcuauggcugacggggaagaaugguuuguacccaaaccugagcaaguccuaugcaaacaacaaagaaaaagaaguccuuguacuaugggguguucaucacccgccaaacauaggugaccaaaaggcccucuaucauacagaaaaugcuuauguuucuguagugucuucacauuauagcagaagauucaccccagaaauagccaaaagacccaaaguaagagaucaagaaggaagaaucaacuacuacuggacucugcuugaacccggggauacaauaauauuugaggcaaauggaaaucuaauagcgccaagauaugcuuucgcacugaguagaggcuuuggaucaggaaucaucaacucaaaugcaccaauggauaaaugugaugcgaagugccaaacaccucagggagcuauaaacagcagucuuccuuuccagaacguacacccagucacaauaggagaguguccaaaguaugucaggagugcaaaauuaaggaugguuacaggacuaagaaacaucccauccauucaauccagagguuuguuuggagccauugccgguuucauugaagggggguggacuggaaugguagaugguugguaugguuaucaucaucagaaugagcaaggaucuggcuaugcugcagaucaaaaaagcacacaaaaugccauuaaugggauuacaaacaaggugaauucuguaauugagaaaaugaacacucaauucacagcagugggcaaagaauucaacaaauuggaaagaaggauggaaaacuuggauaaaaaaguugaugauggguuuauagacauuuggacauauaaugcagaacuguugguucuacuggaaaaugaaaggacuuuggauuuccaugacuccaaugugaagaaucuguaugagaaaguaaaaagccaguuaaagaauaaugcuaaagaaauaggaaauggguguuuugaauucuaucacaaguguaacgaugaaugcauggagaguguaaagaauggaacuuaugacuauccaaaauauuccgaagaaucaaaguuaaacagggagaaaauugauggagugaaauuggaaucaaugggagucuaucagauucuggcgaucuacucaacagucgccaguucucugguucuuuuggucucccugggggcaaucagcuucuggauguguuccaaugggucuuugcaguguagaauaugcaucuaa

SEQ ID NO: 40045 - RNA, 1698 nt, Artificial Sequence
  derived and/or modified CDS sequence (wt) from hemagglutinin__InfluenzaA__AEX34933
augaaaguaaaacuacugguccuguuaugcacauuuacagcuacauaugcagacacaauauguauaggcuaccaugcuaacaacucgaccgacacuguugacacaguacuugaaaagaaugugacagugacacacucugucaaccugcuugagaacagucacaauggaaaacuaugucuauuaaaaggaauagccccacuacaauuggguaacugcagcguugccggguggaucuuaggaaacccagaaugcgaauuacugauuuccaaggagucaugguccuacauuguagaaaaaccaaauccugagaauggaacauguuacccagggcauuucgcugacuaugaggaacugagggagcaauugaguucaguaucuucauuugagagguucgaaauauuccccaaagaaagcucauggcccaaccacaccguaaccggagugucagcaucaugcucccauaauggggaaagcaguuuuuacagaaauuugcuauggcugacggggaagaaugguuuauacccaaaccugagcaaguccuaugcaaacaacaaagaaaaagaaguccuuguacuaugggguguucaucacccgccaaacauaggugaccaaaaggcccucuaucauacagaaaaugcuuauguuucuguagugucuucacauuauagcagaaaauucaccccagaaauagccaaaagacccaaaguaagagaucaagaaggaagaaucaacuacuacuggacucugcuugaacccggggauacaauaauauuugaggcaaauggaaaucuaauagcgccaagauaugcuuucgcacugaguagaggcuuuggaucaggaaucaucaacucaaaugcaccaauggauaaaugugaugcgaagugccaaacaccucagggagcuauaaacagcagucuuccuuuccagaacguacacccagucacaauaggagaguguccaaaguaugucaggagugcaaaauuaaggaugguuacaggacuaaggaacaucccauccauucaauccagagguuuguuuggagccauugccgguuucauugaagggggguggacuggaaugguagaugguugguaugguuaucaucaucagaaugagcaaggaucuggcuaugcugcagaucaaaaaagcacacaaaaugccauuaaugggauuacaaacaaggugaauucuguaauugagaaaaugaacacucaauucacagcagugggcaaagaauucaacaaauuggaaagaaggauggaaaacuugaauaaaaaaguugaugauggguuuauagacauuuggacauauaaugcagaacuguugguucuacuggaaaaugaaaggacuuuggauuuccaugacuccaaugugaagaaucuguaugagaaaguaaaaagccaguuaaagaauaaugcuaaagaaauaggaaauggguguuuugaauucuaucacaaguguaacgaugaaugcauggagaguguaaagaauggaacuuaugacuauccaaaauauuccgaagaaucaaaguuaaacagggagaaaauugauggagugaaauuggaaucaaugggagucuaucagauucuggcgaucuacucaacagucgccaguucucugguucuuuuagucucccugggggcaaucagcuucuggauguguuccaaugggucuuugcaguguagaauaugcaucuaa

SEQ ID NO: 40046 - RNA, 1698 nt, Artificial Sequence
  derived and/or modified CDS sequence (wt) from hemagglutinin__InfluenzaA__AEX34944
augaaaguaaaacuacugguccuguuaugcacauuuacagcuacauaugcagacacaauauguauaggcuaccaugcuaacaacucgaccgacacuguugacacaguacuugaaaagaaugugacagugacacacucugucaaccugcuugagaacagucacaauggaaaacuaugucuauuaaaaggaauagccccacuacaauuggguaacugcagcguugccggguggaucuuaggaaacccagaaugcgaauuacugauuuccaaggagucaugguccuacauuguagaaaaaccaaauccugagaauggaacauguuacccagggcauuucgcugacuaugaggaacugagggagcaauugaguucaguaucuucauuugagagguucgaaauauuccccaaagaaagcucauggcccaaccacaccguaaccggagugucagcaucaugcucccauaauggggaaagcaguuuuuacagaaauuugcuauggcugacggggaagaaugguuuguacccaaaccugagcaaguccuaugcaaacaacaaagaaaaagaaguccuuguacuaugggguguucaucacccgccaaacauaggugaccaaaaggcccucuaucauacagaaaaugcuuauguuucuguagugucuucacauuauagcagaaaauucaccccagaaauagccaaaagacccaaaguaagagaucaagaaggaagaaucaacuacuacuggacucugcuugaaccuggggauacaauaauauuugaggcaaauggaaaucuaauagcgccaagauaugcuuucgcacugaguagaggcuuuggaucaggaaucaucaacucaaaugcaccaauggauaaaugugaugcgaagugccaaacaccucaaggagcuauaaacagcagucuuccuuuccagaacguacacccagucacaauaggagagugcccaaaguaugucaggagugcaaaauuaaggaugguuacaggacuaaggaacaucccauccauucaauccagaggucuguuuggagccauugccgguuucauugaagggggguggacuggaaugguagaugguugguaugguuaucaucaucagaaugagcaaggaucuggcuaugcugcagaucaaaaaagcacacaaaaugccauuaaugggauuacaaacaaggugaauucuguaauugagaaaaugaacacucaauucacagcagugggcaaagaauucaacaaauuggaaagaaggauggaaaacuugaauaaaaaaguugaugauggguuuauagacauuuggacauauaaugcagaacuguugguucuacuggaaaaugaaaggacuuuggauuuccaugacuccaaugugaagaaucuguaugagaaaguaaaaagccaguuaaagaauaaugcuaaagaaauaggaaauggguguuuugaauucuaucacaaguguaacgaugaaugcauggagaguguaaagaauggaacuuaugacuauccaaaauauuccgaagaaucaaaguuaaacagggagaaaauugauggagugaaauuggaaucaaugggagucuaucagauucuggcgaucuacucaacagucgccaguucucugguucuuuuggucucccugggggcaaucagcuucuggauguguuccaaugggucuuugcaguguagaauaugcaucuaa

SEQ ID NO: 40047 - RNA, 1698 nt, Artificial Sequence
  derived and/or modified CDS sequence (wt) from hemagglutinin__InfluenzaA__AEX34955
augaaagcaaaacuacugguccuguuaugcaccuuuacagcuacauaugcagacacaauauguauaggcuaccaugcuaacaacucgaccgacacuguugacacaguacuugaaaagaaugugacagugacacacucugucaaccugcuugagaacagucacaauggaaaacuaugucuauuaaaaggaauagccccacuacaauuggguaacugcagcguugccggguggaucuuaggaaacccagaaugcgaauuacugauuuccaaggagucaugguccuacauuguagaaaaaccaaauccugagaaugggacauguuacccagggcauuucgcugacuaugaggaacugagggagcaauugaguucaguaucuucauuugagagguucgaaauauuccccaaagaaagcucauggcccaaccacaccguaaccggagugucagcaucaugcucccauaauggggaaagcaguuuuuacagaaauuugcuauggcugacggggaagaaugguuuguacccaaaccugagcaaguccuaugcaaacaacaaagaaaaagaaguccuuguacuaugggguguucaucacccgccaaacauaggugaccaaaaggcccucuaucauacagaaaaugcuuauguuucuguagugucuucacauuauagcagaaaauucaccccagaaauagccaaaagacccaaaguaagagaucaagaaggaagaaucaacuacuacuggacucugcuugaaccuggggauacaauaauauuugaggcaaauggaaaucuaauagcgccaagauaugcuuucgcacugaguagaggcuuuggaucaggaaucaucaacucaaaugcaccaauggauaaaugugaugcgaagugccaaacaccucagggagcuauaaacagcagucuuccuuuccagaacguacacccagucacaauaggagagugcccaaaguaugucaggagugcaaaauuaaggaugguuacaggacuaaggaacaucccauccauucaauccagagguuuguuuggagccauugccgguuucauugaagggggguggacuggaaugguagaugguugguaugguuaucaucaucagaaugagcaaggaucuggcuaugcugcagaucaaaaaagcacacaaaaugccauuaaugggauuacaaacaaggugaauucuguaauugagaaaaugaacacucaauucacagcagugggcaaagaauucaacaaauuggaaagaaggauggaaaacuugaauaaaaaaguugaugauggguuuauagacauuuggacauauaaugcagaacuguugguucuacuggaaaaugaaaggacuuuggauuuccaugacuccaaugugaagaaucuguaugagaaaguaaaaagccaguuaaagaauaaugcuaaagaaauaggaaauggguguuuugaauucuaucacaaguguaacgaugaaugcauggagaguguaaagaauggaacuuaugacuauccaaaauauuccgaagaaucaaaguuaaacagggagaaaauugauggagugaaauuggaaucaaugggagucuaucagauucuggcgaucuacucaacagucgccaguucucugguucuuuuggucucccugggggcaaucagcuucuggauguguuccaaugggucuuugcaguguagaauaugcaucuaa

SEQ ID NO: 40048 - RNA, 1698 nt, Artificial Sequence
  derived and/or modified CDS sequence (wt) from hemagglutinin__InfluenzaA__AEX34966
augaaaguaaaacuacugguccuauuaugcacauuuacagcuacauaugcagacacaauauguauaggcuaccaugcuaacaacucgaccgacacuguugacacaguacuugaaaagaaugugacagugacacacucugucaaccugcuugagaacagucacaauggaaaacuaugucuauuaaaaggaauagccccacuacaauuggguaacugcagcguugccggguggaucuuaggaaacccagaaugcgaauuacugauuuccaaggagucaugguccuacauuguagaaaaaccaaauccugagaauggaacauguuacccagggcauuucgcugacuaugaggaacugagggagcaauugaguucaguaucuucauuugagagguucgaaauauuccccaaagaaagcucauggcccaaccacaccguaaccggagugucagcaucaugcucccauaauggggaaagcaguuuuuacagaaauuugcuauggcugacggggaagaaugguuuguacccaaaccugagcaaguccuaugcaaacaacaaagaaaaagaaguccuuguacuaugggguguucaucacccgccaaacauaggugaccaaaaggcccucuaucauacagaaaaugcuuauguuucuguagugucuucacauuauagcagaaaauucaccccagaaauagccaaaagacccaaaguaagagaucaagaaggaagaaucaacuacuacuggacucugcuugaaccuggggauacaauaauguuugaggcaaauggaaaucuaauagcgccaagauaugcuuucgcacugaguagaggcuuuggaucaggaaucaucaacucaaaugcaccaauggauaaaugugaugcgaagugccaaacaccucagggagcuauaaacagcagucuuccuuuccagaacguacacccagucacaauaggagagugcccaaaguaugucaggagugcaaaauuaaggaugguuacaggacuaaggaacaucccauccauucaauccagagguuuguuuggagccauugccgguuucauugaagggggguggacuggaaugguagaugguugguaugguuaucaucaucagaaugagcaaggaucuggcuaugcugcagaucaaaaaagcacacaaaaugccauuaaugggauuacaaacaaggugaauucuguaauugagaaaaugaacacucaauucacagcagugggcaaagaauucaacaaauuggaaagaaggauggaaaacuugaauaaaaaaguugaugauggguuuauagacauuuggacauauaaugcagaacuguugguucuacuggaaaaugaaaggacuuuggauuuccaugacuccaaugugaagaaucuguaugagaaaguaaaaagccaguuaaagaauaaugcuaaagaaauaggaaauggguguuuugaauucuaucacaaguguaacgaugaaugcauggagaguguaaagaauggaacuuaugacuauccaaaauauuccgaagaaucaaaguuaaacagggagaaaauugauggagugaaauuggaaucaaugggagucuaucagauucuggcgaucuacucaacagucgccaguucucugguucuuuuggucucccugggggcaaucagcuucuggauguguuccaaugggucuuugcaguguagaauaugcaucuaa

SEQ ID NO: 40049 - RNA, 1698 nt, Artificial Sequence; identical to SEQ ID NO: 40048
  derived and/or modified CDS sequence (wt) from hemagglutinin__InfluenzaA__AEX34977

SEQ ID NO: 40050 - RNA, 1698 nt, Artificial Sequence; identical to SEQ ID NO: 40048
  derived and/or modified CDS sequence (wt) from hemagglutinin__InfluenzaA__AEX34988

SEQ ID NO: 40051 - RNA, 1698 nt, Artificial Sequence; identical to SEQ ID NO: 40033
  derived and/or modified CDS sequence (wt) from hemagglutinin__InfluenzaA__AEX34999

SEQ ID NO: 40052 - RNA, 1698 nt, Artificial Sequence; identical to SEQ ID NO: 40048
  derived and/or modified CDS sequence (wt) from hemagglutinin__InfluenzaA__AEX35010

SEQ ID NO: 40053 - RNA, 1698 nt, Artificial Sequence; identical to SEQ ID NO: 40048
  derived and/or modified CDS sequence (wt) from hemagglutinin__InfluenzaA__AEX35032

SEQ ID NO: 40054 - RNA, 1698 nt, Artificial Sequence; identical to SEQ ID NO: 40048
  derived and/or modified CDS sequence (wt) from hemagglutinin__InfluenzaA__AEX35043

SEQ ID NO: 40055 - RNA, 1698 nt, Artificial Sequence
  derived and/or modified CDS sequence (wt) from hemagglutinin__InfluenzaA__AEX35054
augaaaguaaaacuacugguccuauuaugcacauuuacagcuacauaugcagacacaauauguauaggcuaccaugcuaacaacucgaccgacacuguugacacaguacuugaaaagaaugugacagugacacacucugucaaccugcuugagaacagucacaauggaaaacuaugucuauuaaaaggaauagccccacuacaauuggguaacugcagcguugccggguggaucuuaggaaacccagaaugcgaauuacugauuuccaaggagucaugguccuacauuguagaaaaaccaaauccugagaauggaacauguuacccagggcauuucgcugacuaugaggaacugagggagcaauugaguucaguaucuucauuugagagguucgaaauauuccccaaagaaagcucauggcccaaccacaccguaaccggagugucagcaucaugcucccauaauggggaaagcaguuuuuacagaaauuugcuauggcugacggggaagaaugguuuguacccaaaccugagcaaguccuaugcaaacaacaaagaaaaagaaguccuuguacuaugggguguucaucacccgccaaacauaggugaccaaaaggcccucuaucauacagaaaaugcuuauguuucuguagugucuucacauuauagcagaaaauucaccccagaaauagccaaaagacccaaaguaagagaucaagaaggaagaaucaacuacuacuggacucugcuugaaccuggggauacaauaauguuugaggcaaauggaaaucuaauagcgccaagauaugcuuucgcacugaauagaggcuuuggaucaggaaucaucaacucaaaugcaccaauggauaaaugugaugcgaagugccaaacaccucagggagcuauaaacagcagucuuccuuuccagaacguacacccagucacaauaggagagugcccaaaguaugucaggagugcaaaauuaaggaugguuacaggacuaaggaacaucccauccauucaauccagagguuuguuuggagccauugccgguuucauugaagggggguggacuggaaugguagaugguugguaugguuaucaucaucagaaugagcaaggaucuggcuaugcugcagaucaaaaaagcacacaaaaugccauuaaugggauuacaaacaaggugaauucuguaauugagaaaaugaacacucaauucacagcagugggcaaagaauucaacaaauuggaaagaaggauggaaaacuugaauaaaaaaguugaugauggguuuauagacauuuggacauauaaugcagaacuguugguucuacuggaaaaugaaaggacuuuggauuuccaugacuccaacgugaagaaucuguaugagaaaguaaaaagccaguuaaagaauaaugcuaaagaaauaggaaauggguguuuugaauucuaucacaaguguaacgaugaaugcauggagaguguaaagaauggaacuuaugacuauccaaaauauuccgaagaaucaaaguuaaacagggagaaaauugauggagugaaauuggaaucaaugggagucuaucagauucuggcgaucuacucaacagucgccaguucucugguucuuuuggucucccugggggcaaucagcuucuggauguguuccaaugggucuuugcaguguagaauaugcaucuaa

SEQ ID NO: 40056 - RNA, 1698 nt, Artificial Sequence
  derived and/or modified CDS sequence (wt) from hemagglutinin__InfluenzaA__AEX35065
augaaaguaaaacuacugguccuauuaugcacauuuacagcuacauaugcagacacaauauguauaggcuaccaugcuaacaacucgaccgacacuguugacacaguacuugaaaagaaugugacagugacacacucugucaaccugcuugagaacagucacaauggaaaacuaugucuauuaaaaggaauagccccacuacaauuggguaacugcagcguugccggguggaucuuaggaaacccagaaugcgaauuacugauuuccaaggagucaugguccuacauuguagaaaaaccaaauccugagaauggaacauguuacccagggcauuucgcugacuaugaggaacugagggagcaauugaguucaguaucuucauuugagagguucgaaauauuccccaaagaaagcucauggcccaaccacaccguaaccggagugucagcaucaugcucccauaauggggaaagcaguuuuuacagaaauuugcuauggcugacggggaagaaugguuuguacccaaaccugagcaaguccuaugcaaacaacaaagaaaaagaaguccuuguacuaugggguguucaucacccgccaaacauaggugaucaaaaggcccucuaucauacagaaaaugcuuauguuucuguaguaucuucacauuauagcagaaaauucaccccagaaauagccaaaagacccaaaguaagagaucaagaaggaagaaucaacuacuacuggacucugcuugaaccuggggauacaauaauguuugaggcaaauggaaaucuaauagcgccaagauaugcuuucgcacugaguagaggcuuuggaucaggaaucaucaacucaaaugcaccaauggauaaaugugaugcgaagugccaaacaccucagggagcuauaaacagcagucuuccuuuccagaacguacacccagucacaauaggagagugcccaaaguaugucaggagugcaaaauuaaggaugguuacaggacuaaggaacaucccauccauucaauccagagguuuguuuggagccauugccgguuucauugaagggggguggacuggaaugguagaugguugguaugguuaucaucaucagaaugagcaaggaucuggcuaugcugcagaucaaaaaagcacacaaaaugccauuaaugggauuacaaacaaggugaauucuguaauugagaaaaugaacacucaauucacagcagugggcaaagaauucaacaaauuggaaagaaggauggaaaacuugaauaaaaaaguugaugauggguuuauagacauuuggacauauaaugcagaacuguugguucuacuggaaaaugaaaggacuuuggauuuccaugacuccaaugugaagaaucuguaugagaaaguaaaaagccaguuaaagaauaaugcuaaagaaauaggaaauggguguuuugaauucuaucacaaguguaacgaugaaugcauggagaguguaaagaauggaacuuaugacuauccaaaauauuccgaagaaucaaaguuaaacagggagaaaauugauggagugaaauuggaaucaaugggagucuaucagauucuggcgaucuacucaacagucgccaguucucugguucuuuuggucucccugggggcaaucagcuucuggauguguuccaaugggucuuugcaguguagaauaugcaucuaa

SEQ ID NO: 40057 - RNA, 1698 nt, Artificial Sequence; identical to SEQ ID NO: 34517
  derived and/or modified CDS sequence (wt) from hemagglutinin__InfluenzaA__AEX35076

SEQ ID NO: 40058 - RNA, 1698 nt, Artificial Sequence
  derived and/or modified CDS sequence (wt) from hemagglutinin__InfluenzaA__AEX35087
augaaaguaaaacuacugguucuauuaugcacauuuacagcuacauaugcagacacaauauguaucggcuaccaugccaacaacucaaccgacacuguugacacaguacuugaaaagaaugugacagugacacacucugucaaccugcuugaggacaaccacaauggaaaacuaugucuauuaaaaggaauagccccauuacaauuggguaacugcagcguugccggguggaucuuaggaaacccagaaugcgaauuacugauuuccaaggagucaugguccuacauuguagaaaaaccaaauccugagaauggaacauguuacccagggcauuucgccgacuaugaggaacugagggagcaauugaguucaguaucuucauuuaagagguucgaaauauuccccaaagaaagcucauggcccaaccacaccguaaccggaguauccgcaucaugcucccauaauggggaaagcagcuuuuacaaaaauuugcuauggcugacgggaaagaaugguuuguacccaaaccugagcaaguccuaugcaaacaacaaggagaaagaaguccucguacuaugggguguucaucacccgccaaacauaggugaccaaaugacccucuaccauaaagaaaaugcuuaugucucuguagugucuucacauuauagcagaaaauucaccccagaaauagccaaaagacccaaggugagagaucaagaagggagaaucaacuacuacuggacucugcuugaacccggggauacaauaauauuugaggcaaguggaaaucuaauagcgccaagauaugcuuucgcacugaguagaggcuuuggaucaggaaucaucaacucaaaugcaccaauggaugaaugugaugcgaagugccaaacaccucagggagcuauaaacagcagucuuccuuuccagaauguacacccagucacaauaggagaauguccaaaguaugucagaagugcaaaauuaaggaugguuacaggacuaaggaacaucccauccauucaauccagagguuuguuuggagccauugcugguuucauugaaggaggguggacuggaaugguagaugguugguaugguuaucaucaccagaaugagcaaggaucuggcuaugcugcagaucaaaaaagcacacaaaaugccauuaaugggaucacaaacaaggugaauucuguaauugagaagaugaacacucaauucacagcugugggcaaagaauucaacaaauuggaaagaaggauggaaaacuuaaauaaaaaaguugaugacggguuuauagacguuuggacauauaaugcagaacuguugguucuacuggaaaaugagagaacuuuggauuuccaugacuccaaugugaagaauuuguaugagaaaguaaaaaaccaauuaaaaaauaaugccaaagaaauaggaaauggguguuuugaauuuuaucacaaguguaacgaugaaugcauggagaguguaaaaaauggaacuuaugacuauccaaaauauuccgaagaaucaaaguuaagcagggagaaaauugauggagugaaauuggaaucaaugggagucuaucagauucuggcgaucuacucaacagucgccaguucucugguucuuuuggucucccugggggcaaucagcuucuggauguguuccaaugggucuuugcaguguagaauaugcaucuaa

SEQ ID NO: 40059 - RNA, 1698 nt, Artificial Sequence
  derived and/or modified CDS sequence (wt) from hemagglutinin__InfluenzaA__AEX35098
augaaaguaaaacuacugguccuguuaugcacauuuacagcuacauaugcagacacaauauguauaggcuaccaugcuaacaacucgaccgacacuguugacacaguacuugaaaagaaugugacagugacacacucugucaaccugcuugagaacagucacaauggaaaacuaugucuauuaaaaggaauagccccacuacaauuggguaauugcagcguugccggguggaucuuaggaaacccagaaugcgaauuacugauuuccaaggagucaugguccuacauuguagaaaaaccaaauccugagaauggaacauguuacccagggcauuucgcugacuaugaggaacugagggagcaauugaguucaguaucuucauuugagagguucgaaauauuccccaaagaaagcucauggcccaaccacaccguaaccggagugucagcaucaugcucccauaauggggaaagcaguuuuuacagaaauuugcuauggcugacggggaagaaugguuuguacccaaaccugagcaaguccuaugcaaacaacaaagaaaaagaaguccuuguacuaugggguguucaucacccgccaaacauaggugaccaaaaggcccucuaucauacagaaaaugcuuauguuucuguaaugucuucacauuauagcagaaaauucaccccagaaauagccaaaagacccaaaguaagagaucaagaaggaagaaucaacuacuacuggacucugcuugaacccggggauacaauaauauuugaggcaaauggaaaucuaauagcgccaagauaugcuuucgcacugaguagaggcuuuggaucaggaaucaucaacucaaaugcaccaauggauaaaugugaugcgaagugccaaacaccucagggagcuauaaacagcagucuuccuuuccagaacguacacccagucacuauaggagaguguccaaaguaugucaggagugcaaaauuaaggaugguuacaggacuaaggaacaucccauccauucaauccagagguuuguuuggagccauugccgguuucauugaagggggguggacuggaaugguagaugguugguaugguuaucaucaucagaaugagcaaggaucuggcuaugcugcagaucaaaaaagcacacaaaaugccauuaaugggauuacaaacaaggugaauucuguaauugagaaaaugaacacucaauucacagcagugggcaaagaauucaacaaauuggaaagaaggauggaaaacuugaauaaaaaaguugaugauggguuuauagacauuuggacauauaaugcagaacuguugguucuacuggaaaaugaaaggacuuuggauuuccaugacuccaaugugaagaaucuguaugagaaaguaaaaagccaguuaaagaauaaugcuaaagaaauaggaaauggguguuuugaauucuaucacaaguguaacgaugaaugcauggagaguguaaagaauggaacuuaugacuauccaaaauauuccgaagaaucaaaguuaaacagggagaaaauugauggagugaaauuggaaucaaugggagucuaucagauucuggcgaucuacucaacagucgccaguucucugguucuuuuggucucccugggggcaaucagcuucuggauguguuccaaugggucuuugcaguguagaauaugcaucuaa

SEQ ID NO: 40060 - RNA, 1698 nt, Artificial Sequence
  derived and/or modified CDS sequence (wt) from hemagglutinin__InfluenzaA__AEX35109
augaaaguaaaacuacugguccuguuaugcacauuuacagcuacauaugcagacacaauauguauaggcuaccaugcuaacaacucgaccgacacuguugacacaguacuugaaaagaaugugacagugacacacucugucaaccugcuugagaacagucacaauggaaaacuaugucuauuaaaaggaauagccccacuacaauuggguaacugcagcguugccggguggaucuuaggaaacccagaaugcgaauuacugauuuccaaggagucaugguccuacauuguagaaaaaccaaauccugagaauggaacauguuacccagggcauuucgcugacuaugaggaacugagggagcaauugaguucaguaucuucauuugagagguucgaaauauuccccaaagaaagcucauggcccaaccacaccguaaccggagugucagcaucaugcucccauaauggggaaagcaguuuuuacagaaauuugcuauggcugacggggaagaaugguuuguacccaaaccugagcaaguccuaugcaaacaacaaagaaaaagaaguccuuguacuaugggguguucaucaaccgccaaacauaggugaccaaaaggcccucuaucauacagaaaaugcuuauguuucuguagugucuucacauuauagcagaaaauucaccccagaaauagccaaaagacccaaaguaagagaucaagaaggaagaaucaacuacuacuggacucugcuugaacccggggauacaauaauauuugaggcaaauggaaaucuaauagcgccaagauaugcuuucgcacugaguagaggcuuuggaucaggaaucaucaacucaaaugcaccaauggauaaaugugaugcgaagugccaaacaccucagggagcuauaaacagcagucuuccuuuccagaacguacacccagucacaauaggagaguguccaaaguaugucaggagugcaaaauuaaggaugguuacaggacuaaggaacaucccauccauucaauccagagguuuguuuggagccauugccgguuucauugaagggggguggacuggaaugguagaugguugguaugguuaucaucaucagaaugagcaaggaucuggcuaugcugcagaucaaaaaagcacacaaaaugccauuaaugggauuacaaacaaggugaauucuguaauugagaaaaugaacacucaauucacagcagugggcaaagaauucaacaaauuggaaagaaggauggaaaacuugaauaaaaaaguugaugauggguuuauagacauuuggacauauaaugcagaacuguugguucuacuggaaaaugaaaggacuuuggauuuccaugacuccaaugugaagaaucuguaugagaaaguaaaaagccaguuaaagaauaaugcuaaagaaauaggaaauggguguuuugaauucuaucacaaguguaacgaugaaugcauggagaguguaaagaauggaacuuaugacuauccaaaauauuccgaagaaucaaaguuaaacagggagaaaauugauggagugaaauuggaaucaaugggagucuaucagauucuggcgaucuacucaacagucgccaguucucugguucuuuuggucucccugggggcaaucagcuucuggauguguuccaaugggucuuugcaguguagaauaugcaucuaa

SEQ ID NO: 40061 - RNA, 1698 nt, Artificial Sequence
  derived and/or modified CDS sequence (wt) from hemagglutinin__InfluenzaA__AEX35120
augaaaguaaaacuacugguccuguuaugcacauuuacagcuacauaugcagacacaauauguauaggcuaccaugcuaacaacucgaccgacacuguugacacaguacuugaaaagaaugugacagugacacacucugucaaccugcuugagaacagucacaauggaaaacuaugucuauuaaaaggaauagccccacuacaauuggguaacugcagcguugccggguggaucuuaggaaacccagaaugcgaauuacugauuuccaaggagucaugguccuacauuguagaaaaaccaaauccugagaauggaacauguuacccagggcauuucgcugacuaugaggaacugagggagcaauugaguucaguaucuucauuugagagguucgaaauauuccccaaagaaagcucauggcccaaccauaccguaaccggagugucagcaucaugcucccauaauggggaaagcaguuuuuacagaaauuugcuauggcugacggggaagaaugguuuguacccaaaccugagcaaguccuaugcaaacaacaaagaaaaagaaguccuugugcuaugggguguucaucacccgccaaacauaggugaccaaaaggcccucuaucauacagaaaaugcuuauguuucuguagugucuucacauuauagcagaaaauucaccccagaaauagccaaaagacccaaaguaagagaucgagaaggaagaaucaacuacuacuggacucugcuugaaccuggggauacaauaauauuugaggcaaauggaaaucuaauagcgccaagauaugcuuucgcacugaguagaggcuuuggaucaggaaucaucaacucaaaugcaccaauggauaaaugugaugcgaagugccaaacaccucagggagcuauaaacagcagucuuccuuuccagaacguacacccagucacaauaggagaguguccaaaguaugucaggagugcaaaauuaaggaugguuacaggacuaaggaacaucccauccauucaauccagagguuuguuuggagccauugccgguuucauugaagggggguggacuggaaugguagaugguugguaugguuaucaucaucagaaugagcaaggaucuggcuaugcugcagaucaaaaaagcacacaaaaugccauuaaugggauuacaaacaaggugaauucuguaauugagaaaaugaacacucaauucacagcagugggcaaagaauucaacaaauuggaaagaaggauggaaaacuugaauaaaaaaguugaugauggguuuauagacauuuggacauauaaugcagaacuguugguucuacuggaaaaugaaaggacuuuggauuuccaugacuccaaugugaagaaucuguaugagaaaguaaaaagccaguuaaagaauaaugcuaaagaaauaggaaauggguguuuugaauucuaucacaaguguaaugaugaaugcauggagaguguaaagaauggaacuuaugacuauccaaaauauuccgaagaaucaaaguuaaacagggagaaaauugauggagugaaauuggaaucaaugggagucuaucagauucuggcgaucuacucaacagucgccaguucucugguucuuuuggucucccugggggcaaucagcuucuggauguguuccaaugggucuuugcaguguagaauaugcaucuaa

SEQ ID NO: 40062 - RNA, 1698 nt, Artificial Sequence
  derived and/or modified CDS sequence (wt) from hemagglutinin__InfluenzaA__AEX35131
augaaaguaaaacuacugguccuguuaugcacauuuacagcuacauaugcagacacaauauguauaggcuaccaugcuaacaacucgaccgacacuguugacacaguacuugaaaagaaugugacagugacacacucugucaaccugcuugagaacagucacaauggaaaacuaugucuauuaaaaggaauagccccacuacaauuggguaacugcagcguugccggguggaucuuaggaaacccagaaugcgaauuacugauuuccaaggagucaugguccuacauuguagaaaaaccaaauccugagaauggaacauguuacccagggcauuucgcugacuaugaggaacugagggagcaauugaguucaguaucuucauuugagagguucgaaauauuccccaaagaaagcucauggcccaaccacaccguaaccggagugucagcaucaugcucccauaauggggaaagcaguuuuuacagaaauuugcuauggcugacggggaagaaugguuuguacccaaaccugagcaaguccuaugcaaacaacaaagaaaaagaaguccuuguacuaugggguguucaucacccgccaaacauagguaaccaaaaggcccucuaucauacagaaaaugcuuauguuucuguagugucuucacauuauagcagaaaauucaccccagaaauagccaaaagacccaaaguaagagaucaagaaggaagaaucaacuacuacuggacucugcuugaacccggggauacaauaauauuugaggcaaauggaaaucuaauagcgccaagauaugcuuucgcacugaguagaggcuuuggaucaggaaucaucaacucaaaugcaccaauggauaaaugugaugcgaagugccaaacaccucagggagcuauaaacagcagucuuccuuuccagaacguacacccagucacaauaggagaguguccaaaguaugucaggagugcaaaauuaaggaugguuacaggacuaaggaacaucccauccauucaauccagagguuuguuuggagccauugccgguuucauugaagggggguggacuggaaugguagaugguugguaugguuaucaucaucagaaugagcaaggaucuggcuaugcugcagaucaaaaaagcacacaaaaugccauuaaugggauuacaaacaaggugaauucuguaauugagaaaaugaacacucaauucacagcagugggcaaagaauucaacaaauuggaaagaaggauggaaaacuugaauaaaaaaguugaugauggguuuauagacauuuggacauauaaugcagaacuguugguucuacuggaaaaugaaaggacuuuggauuuccaugacuccaaugugaagaaucuguaugagaaaguaaaaagccaguuaaagaauaaugcuaaagaaauaggaaauggguguuuugaauucuaucacaaguguaacgaugaaugcauggagaguguaaagaauggaacuuaugacuauccaaaauauuccgaagaaucaaaguuaaacagggagaaaauugauggagugaaauuggaaucaaugggagucuaucagauucuggcgaucuacucaacagucgccaguucucugguucuuuuggucucccugggggcaaucagcuucuggauguguuccaaugggucuuugcaguguagaauaugcaucuaa

SEQ ID NO: 40063 - RNA, 1698 nt, Artificial Sequence; identical to SEQ ID NO: 40062
  derived and/or modified CDS sequence (wt) from hemagglutinin__InfluenzaA__AEX35142

SEQ ID NO: 40064 - RNA, 1698 nt, Artificial Sequence
  derived and/or modified CDS sequence (wt) from hemagglutinin__InfluenzaA__AEX35153
augaaaguaaaacuacugguccuauuaugcacauuuacagcuacauaugcagacacaauauguaucggcuaccaugccaacaacucaaccgacacuguugacacaguacuugaaaagaaugugacagugacacacucugucaaccugcuugaggacaaccacaauggaaaacuaugucuauuaaaaggaauagccccauuacaauuggguaacugcagcguugccggguggaucuuaggaaacccagaaugcgaauuacugauuuccaaggagucaugguccuacauuguagaaaaaccaaauccugagaauggaacauguuacccagggcauuucgccgacuaugaggaacugagggagcaauugaguucaguaucuucauuugagagguucgaaauauuccccaaagaaagcucauggcccaaccacaccguaaccggaguauccgcaucaugcucccauaauggggaaagcagcuuuuacaaaaauuugcuauggcugacgggaaagaaugguuuguacccaaaccugagcaaguccuaugcaaacaacaaggagaaagaaguccucguacuaugggguguucaucacccgccaaacauagguaaccaaaugacccucuaccauaaagaaaaugcuuaugucucuguagugucuucacauuauagcagaaaauucaccccagaaauagccaaaagacccaaggugagagaucaagaagggagaaucaacuacuacuggacucugcuugaacccggggauacaauaauauuugaggcaaguggaaaucuaauagcgccaagauaugcuuucgcacugaguagaggcuuuggaucaggaaucaucaacucaaaugcaccaauggaugaaugugaugcgaagugccaaacaccucagggagcuauaaacagcaaucuuccuuuccagaauguacacccagucacaauaggagaauguccaaaguaugucagaagugcaaaauuaaggaugguuacuggacuaaggaacaucccauccauucaauccagagguuuguuuggagccauugcugguuucauugaagggggguggacuggaaugguagaugguugguaugguuaucaucaccagaaugagcaaggaucuggcuaugcugcagaucaaaaaagcacacaaaaugccauuaaugggaucacaaacaaggugaauucuguaauugagaagaugaacacucaauucacagcugugggcaaagaauucaacaaauuggaaagaaggauggaaaacuuaaauaaaaaaguugaugacggguuuauagacguuuggacauauaaugcagaacuguugguucuacuggaaaaugagagaacuuuggauuuccaugacuccaaugugaagaguuuguaugagaaaguaaaaaaccaauuaaaaaauaaugccaaagaaauaggaaauggguguuuugaauuuuaucacaaguguaacgaugaaugcauggagaguguaaaaaauggaacuuaugacuauccaaaauauuccgaagaaucaaaguuaagcagggagaaaauugauggagugaaauuggaaucaaugggagucuaucagauucuggcgaucuacucaacagucgccaguucucugguucuuuuggucucccugggggcaaucagcuucuggauguguuccaaugggucuuugcaguguagaauaugcaucuaa

SEQ ID NO: 40065 - RNA, 1698 nt, Artificial Sequence
  derived and/or modified CDS sequence (wt) from hemagglutinin__InfluenzaA__AEX35164
augaaaguaaaacuacugguccuguuaugcgcauuuacagcuacauaugcagacacaauauguauaggcuaccaugcuaacaacucgaccgacacuguugacacaguacuugaaaagaaugugacagugacacacucugucaaccugcuugagaacagucacaauggaaaacuaugucuauuaaaaggaauagccccacuacaauuggguaacugcagcguugccggguggaucuuaggaaacccagaaugcgaauuacugauuuccaaggagucaugguccuacauuguagaaaaaccaaauccugagaauggaacauguuacccagggcauuucgcugacuaugaggaacugagggagcaauugaguucaguaucuucauuugagagguucgaaauauuccccaaagaaagcucauggcccaaccacaccguaaccggagugucagcaucaugcucccauaauggggaaagcaguuuuuacagaaauuugcuauggcugacggggaagaaugguuuguacccaaaccugagcaaguccuaugcaaacaacaaagaaaaagaaguccuuguacuaugggguguucaucacccgccaaacauagguguccaaaaggcccucuaucauacagaaaaugcuuauguuucuguagugucuucacauuauagcagaaaauucaccccagaaauagccaaaagacccaaaguaagagaucaagaaggaagaaucaacuacuacuggacucugcuugaacccggggauacaauaauauuugaggcaaauggaaaucuaauagcgccaagauaugcuuucgcacugaguagaggcuuuggaucaggaaucaucaacucaaaugcaccaauggauaaaugugaugcgaagugccaaacaccucagggagcuauaaacagcagucuuccuuuccagaacguacacccagucacaauaggagaguguccaaaguaugucaggagugcaaaauuaaggaugguuacaggacuaaggaacaucccauccauucaauccagagguuuguuuggagccauugccgguuucauugaagggggguggacuggaaugguagaugguugguaugguuaucaucaucagaaugagcaaggaucuggcuaugcugcagaucaaaaaagcacacaaaaugccauuaaugggauuacaaacaaggugaauucuguaauugagaaaaugaacacucaauucacagcggugggcaaagaauucaacaaauuggaaagaaggauggaaaacuugaauaaaaaaguugaugauggguuuauagacauuuggacauauaaugcagaacuguugguucuacuggaaaaugaaaggacuuuggauuuccaugacuccaaugugaagaaucuguaugagaaaguaaaaagccaguuaaagaauaaugcuaaagaaauaggaaauggguguuuugaauucuaucacaaguguaacgaugaaugcauggagaguguaaagaauggaacuuaugacuauccaaaauauuccgaagaaucaaaguuaaacagggagaaaauugauggagugaaguuggaaucaaugggagucuaucagauucuggcgaucuacucaacagucgccaguucucugguucuuuuggucucccugggggcaaucagcuucuggauguguuccaaugggucuuugcaguguagaauaugcaucuaa

SEQ ID NO: 40066 - RNA, 1698 nt, Artificial Sequence
  derived and/or modified CDS sequence (wt) from hemagglutinin__InfluenzaA__AEX35175
augaaaguaaaacuacugguucuguuauguacauuuacagcuacauaugcagacacaauauguauaggcuaccaugccaacaacucaaccgacacuguugacacaguacuugagaagaaugugacagugacacacucugucgaccuacuugaggacagucacaauggaaaacuaugucuacuaaaaggaauagccccacuacaauuggguaauugcagcguugccggauggaucuuaggaaacccagaaugcgaauuacugauuuccaaggaaucaugguccuacauuguagaaacaccaaauccugagaauggaacauguuacccaggguauuucgccgacuaugaggaacugagggagcaauugaguucaguaucuucauuugagagguucgaaauauuccccaaagagagcucauggcccaaccacaccguaaccggaguaacagcaucaugcucccauaacgggaaaagcaguuuuuacagaaauuugcuauggcugacggggaagaaugguuuguacccaaaccugagcaaguccuaugcaaacaacaaagagaaagaaguccuuguacuaugggguguucaucacccgccuaacauaggggaccaaagggcccucuaucauacagaaaaugcuuaugucucuguagugucuucacauuauagcagaagauucaccccagaaauagccaaaagacccaaggugagagaucaggaaggaagaaucaacuacuacuggacucugcuggaacccggggauacaauaauauucgaggcaaauggaaaucuaauagcaccaagguuugcuuucgcacugaauagaggcuuuggaucaggaaucaucaccucaaaugcaccaauggauggaugugaugcgaagugucaaacaccucaaggagcuauaaacagcagccuuccuuuccagaauguacacccugucacaauaggagaguguccaaaguaugucaggagugcaaaauuaaggauggcuacaggacuaaggaacaucccauccauucaauccagagguuuguuuggagccauugccgguuucauugaagggggguggacuggaaugguagaugguugguaugguuaucaucaucagaaugagcaaggaucuggguaugcugcagaucaaaaaagcacacaaaaugccauuaacgggauuacaaacaaggugaauucuguaauugagaaaaugaacacucaauucacagcugugggcaaagaauucagcaaauuggagagaaggauggaaaacuuaaauaagaaaguugaugauggguuucuagacauuuggacauauaaugcagaauuguugguucuacuggaaaaugaaaggacuuuggauuuccaugacuccaacgugaagaaccuguaugagaaagugaaaagccaauuaaagaauaaugccaaagaaauaggaaacgggugcuuugaauucuaucacaaguguaacgaugaaugcauggagagugugaaaaauggaacuuaugacuauccaaaauauuccgaagaaucaaaguuaaacagggagaaaauugauggagugaaauuggaaucaaugggagucuaucagauucuggcgaucuacucaacagucgccaguucccugguucuuuuggucucccugggggcaaucagcuucuggauguguuccaaugggucuuugcaguguagaauaugcaucuaa

SEQ ID NO: 40067 - RNA, 1698 nt, Artificial Sequence
  derived and/or modified CDS sequence (wt) from hemagglutinin__InfluenzaA__AEX35186
augaaaguaaaacuacugguucuguuaugcacauuuacagcuacauaugcagacacaauauguauaggcuaccaugccaacaacucaaccgacacuguugacacaguacuugagaagaaugugacagugacacacucugucaaccugcuugaggacagucacaauggaaaauuaugucuauuaaaaggaauagccccacuacaauuggguaauugcagcguugccggauggaucuuaggaaacccagaaugcgaauuacugauuuccagggaaucaugguccuacauuguagaaaaaccaaauccugagaauggaacauguuacccagggcauuucgccgacuaugaggaacugagggagcaauugaguucaguaucuucauuugagagauucgaaauauuccccaaagaaagcucauggcccaaccacaccacaaccggaguaucagcaucaugcucccauaauggggaaagcaguuuuuacaaaaauuugcuauggcugacggggaagaaugguuuguacccaaaccugagcaaguccuaugcaaacaacaaagagaaagaaguccuuguacuaugggguguucaucacccgccuaacauagguaaccaaagggcccucuaucauacagaaaaugcuuaugucucuguagugucuucacauuauagcagaaaauucaccccagaaauagccaaaagacccaaaguaagagaucaagaaggaagaaucaacuacuacuggacucuacuugaacccggggauacaauaauauuugaggcaaauggaaaucuaauagcgccaagauaugcuuucgcacugaguagaggcuuuggaucaggaaucaucaacucaaaugcaccaauggaugaaugugaugcgaagugccaaacaccucagggagcuauaaacagcagucuuccuuuccagaauguacacccagucacaauaggagaguguccaaaguaugucaggagugcaaaauuaaggaugguuacaggacuaaggaacaucccauccauucaauccagagguuuguuuggagccauugccgguuucauugaaggaggguggacuggaaugguagaugguugguaugguuaucaucaucagaaugagcaaggaucuggcuaugcugcagaucaaaaaagcacacaaaaugccauuaaugggauuacaaacaaggugaauucuguaauugagaaaaugaacacucaauucacagcugugggcaaagaauucaacaaauuggaaagaaggauggaaaacuuaaauaaaaaaguugaugauggguuuauagacauuuggacauauaaugcagaauuguugguucuacuggaaaaugaaaggacuuuggauuuccaugacuccaaugugaagaaucuguaugagaaaguaaaaagccaauuaaagaauaaugccaaagaaauaggaaauggguguuuugaauucuaucacaaguguaacgaugaaugcauggagaguguaaaaaauggaacuuaugacuauccaaaauauuccgaagaaucaaaguuaaacagggagaaaauugauggagugaaauuggaaucaaugggagucuaucagauucuggcgaucuacucaacagucgccaguucucugguucuuuuggucucccugggggcaaucagcuucuggauguguuccaaugggucuuugcaguguagaauaugcaucuaa

SEQ ID NO: 40068 - RNA, 1698 nt, Artificial Sequence; identical to SEQ ID NO: 40067
  derived and/or modified CDS sequence (wt) from hemagglutinin__InfluenzaA__AEX35197

SEQ ID NO: 40069 - RNA, 1698 nt, Artificial Sequence
  derived and/or modified CDS sequence (wt) from hemagglutinin__InfluenzaA__AEX35208
augaaaguaaaacuacugguccuguuaugcacauuuacagcuacauaugcagacacaauauguauaggcuaccaugcuaacaacucgaccgacacuguugacacaguacuugaaaagaaugugacagugacacacucugucaaccugcuugagaacagucacaauggaaaacuaugucuauuaaaaggaauagccccacuacaauuggguaacugcagcguugccggguggaucuuaggaaacccagaaugcgaauuacugauuuccaaggagucaugguccuacauuguagaaaaaccaaauccugagaauggaacauguuacccagggcauuucgcugacuaugaggaacugagggagcaauugaguucaguaucuucauuugagagguucgaaauauuccccaaagaaagcucauggcccaaccacaccguaaccggagugucagcaucaugcucccauaauggggaaagcaguuuuuacagaaauuugcuauggcugacggggaagaaugguuuguacccaaaccugagcaaguccuaugcaaacaacaaagaaaaagaaguccuuguacuaugggguguucaucacccgccaaacauaggugaccaaaaggcccucuaucauacagaaaaugcuuauguuucuguagugucuucacauuauagcagaaaauucaccccagaaauagccaaaagacccaaaguaagagaucaagaaggaagaaucaacuacuacuggacucugcuugaacccggggauacaauaauauuugaggcaaauggaaaucuaauagcgccaagauaugcuuucgcacugaguagaggcuuuggaucaggaaucaucaacucaaaugcaccaauggauaaaugugaugcgaagugccaaacaccucagggagcuauaaacagcagucuuccuuuccagaacguacacccagucacaauaggagaguguccaaaguaugucaggagugcaaaauuaaggaugguuacaggacuaaggaacaucccauccauucaauccagagguuuguuuggagccauugccgguuucauugaagggggguggacuggaaugguagaugguugguaugguuaucaucaucagaaugagcaaggaucuggcuaugcugcagaucaaaaaagcacacaaaaugccauuaaugggauuacaaacaaggugaauucuguaauugagaaaaugaacacucaauucacagcagugggcaaagaauucaacaaauuggaaagaaggauggaaaacuugaauaaaaaaguugaugauggguuuauagacauuuggacauauaaugcagaacuguugguucuauuggaaaaugaaaggacuuuggauuuccaugacuccaaugugaagaaucuguaugagaaaguaaaaagccaguuaaagaauaaugcuaaagaaauaggaaauggguguuuugaauucuaucacaaguguaacgaugaaugcauggagaguguaaagaauggaacuuaugacuauccaaaauauuccgaagaaucaaaguuaaacagggagaaaauugauggagugaaauuggaaucaaugggagucuaucagauucuggcgaucuacucaacagucgccaguucucugguucuuuuggucucccugggggcaaucagcuucuggauguguuccaaugggucuuugcaguguagaauaugcaucuaa

SEQ ID NO: 40070 - RNA, 1701 nt, Artificial Sequence
  derived and/or modified CDS sequence (wt) from hemagglutinin__InfluenzaA__AEX35219
augaagacuaucauugcuuugagcuacauuuuaugucugguuuucgcucaaaaacuucccggaaaugacaacagcacggcaacgcugugccuggggcaucaugcaguaccaaacggaacgcuagugaaaacaaucacgaaugaccaaauugaagugacuaaugcuacugagcugguucagaguuccucaacagguggaauaugcgacaguccucaccaaauccuugauggagaaaacugcacacuaauagaugcucuauugggagacccucauugugauggcuuccaaaauaaggaaugggaccuuuuuguugaacgcagcaaagccuacaguaacuguuacccuuaugaugugccggauuaugccucccuuaggucacuaguugccucauccggcacacuggaguuuaacaaugaaagcuucaauuggacuggagucgcucagaauggaacaagcucugcuugcaaaaggagaucuaauaaaaguuucuuuaguagauugaauugguugcaccaauuaaaauacaaauacccagcacugaacgugacuaugccaaacaaugaaaaauuugacaaauuguacauuugggggguucaccacccgaguacggacagugaccaaaucagccuauaugcucaagcaucagggagagucacagucucuaccaaaagaagccaacaaacuguaaucccgaauaucggaucuagacccuggguaagggaugucuccagcagaauaagcaucuauuggacaauaguaaaaccgggagacauacuuuugauuaacagcacagggaaucuaauugcuccucgggguuacuucaaaauacgaagugggaaaagcucaauaaugagaucagaugcacccauuggcaaaugcaauucugaaugcaucacuccaaauggaagcauucccaaugacaaaccauuucagaauguaaacaggaucacauauggggccugucccagguauguuaagcaaaacacucugaaauuggcaacagggaugcggaauguaccagagaaacaaacuagaggcauauucggcgcaaucgcggguuucauagaaaaugguugggagggaaugguggacgguugguacgguuucaggcaucaaaauucugagggcacaggacaagcagcagaucuuaagagcacucaagcagcaaucaaccaaaucaacgggaaacugaauagguuaaucgggaaaacgaacgagaaauuccaucagauugaaaaagaauucucagaaguagaagggagaauucaggaccucgagaaauauguugaggacacuaaaauagaucucuggucguacaacgcggagcuucuuguugcccuggagaaccaacauacaauugaucuaacugacucagaaaugaacaaacuguuugaaagaacaaagaagcaacugagggagaaugcugaggauaugggcaaugguuguuucaaaauauaccacaaaugugacaaugccugcauagggucaaucagaaauggaacuuaugaccaugauguauacagagacgaagcauugaacaaccgguuccagaucaaagguguugagcugaagucaggauacaaagauuggauccuauggauuuccuuugccaugucauguuuuuugcuuuguguuguuuugcugggguucaucaugugggccugccaaaaaggcaacauuaggugcaacauuugcauuuga

SEQ ID NO: 40071 - RNA, 1698 nt, Artificial Sequence; identical to SEQ ID NO: 40012
  derived and/or modified CDS sequence (wt) from hemagglutinin__InfluenzaA__AEX35230

SEQ ID NO: 40072 - RNA, 1701 nt, Artificial Sequence
  derived and/or modified CDS sequence (wt) from hemagglutinin__InfluenzaA__AEX35241
augaagacuaucauugcuuugagcuacauucuaugucugguuuucgcucaaaaacuucccggaaaugacaacagcacggcaacgcugugccuugggcaccaugcaguaccaaacggaacgauagugaaaacaaucacgaaugaccaaauugaaguuacuaaugcuacugagcugguucagaguuccucaacagguggaauaugcgacaguccucaucagauccuugauggagaaaacugcacacuaauagaugcucuauugggagacccucagugugauggcuuccaaaauaagaaaugggaucuuuuuguugaacgcagcaaagccuacagcaacuguuacccuuaugaugugccggauuaugccucccuuaggucacuaguugccucauccggcacacuggaguuuaacaaugaaagcuucaauuggacuggagucacucagaauggaacaagcucugcuugcaaaaggagaucuaauaaaaguuucuuuaguagauugaauugguugacccauuuaaaauacaaauacccagcauugaacgugacuaugccaaacaaugaaaaauuugacaaauuguacauuugggggguucaccacccggguacggacagugaccaaaucagccuauaugcucaagcaucaggaagaaucacagucucuaccaaaagaagccaacaaacuguaaucccgaauaucggaucuagacccaggguaagggaugucuccagcagaauaagcaucuauuggacaauaguaaaaccgggagacauacuuuugauuaacagcacagggaaucuaauugcuccucgggguuacuucaaaauacgaagugggaaaagcucaauaaugagaucagaugcacccauuggcaaaugcaauucugaaugcaucacuccaaauggaagcauucccaaugacaaaccauuucaaaauguaaacaggaucacauauggggccugucccagauauguuaagcaaaacacucugaaauuggcaacagggaugcgaaauguaccagagaaacaaacuagaggcauauuuggcgcaaucgcggguuucauagaaaaugguugggagggaaugguggacgguugguacgguuucaggcaucaaaauucugagggcacaggacaagcagcagaucucaaaagcacucaagcagcaaucaaccaaaucaaugggaaacugaauagguuaaucgggaaaacaaacgagaaauuccaucagauugaaaaagaauucucagaaguagaagggagaauucaggaccucgagaaauauguugaggacacuaaaauagaucucuggucauacaacgcggagcuucuuguugcccuggagaaccaacauacaauugaucuaacugacucagaaaugaacaaacuguuugaaaggacaaagaagcaacuuagggaaaaugcugaggauaugggcaaugguuguuucaaaauauaccacaaaugugacaaugccugcauagggucaaucagaaauggaacuuaugaccaugauguauacagagaugaagcauuaaacaaccgguuccagaucaaagguguugagcugaagucaggauacaaagauuggauccuauggauuuccuuugccauaucauguuuuuugcuuuguguugcuuuguugggguucaucaugugggccugccaaaaaggcaacauuaggugcaacauuugcauuuga

SEQ ID NO: 40073 - RNA, 1698 nt, Artificial Sequence; identical to SEQ ID NO: 40012
  derived and/or modified CDS sequence (wt) from hemagglutinin__InfluenzaA__AEX35263

SEQ ID NO: 40074 - RNA, 1698 nt, Artificial Sequence; identical to SEQ ID NO: 40012
  derived and/or modified CDS sequence (wt) from hemagglutinin__InfluenzaA__AEX35274

SEQ ID NO: 40075 - RNA, 1701 nt, Artificial Sequence; identical to SEQ ID NO: 39964
  derived and/or modified CDS sequence (wt) from hemagglutinin__InfluenzaA__AEX35285

SEQ ID NO: 40076 - RNA, 1701 nt, Artificial Sequence
  derived and/or modified CDS sequence (wt) from hemagglutinin__InfluenzaA__AEX35296
augaagacuaucauugcuuugagcuacauucuaugucugguuuucgcucaaaaacuucccggaaaugacaacagcacggcaacgcugugccuugggcaccaugcaguaccaaacggaacaauagugaaaacaaucacgaaugaccaaauugaaguuacuaaugcuacugagcugguucagaguuccucaacagguggaauaugcgacaguccucaucagauccuugauggagaaaacugcacacuaauagaugcucuauugggagacccucagugugauggcuuccaaaauaagaaaugggaccuuuuuguugaacgcagcaaagccuacagcaacuguuacccuuaugaugugccggauuaugccucccuuaggucacuaguugccucauccggcacacuggaguuuaacaaugaaagcuucaauuggacuggagucacucaaaauggaacaagcucugccugcaaaaggagaucuaauaaaaguuucuuuaguagauugaauugguugacccacuuaaaauucaaauacccagcauugaacgugacuaugccaaacaaugaaaaauuugacaaauuguacauuugggggguucaccacccggguacggacaaugaccaaaucagccuauaugcucaagcaucaggaagaaucacagucucuaccaaaagaagccaacaaacuguaaucccgaauaucggaucuagacccaggguaagggauauccccagcagaauaagcaucuauuggacaauaguaaaaccgggagacauacuuuugauuaacagcacagggaaucuaauugcuccucgggguuacuucaaaauacgaagugggaaaagcucaauaaugagaucagaugcacccauuggcaaaugcaauucugaaugcaucacuccaaauggaagcauucccaaugacaaaccauuucaaaauguaaacaggaucacauauggggccugucccagauauguuaagcaaaacacucugaaauuggcaacagggaugcgaaacguaccagagaaacaaacuagaggcauauuuggcgcaaucgcggguuucauagaaaaugguugggagggaaugguggacgguugguacgguuucaggcaucaaaauucugagggaacaggacaagcagcagaucucaaaagcacucaagcagcaaucaaccaaaucaaugggaagcugaauagguugaucgggaaaacaaacgagaaauuccaucagauugaaaaagaauucucagaaguagaagggagaauucaggaccucgagaaauauguugaggacacuaaaauagaucucuggucauacaacgcggagcuucuuguugcccuggagaaccaacauacaauugaucuaacugacucagaaaugaacaaacuguuugaaagaacaaagaagcaacugagggaaaaugcugaggauaugggcaaugguuguuucaaaauauaccacaaaugugacaaugccugcauagggucaaucagaaauggaacuuaugaccaugauguauacagagaugaagcauuaaacaaccgguuccagaucaaagguguugagcugaagucaggauacaaagauuggauccuauggauuuccuuugccauaucauguuuuuugcuuuguguugcuuuguugggguucaucaugugggccugccaaaaaggcaacauuaggugcaacauuugcauuuga

SEQ ID NO: 40077 - RNA, 1701 nt, Artificial Sequence
  derived and/or modified CDS sequence (wt) from hemagglutinin__InfluenzaA__AEX35307
augaagacuaucauugcuuugagcuacauucuaugucugguuuucgcucaaaaaauucccggaaaugacaacagcacggcaacgcugugccuugggcaccaugcaguaccaaacggaacgauagugaaaacaaucacgaaugaccaaauugaaguuacuaaugcuacugagcugguucagaguuccucaacagguggaauaugcgacaguccucaucagauccuugauggagaaaacugcacacuaauagaugcucuauugggagacccucagugugauggcuuccaaaauaagaaaugggaccuuuuuguugaacgcagcaaagccuacagcaacuguuacccuuaugaugugccggauuaugccucccuuagaucacuaguugccucaucuggcacacuggaguuuaacaaugaaagcuucaauuggacuggagucacucagaauggaacaagcucugcuugcaaaaggagaucuaauaaaaguuucuuuaguagauugaauugguugacccauuuaaaauacaaauacccagcauugaacgugacuaugccaaacaaugaaaaauuugacaaauuguacauuugggggguucaccacccggguacggacagugaucaaaucagccuauaugcucaagcaucaggaagaaucacagucucuaccaaaagaagccaacaaacuguaaucccgaauaucggaucuagacccaggguaagggaugucuccagcagaauaagcaucuauuggacaauaguaaaaccgggagacauacuuuugauuaacagcacagggaaucuaauugcuccucgggguuacuucaaaauacgaagugggaaaagcucaauaaugagaucagaugcacccauuggcaaaugcaauucugaaugcaucacuccaaauggaagcauucccaaugacaaaccauuucaaaauguaaacaggaucacauauggggccugucccagauauguuaagcaaaacacucugaaauuggcaacagggaugcgaaauguaccagagaaacaaacuagaggcauauuuggcgcaaucgcggguuucauagaaaaugguugggagggaaugguggacgguugguacgguuucaggcaucaaaauucugagggcacaggacaagcagcagaucucaaaagcacucaagcagcaaucaaccaaaucaaugggaaacugaauagguuaaucgggaaaacaaacgagaaauuccaucagauugaaaaagaauucucagaaguagaagggagaauucaggaucucgagaaauauguugaggacacuaaaauagaucucuggucauacaacgcggagcuucuuguugcccuggagaaccaacauacaauugaucuaacugacucagaaaugaacaaacuguuugaaaggacaaagaagcaacugagggaaaaugcugaggauaugggcaaugguuguuucaaaauauaccacaaaugugacaaugccuguauagggucaaucagaaauggaacuuaugaccaugauguauacagagaugaagcauuaaacaaccgguuccagaucaaagguguugagcugaagucaggauacaaagauuggauccuauggauuuccuuugccauaucauguuuuuugcuuuguguuguuuuguugggguucaucaugugggccugccaaaaaggcaacauuaggugcaacauuugcauuuga

SEQ ID NO: 40078 - RNA, 1701 nt, Artificial Sequence; identical to SEQ ID NO: 40076
  derived and/or modified CDS sequence (wt) from hemagglutinin__InfluenzaA__AEX35318

SEQ ID NO: 40079 - RNA, 1701 nt, Artificial Sequence
  derived and/or modified CDS sequence (wt) from hemagglutinin__InfluenzaA__AEX35329
augaagacuaucauugcuuugagcuacuuucuaugucugguuuucgcucaaaaacuucccggaaaugacaacagcacggcaacgcugugccuugggcaccaugcaguaccaaacggaacgauagugaaaacaaucacgaaugaccaaauugaaguuacuaaugcuacugagcugguucagaauuccucaacagguggaauaugcgacaguccucaucagauccuugauggagaaaacugcacacuaauagaugcucuauugggagacccucagugugauggcuuccaaaauaagaaaugggaccuuuuuguugaacgcagcaaagccuacagcaacuguuacccuuaugaugugccggauuaugccucccuuaggucacuaguugccucauccggcacacuggaguuuaacaaugaaagcuucaauuggacuggagucacucagaauggaacaagcucugcuugcaaaaggagaucuaauaaaaguuucuuuaguagauugaauugguugacccauuuaaaauacaaauacccagcauugaacgugacuaugccaaacaaugaaaaauuugacaaauuguacauuugggggguucaccacccggguacggacagugaccaaaucagccuauaugcucaagcaucaggaagaaucacagucucuaccaaaagaagccaacaaacuguaaucccgaauaucggaucuagacccaggguaagggaugucuccagcagaauaagcaucuauuggacaauaguaaaaccgggagacauacuuuugauuaacagcacagggaaucuaauugcuccucgggguuacuucaaaauacgaagugggaaaagcucaauaaugagaucagaugcacccauuggcaaaugcaauucugaaugcaucacuccaaauggaagcauucccaaugacaaaccauuucaaaauguaaacaggaucacauauggggccugucccagauauguuaagcaaaacacucuaaaauuggcaacagggaugcgaaauguaccagagaaacaaacuagaggcauauuuggcgcaaucgcggguuucauagaaaaugguugggagggaaugguggacgguugguacgguuucaggcaucaaaauucugagggcacaggacaagcagcagaucucaaaagcacucaagcagcaaucaaccaaaucaaugggaaacugaauagguuaaucgggaaaacaaacgagaaauuccaucagauugaaaaagaauucucagaaguagaagggagaauucaggaccucgagaaauauguugaggacacuaaaauagaucucuggucauacaacgcggagcuucuuguugcccuggagaaccaacauacaauugaucuaacugacucagaaaugaacaaacuguuugaaaggacaaagaagcaacugagggaaaaugcugaggauaugggcaaugguuguuucaaaauauaccacaaaugugacaaugccugcauagggucaaucagaaauggaacuuaugaccaugauguauacagagaugaagcauuaaacaaccgguuccagaucaaagguguugagcugaagucaggauacaaagauuggauccuauggauuuccuuugccauaucauguuuuuugcuuuguguugcuuuguugggguucaucaugugggccugccaaaaaggcaacauuaggugcaacauuugcauuuga

SEQ ID NO: 40080 - RNA, 1701 nt, Artificial Sequence
  derived and/or modified CDS sequence (wt) from hemagglutinin__InfluenzaA__AEX35340
augaagacuaucauugcuuugagcuacauucuaugucugguuuucgcucaaaaacuucccggaaaugacaacagcacggcaacgcugugccuugggcaccaugcaguaccaaacggaacgauagugaaaacaaucacgaaugaccaaauugaaguuacuaaugcuacugagcugguucagaauuccucaacagguggaauaugcgacaguccucaucagauccuugauggagaaaacugcacacuaauagaugcucuauugggagacccucagugugauggcuuccaaaauaagaaaugggaccuuuuuguugaacgcagcaaagccuacagcaacuguuacccuuaugaugugccggauuaugccucccuuaggucacuaguugccucauccggcacacuggaguuuaacaaugaaagcuucaauuggacuggagucacucagaauggaacaagcucugcuugcaaaaggagaucuaauaaaaguuucuuuaguagauugaauugguugacccauuuaaaauacaaauacccagcauugaacgugacuaugccaaacaaugaaaaauuugacaaauuguacauuugggggguucaccacccggguacggacagugaccaaaucagccuauaugcucaagcaucaggaagaaucacagucucuaccaaaagaagccaacaaacuguaaucccgaauaucggaucuagacccaggguaagggaugucuccagcagaauaagcaucuauuggacaauaguaaaaccgggagacauacuuuugauuaacagcacagggaaucuaauugcuccucgggguuacuucaaaauacgaagugggaaaagcucaauaaugagaucagaugcacccauuggcaaaugcaauucugaaugcaucacuccaaauggaagcauucccaaugacaaaccauuucaaaauguaaacaggaucacauauggggccugucccagauauguuaagcaaaacacucuaaaauuggcaacagggaugcgaaauguaccagagaaacaaacuagaggcauauuuggcgcaaucgcagguuucauagaaaaugguugggagggaaugguggacgguugguacgguuucaggcaucaaaauucugagggcacaggacaagcagcagaucucaaaagcacucaagcagcaaucaaccaaaucaaugggaaacugaauagguuaaucgggaaaacaaacgagaaauuccaucagauugaaaaagaauucucagaaguagaagggagaauucaggaccucgagaaauauguugaggacacuaaaauagaucucuggucauacaacgcggagcuucuuguugcccuggagaaccaacauacaauugaucuaacugacucagaaaugaacaaacuguuugaaaggacaaagaagcaacugagggaaaaugcugaggauaugggcaaugguuguuucaaaauauaccacaaaugugacaaugccugcauagggucaaucagaaauggaacuuaugaccaugauguauacagagaugaagcauuaaacaaccgguuccagaucaaagguguugagcugaagucaggauacaaagauuggauccuauggauuuccuuugccauaucauguuuuuugcuuuguguugcuuuguugggguucaucaugugggccugccaaaaaggcaacauuaggugcaacauuugcauuuga

SEQ ID NO: 40081 - RNA, 1701 nt, Artificial Sequence; identical to SEQ ID NO: 39973
  derived and/or modified CDS sequence (wt) from hemagglutinin__InfluenzaA__AEX35351

SEQ ID NO: 40082 - RNA, 1701 nt, Artificial Sequence; identical to SEQ ID NO: 39973
  derived and/or modified CDS sequence (wt) from hemagglutinin__InfluenzaA__AEX35362

SEQ ID NO: 40083 - RNA, 1701 nt, Artificial Sequence; identical to SEQ ID NO: 39964
  derived and/or modified CDS sequence (wt) from hemagglutinin__InfluenzaA__AEX35373

SEQ ID NO: 40084 - RNA, 1701 nt, Artificial Sequence
  derived and/or modified CDS sequence (wt) from hemagglutinin__InfluenzaA__AEX35384
augaagacuaucauugcuuugagcuacauucuaugucugguuuucgcucaaaaacuucccggaaaugacaacagcacggcaacgcugugccuugggcaccaugcaguaccaaacggaacaauagugaaaacaaucacgaaugaccaaauugaaguuacuaaugcuacugagcugguucagaguuccucaacagguggaauaugcgacaguccucaucagauccuugauggagaaaacugcacacuaauagaugcucuauugggagacccucagugugauggcuuccaaaauaagaaaugggaccuuuuuguugaacgcagcaaagccuacagcaacuguuacccuuaugaugugccggauuaugccucccuuaggucacuaguugccucauccggcacacuggaguuuaacaaugaaagcuucaauuggacuggagucacucaaaauggaacaagcucugcuugcaaaaggagaucuaauaaaaguuucuuuaguagauugaauugguugacccacuuaaaauucaaauacccagcauugagcgugacuaugccaaacaaugaaaaauuugacaaauuguacauuugggggguucaccacccggguacggacaaugaccaaaucagccuauaugcucaagcaucaggaagaaucacagucucuaccaaaagaagccaacaaacuguaaucccgaauaucggaucuagaaccaggguaagggauguccccagcagaauaagcaucuauuggacaauaguaaaaccgggagacauacuuuugauuaacagcacagggaaucuaauugcuccucgggguuacuucaaaauacgaagugggaaaagcucaauaaugagaucagaugcacccauuggcaaaugcaauucugaaugcaucacuccaaauggaagcauucccaaugacaaaccauuucaaaauguaaacaggaucacauauggggccugucccagauauguuaagcaaaacacucugaaauuggcaacagggaugcgaaacguaccagagaaacaaacuagagguauauuuggcgcaaucgcggguuucauagaaaaugguugggagggaaugguggacgguugguacgguuucaggcaucaaaauucugagggaacaggacaagcagcagaucucaaaagcacucaagcagcaaucaaccaaaucaaugggaagcugaauagguugaucgggaaaacaaacgagaaauuccaucagauugaaaaagaauucucagaaguagaagggagaauucaggaccucgagaaauauguugaggacacuaaaauagaucucuggucauacaacgcggagcuucuuguugcccuggagaaccaacauacaauugaucuaacugacucagaaaugaacaaacuguuugaaagaacaaagaagcaacugagggaaaaugcugaggauaugggcaaugguuguuucaaaauauaccacaaaugugacaaugccugcauagggucaaucagaaauggaacuuaugaccaugauguauacagagaugaagcauuaaacaaccgguuccagaucaaagguguugagcugaagucaggauacaaagauuggauccuauggauuuccuuugccauaucauguuuuuugcuuuguguugcuuuguugggguucaucaugugggccugccaaaaaggcaacauuaggugcaacauuugcauuuga

SEQ ID NO: 40085 - RNA, 1701 nt, Artificial Sequence
  derived and/or modified CDS sequence (wt) from hemagglutinin__InfluenzaA__AEX35395
augaagacuaucauugcuuugagcuacauucuaugucugguuuucgcucaaaaacuucccggaaaugacaacagcacggcaacgcugugccuugggcaccaugcaguaccaaacggaacgauagugaaaacaaucacgaaugaccaaauugaaguuacuaaugcuacugagcugguucagaguuccucaacaggugaaauaugcgacaguccucaucaaauccuugauggagaaaacugcacacuaauagaugcucuauugggagacccucagugugauggcuuccaaaauaagaaauggaaccuuuuuguugaacgcagcaaagccuacagcaacuguuacccuuaugaugugccggauuaugccucccuuaggucacuaguugccucauccggcacacuggaguuuaacaaugaaagcuucaauuggacuggagucacucaaaauggaacaagcucugcuugcaaaaggagaucuaauaaaaguuucuuuaguagauugaauugguugacccacuuaaaauucaaauacccagcauugaacgugacuaugccaaacaaugaaaaauuugacaaauuguacauuugggggguucaccacccggguacggacaaugaccaaaucagccuauaugcucaagcaucaggaagaaucacagucucuaccaaaagaagccaacaaacuguaaucccgaauaucggaucuagacccaggguaagggauguccccagcagaauaagcaucuauuggacaauaguaaaaccgggagacauacuuuugauuaauagcacagggaaucuaauugcuccucgggguuacuucaaaauacggagugggaaaagcucaauaaugagaucagaugcacccauuggcaaaugcaauucugaaugcaucacuccaaauggaagcauucccaaugacaaaccauuucaaaauguaaacaggaucacauauggggccugucccagauauguuaagcaaaacacucugaaauuggcaacagggaugcgaaauguaccagagaaacaaacuagaggcauauuuggcgcaaucgcggguuucauagaaaaugguugggagggaaugguggacgguugguacgguuucaggcaucaaaauucugagggaacaggacaagcagcagaucucaaaagcacucaagcagcaaucaaccaaaucaaugggaagcugaauagguugaucgggaaaacaaacgagaaauuccaucagauugaaaaagaauucucagaaguagaagggagaauucaggaccucgagaaauauguugaggacacuaaaauagaucucuggucauacaacgcggagcuucuuguugcccuggagaaccaacauacaauugaucuaacugacucagaaaugaacaaacuguuugaaagaacaaagaagcaacugagggaaaaugcugaggauaugggcaaugguuguuucaaaauauaccacaaaugugacaaugccugcauagggucaaucagaaauggaacuuaugaccaugauguauacagagaugaagcauuaaacaaccgguuccagaucaaagguguugagcugaagucaggauacaaagauuggauccuauggauuuccuuugccauaucauguuuuuugcuuuguguugcuuuguugggguucaucaugugggccugccaaaaaggcaacauuaggugcaacauuugcauuuga

SEQ ID NO: 40086 - RNA, 1701 nt, Artificial Sequence; identical to SEQ ID NO: 39964
  derived and/or modified CDS sequence (wt) from hemagglutinin__InfluenzaA__AEX35406

SEQ ID NO: 40087 - RNA, 1701 nt, Artificial Sequence; identical to SEQ ID NO: 39964
  derived and/or modified CDS sequence (wt) from hemagglutinin__InfluenzaA__AEX35417

SEQ ID NO: 40088 - RNA, 1701 nt, Artificial Sequence
  derived and/or modified CDS sequence (wt) from hemagglutinin__InfluenzaA__AEX35428
augaagacuaucauugcuuugagcuacauuuuaugucugguuuucgcucaaaaacuucccggaaaugacaacagcacggcaacgcugugccuugggcaccaugcaguaccaaacggaacgcuagugaaaacaaucacgaaugaccaaauugaagugacuaaugcuacugagcugguucagaguuccucaacagguggaauaugcgacaguccucaucagauccuugauggagaaaacugcacacuaauagaugcucuauugggagacccucauugugauggcuuccaaaauaagaaaugggaccuuuuuguugaacgcagcaaagccuacagcaacuguuacccuuaugaugugccggauuaugccucccuuaggucacuaguugccucauccggcacacuggaguuuaacaaugaaagcuucaauuggacuggagucgcucagaauggaacaagcucugcuugcaaaaggagauccgauaaaaguuucuuuaguagauugaauugguugcaccaauuaaaauacaaauacccagcauugaacgugacuaugccaaacaaugaaaaauuugacaaauuguacauuugggggguucaccacccggguacggacagugaccaaaucagccuauaugcucaagcaucagggagaaucacagucucuaccaaaagaagccaacaaacuguaaucccgaauaucggaucuagacccaggguaagggaugucuccagcagaauaagcaucuauuggacaauaguaaaaccgggagacauacuuuuuauuaacagcacagggaaucuaauugcuccucgggguuacuucaaaauacgaagugggaaaagcucaauaaugagaucagaugcacccauugacaaaugcaauucugaaugcaucacuccaaauggaagcauucccaaugacaaaccauuucaaaauguaaacaggaucacauauggggccugucccagauauguuaagcaaaacacucugaaauuggcaacagggaugcggaauguaccagagaaacaaacuagaggcauauucggcgcaaucgcggguuucauagaaaaugguugggagggaaugguggacgguugguacgguuucaggcaucaaaauucugagggcacaggacaagcagcagaucuuaaaagcacucaagcagcaaucaaccaaaucaaugggaaacugaauagguuaaucgggaaaacaaacgagaaauuccaucagauugaaaaagaauucucagaaguagaagggagaauucaggaccucgagaaauauguugaggacacuaaaauagaucucuggucauacaacgcggagcuucuuguugcccuggagaaccaacauacaauugaucuaacugacucagaaaugaacaaacuguuugaaagaacaaagaagcaacugagggaaaaugcugaggauaugggcaaugguuguuucaaaauauaccacaaaugugacaaugccugcauagggucaaucagaaauggaacuuaugaccaugauguauacagagaugaagcauuaaacaaccgguuccagaucaaagguguugagcugaagucaggauacaaagauuggauccuauggauuuccuuugccauaucauguuuuuugcuuuguguugcuuugcugggguucaucaugugggccugccaaaaaggcaacauuaggugcaacauuugcauuuga

SEQ ID NO: 40089 - RNA, 1698 nt, Artificial Sequence
  derived and/or modified CDS sequence (wt) from hemagglutinin__InfluenzaA__AEX35439
augaaaguaaaacuacugguucuguuauguacauuuacagcuacauaugcagacacaauauguauaggcuaccaugccaacaacucaaccgacacuguugacacaguacuugagaagaaugugacagugacacacucugucaaccuacuugaggacagucacaauggaaaacuaugucuacuaaaaggaauagccccacuacaauuggguaauugcagcguugccggauggaucuuaggaaacccagaaugcgaauuacugauuuccaaggaaucaugguccuacauuguagaaacaccaaauccugagaauggaacauguuacccaggguauuucgccgacuaugaggaacugagagagcaauugaguucaguaucuucauuugagagguucgaaauauuccccaaagagagcucauggcccaaccacaccguaaccggaguaucagcaucaugcucccauaacgggaaaagcaguuuuuacagaaauuugcuauggcugacggggaagaaugguuuguacccaaaccugagcaaguccuaugcaaacaacaaagagaaagaaguccuuguacuaugggguguucaucacccgccuaacauaggggaccaaagggcccucuaucauacagaaaaugcuuaugucucuguagugucuucacauuauagcagaagauucaccccagaaauagccaaaagacccaaggugagagaucaggaaggaagaaucaacuacuacuggacucugcuggaacccggggauacaauaauauuugaggcaaauggaaaucuaauagcgccaagauuugcuuucgcauugaguagaggcuuuggaucaggaaucaucaccucaaaugcaccaauggaugaaugugaugcgaagugucaaacaccucagggagcuauaaacagcagucuuccuuuccagaauguacacccagucacaauaggagaguguccaaaguaugucaggagugcaaaauugaggaugguuacaggacuaaggaacaucccauccauucaauccagagguuuguuuggagccauugccgguuucauugaagggggguggacuggaaugguagaugguugguaugguuaucaucaucagaaugagcaaggaucuggauaugcugcagaucaaaaaagcacacagaaugccauuaacgggauuacaaacaaggugaauucuguaauugagaaaaugaacacucaauucacagcugugggcaaagaauucaacaaauuggaaagaaggauggaaaacuuaaauaaaaaaguugaugauggguuucuagacauuuggacauauaaugcagaauuguugguucuacuggaaaaugaaaggacuuuggauuuccaugacuccaacgugaagaaucuguaugagaaaguaaaaagccaauuaaagaauaaugccaaagaaauaggaaacggguguuuugaauucuaucacaaguguaacgaugaaugcauggagagugugaaaaauggaacuuaugacuauccaaaguauucugaagaaucaaaguuaaacagggagaaaauugauggagugaaauuggaaucaaugggagucuaucagauucuggcgauauacucaacagucgccaguucccugguucuuuuggucucccugggggcaaucagcuucuggauguguuccaaugggucuuugcaguguagaauaugcaucuaa

SEQ ID NO: 40090 - RNA, 1701 nt, Artificial Sequence
  derived and/or modified CDS sequence (wt) from hemagglutinin__InfluenzaA__AEX35450
augaagacuaucauugcuuugagcuacauucuaugucugguuuucgcucaaaaacuucccggaaaugacaacagcacggcaacgcugugccuugggcaccaugcaguaccaaacggaacgauagugaaaacaaucacgaaugaccaaauugaaguuacuaaugcuacugagcugguucagaguuccucaacagguggaauaugcgacaguccucaucagauccuugauggagaaaacugcacacuaauagaugcucuauugggagacccucagugugauggcuuccaaaauaagaaaugggaccuuuuuguugaacgcagcaaagccuacagcaacuguuacccuuaugaugugccggauuaugccucccuuaggucacuaguugccucauccggcacacuggaguuuaacaaugaaaacuucaauuggacuggagucacucaaaauggaacaagcucugcuugcaaaaggagauccaauaacaguuucuuuaguagauugaauugguugacccacuuaaaauucaaauacccagcauugaacgugacuaugccaaacaaugaaaaauuugacaaauuguacauuugggggguucaccacccggguacggacaaugaccaaaucuuccuguaugcucaagcaucaggaagaaucacagucucuaccaaaagaagccaacaaacuguaaucccgaauaucggaucuagacccagaguaaggaauauccccagcagaauaagcaucuauuggacaauaguaaaaccgggagacauacuuuugauuaacagcacagggaaucuaauugcuccuagggguuacuucaaaauacaaagugggaaaagcucaauaaugagaucagaugcacccauuggcaaaugcaauucugaaugcaucacuccaaauggaagcauucccaaugacaaaccauuucaaaauguaaacaggaucacauauggggccugucccagauauguuaagcaaaacacucugaaauuggcaacagggaugcgaaauguaccagagaaacaaacuagaggcauauuuggcgcaaucgcggguuucauagaaaaugguugggagggaaugguggaugguugguacgguuucaggcaucaaaauucugagggaauaggacaagcagcagaucucaaaagcacucaagcagcaaucaaucaaaucaaugggaagcugaauagguugaucgggaaaaccaacgagaaauuccaucagauugaaaaagaauucucagaaguagaagggagaauucaggaccucgagaaauauguugaggacacuaaaauagaucucuggucauacaacgcggagcuucuuguugcccuugagaaccaacauacaauugaucuaacugacucagaaaugaacaaacuguuugaaagaacaaagaagcaacugagggaaaaugcugaggauaugggcaaugguuguuucaaaauauaccauaaaugugacaaugccugcauaggaucaaucagaaauggaacuuaugaccaugauguauacagagaugaagcauuaaacaaccgguuccagaucaaaggcguugagcugaagucaggauacaaagauuggauccuauggauuuccuuugccauaucauguuuuuugcuuuguguugcuuuguugggguucaucaugugggccugccaaaaaggcaacauuaggugcaacauuugcauuuga

SEQ ID NO: 40091 - RNA, 1701 nt, Artificial Sequence
  derived and/or modified CDS sequence (wt) from hemagglutinin__InfluenzaA__AEX35461
augaagacuaucauugcuuugagcuacauucuaugucugguuuucgcucaaaaacuucccggaaaugacaacagcacggcaacgcugugccuugggcaccaugcaguaccaaacggaacgauagugaaaacaaucacgaaugaccaaauugaaguuacuaaugcuacugagcuggugcagaguuccucaacagguggaauaugcgacaguccucaucagauccuugauggagaaaacugcacacuaauagaugcucuauugggagacccucagugugauggcuuccaaaauaagaaaugggaccuuuuuguugaacgcagcaaagccuacagcaacuguuacccuuaugaugugccggauuaugccucccuuaggucacuaguugccucauccggcacacuggaguuuaacaaugaaagcuucaauuggacuggagucacccaaaauggaacaagcucugcuugcaaaaggagaucuaauaacaguuucuuuaguagauugaauugguugacccacuuaaaauucaaauacccagcauugaacgugacuaugccaaacaaugaaaaauuugacaaauuguacauuugggggguucaccacccggguacggacaaugaccaaaucuuccuguaugcucaagcaucaggaagaaucacagucucuaccaaaagaagccaacaaacuguaaucccgaauaucggaucuagacccagaguaaggaauauccccagcagaauaagcaucuauuggacaauaguaaaaccgggagacauacuuuugauuaacagcacagggaaucuaauugcuccuagggguuacuucaaaauacgaagugggaaaagcucaauaaugagaucagaugcacccauuggcaaaugcaauucugaaugcaucacuccaaauggaagcauucccaaugacaaaccauuucaaaauguaaacaggaucacauauggggccugucccagauauguuaagcaaaacacucugaaauuggcaacagggaugcgaaauguaccagagaaacaaacuagaggcauauuuggcgcaaucgcggguuucauagaaaaugguugggagggaaugguggaugguugguacgguuucaggcaucaaaauucugagggaauaggacaagcagcagaucucaaaagcacucaagcagcaaucaaucaaaucaaugggaagcugaauagguugaucgggaaaaccaacgagaaauuccaucagauugaaaaagaauucucagaaguagaagggagaauucaggaccucgagaaauauguugaggacacuaaaauagaucucuggucauacaacgcggagcuucuuguugcccuggagaaccaacauacaauugaucuaacugacucagaaaugaacaaacuguuugaaagaacaaagaagcaacugagggaaaaugcugaggauaugggcaaugguuguuucaaaauauaccacaaaugugacaaugccugcauaggaucaaucagaaauggaacuuaugaccaugauguauacagagaugaagcauuaaacaaccgguuccagaucaaaggcguugagcugaagucaggauacaaagauuggauccuauggauuuccuuugccauaucauguuuuuugcuuuguguugcuuuguugggguucaucaugugggccugccaaaaaggcaacauuaggugcaacauuugcauuuga

SEQ ID NO: 40092 - RNA, 1701 nt, Artificial Sequence
  derived and/or modified CDS sequence (wt) from hemagglutinin__InfluenzaA__AEX35472
augaagacuaucauugcuuugagcuacauucuaugucugguuuucgcucaaaaacuucccggaaaugacaacagcacggcaacgcugugccuugggcaccaugcaguaccaaacggaacgauagugaaaacaaucacgaaugaccaaauugaaguuacuaaugcuacugagcugguucagaguuccucaacagguggaauaugcgacaguccucaucagauccuugauggagaaaacugcacacuaauagaugcucuauugggagacccucagugugaugacuuccaaaauaagaaaugggaccuuuuuguugaacgcagcaaagccuacagcaacuguuacccuuaugaugugccggauuaugccucccuuaggucacuaguugccucauccggcacacuggaguuuaacaaugaaagcuucaauuggacuggagucacucaaaauggaacaagcucugcuugcaaaaggagaucuaauaacaguuucuuuaguagauugaauugguugacccacuuaaaauucaaauacccagcauugaacgugacuaugccaaacaaugaaaaauuugacaaauuguacauuugggggguucaccacccggguacggacaaugaccaaaucuuccuguaugcucaagcaucaggaagaaucacagucucuaccaaaagaagccaacaaacuguaaucccgaauaucggaucuagacccaggguaaggaauauccccagcagaauaagcaucuauuggacaauaguaaaaccgggagacauacuuuugauuaacagcacagggaaucuaauugcuccuagggguuacuucaaaauacgaagugggaaaagcucaauaaugagaucagaugcacccauuggcaaaugcaauucugaaugcaucacuccaaauggaagcauucccaaugacaaaccauuucaaaauguaaacaggaucacauauggggccugucccagauauguuaagcaaaacacucugaaauuggcaacagggaugcgaaauguaccagagaaacaaacuagaggcauauuuggcgcaaucgcggguuucauagaaaaugguugggagggaaugguggaugguugguacgguuucaggcaucaaaauucugagggaauaggacaagcagcagaccucaaaagcacucaagcagcaaucaaucaaaucaaugggaagcugaauagguugaucgggaaaaccaacgagaaauuccaucagauugaaaaagaauucucagaaguagaagggagaauucaagaccucgagaaauauguugaggacacuaaaauagaucucuggucauacaacgcggagcuucuuguugcccuggagaaccaacauacaauugaucuaacugacucagaaaugaacaaacuguuugaaagaacaaagaagcaacugagggaaaaugcugaggauaugggcaaugguuguuucaaaauauaccacaaaugugacaaugccugcauaggaucaaucagaaauggaacuuaugaccaugauguauacagagaugaagcauuaaacaaccgguuccagaucaaaggcguugagcugaagucaggauacaaagauuggauccuauggauuuccuuugccauaucauguuuuuugcuuuguguuguuuuguugggguucaucaugugggccugccaaaaaggcaacauuaggugcaacauuugcauuuga

SEQ ID NO: 40093 - RNA, 1701 nt, Artificial Sequence
  derived and/or modified CDS sequence (wt) from hemagglutinin__InfluenzaA__AEX35483
augaagacuaucauugcuuugagcuacauucuaugucugguuuucgcucaaaaacuucccggaaaugacaacagcacggcaacgcugugccuugggcaccaugcaguaccaaacggaacgauagugaaaacaaucacgaaugaccaaauugaaguuacuaaugcuacugagcuggugcagaguuccucaacagguggaauaugcgacaguccucaucagauccuugauggagaaaacugcacacuaauagaugcucuauugggagacccucagugugauggcuuccaaaauaagaaaugggaccuuuuuguugaacgcagcaaagccuacagcaacuguuacccuuaugaugugccggauuaugccucccuuaggucacuaguugccucauccggcacacuggaguuuaacaaugaaagcuucaauuggacuggagucacccaaaauggaacaagcucugcuugcaaaaggagaucuaauaacaguuucuuuaguagauugaauugguugacccacuuaaaauucaaauacccagcauugaacgugacuaugccaaacaaugaaaaauuugacaaauuguacauuugggggguucaccacccggguacggacaaugaccaaaucuuccuguaugcucaagcaucaggaagaaucacagucucuaccaaaagaagccaacaaacuguaaucccgaauaucggaucuagacccagaguaaggaauauccccagcagaauaagcaucuauuggacaauaguaaaaccgggagacauacuuuugauuaacagcacagggaaucuaauugcuccuagggguuacuucaaaauacgaagugggaaaagcucaauaaugagaucagaugcacccauuggcaaaugcaauucugaaugcaucacuccaaauggaagcauucccaaugacaaaccauuucaaaauguaaacaggaucacauauggggccugucccagauauguuaagcaaaacacucugaaauuggcaacagggaugcgaaauguaccagagaaacaaacuagaggcauauuuggcgcaaucgcggguuucauagaaaaugguugggagggaaugguggaugguugguacgguuucaggcaucaaaauucugagggaauaggacaagcagcagaucucaaaagcacucaagcagcaaucaaucaaaucaaugggaagcugaauagguugaucgggaaaaccaacgagaaauuccaucagauugaaaaagaauucucagaaguagaagggagaauucaggaccucgagaaauauguugaggacacuaaaauagaucucuggucauacaacgcggagcuucuugucgcccuggagaaccaacauacaauugaucuaacugacucagaaaugaacaaacuguuugaaagaacaaagaagcaacugagggaaaaugcugaggauaugggcaaugguuguuucaaaauauaccacaaaugugacaaugccugcauaggaucaaucagaaauggaacuuaugaccaugauguauacagagaugaagcauuaaacaaccgguuccagaucaaaggcguugagcugaagucaggauacaaagauuggauccuauggauuuccuuugccauaucauguuuuuugcuuuguguugcuuuguugggguucaucaugugggccugccaaaaaggcaacauuaggugcaacauuugcauuuga

SEQ ID NO: 40094 - RNA, 1701 nt, Artificial Sequence
  derived and/or modified CDS sequence (wt) from hemagglutinin__InfluenzaA__AEX35494
augaagacuaucauugcuuugagcuacauucuaugucugguuuucgcucaaaaacuucccggaaaugacaacagcacggcaacgcugugccuugggcaccaugcaguaccaaacggaacgauagugaaaacaaucacgaaugaucaaauugaaguuacuaaugcuacugagcugguucagaguuccucaacagguggaauaugcgacaguccucaucagauccuugauggagaaaacugcacacuaauagaugcucuauugggagacccucagugugauggccuccaaaauaagaaaugggaucuuuuuguugaacgcagcaaagccuacagcaacuguuacccuuaugaugugccggauuaugccucccuuaggucacuaguugccucauccggcacacuggaguuuaacaaugaaagcuucaauuggacuggagucacucaaaaugggacaagcucugcuugcaaaaggagaucuaauaacaguuucuuuaguagauugaauugguugacccacuuaaaauucaaauacccagcauugaacgugacuaugccaaacaaugaaaaauuugacaaauuguacauuugggggguucaccacccggguacggacaaugaccaaaucuuccuguaugcucaagcaucaggaagaaucacagucucaaccaaaagaagccaacaaacuguaaucccgaauaucggaucuagacccagaguaaggaauauccccagcagaauaagcaucuauuggacaauaguaaaaccgggagacauacuuuugauuaacagcacagggaaucuaauugcuccuagggguuacuucaaaauacgaagugggaaaagcucaauaaugagaucagaugcacccauuggcaaaugcaauucugaaugcaucacuccaaauggaagcauucccaaugacaaaccauuucaaaauguaaacaggaucacauauggggccugucccagauauguuaagcaaaacacucugaaauuggcaacagggaugcgaaauguaccagagaaacaaacuagaggcauauuuggcgcaaucgcggguuucauagaaaaugguugggagggaaugauggaugguugguacgguuucaggcaucaaaauucugagggaauaggacaagcagcagaucucaaaagcacucaagcagcaaucaaucaaaucaaugggaagcugaauagguugaucgggaaaaccaacgagaaauuccaucagauugaaaaagaauucucagaaguagaagggagaauucaggaccucgagaaauauguugaggacacuaaaauagaucucuggucauacaacgcggagcuucuuguugcccuggagaaccaacauacaauugaucuaacugacucagaaaugaacaaacuguuugaaagaacaaagaagcaacugagggaaaaugcugaggauaugggcaaugguuguuucaaaauauaccacaaaugugacaaugccugcauagggucaaucagaaauggaacuuaugaccaugauguauacagagaugaagcauuaaacaaccgguuccagaucaaaggcguugagcugaagucaggauacaaagauuggauccuauggauuuccuuugccauaucauguuuuuugcuuuguguugcuuuguugggguucaucaugugggccugccaaaaaggcaacauuaggugcaacauuugcauuuga

SEQ ID NO: 40095 - RNA, 1701 nt, Artificial Sequence
  derived and/or modified CDS sequence (wt) from hemagglutinin__InfluenzaA__AEX35505
augaagacuaucauugcuuugagcuacauucuaugucugguuuucgcucaaaaacuucccgggaaugacaacagcacggcaacgcugugccuugggcaccaugcaguaccaaacggaacgauagugaaaacaaucacgaaugaccaaauugaaguuacuaaugcuacugagcugguucagaguuccucaacagguggaauaugcgacaguccucaucagauccuugauggagaaaacugcacacuaauagaugcucuauugggagacccucagugugaugacuuccaaaauaagaaaugggaccuuuuuguugaacgcagcaaagccuacagcaacuguuacccuuaugaugugccggauuaugccucccuuaggucacuaguugccucauccggcacacuggaguuuaacaaugaaagcuucaauuggacuggagucacucaaaauggaacaagcucugcuugcaaaaggagaucuaauaacaguuucuuuaguagauugaauugguugacccacuuaaaauucaaauacccagcauugaacgugacuaugccaaacaaugaaaaauuugacaaauuguacauuugggggguucaccacccggguacggacaaugaccaaaucuuccuguaugcucaagcaucaggaagaaucacagucucuaccaaaagaagccaacaaacuguaaucccgaauaucggaucuagacccaggguaaggaauauccccagcagaauaagcaucuauuggacaauaguaaaaccgggagacauacuuuugauuaacagcacagggaaucuaauugcuccuagggguuacuucaaaauacuaagugggaaaagcucaauaaugagaucagaugcacccauuggcaaaugcaauucugaaugcaucacuccaaauggaagcauucccaaugacaaaccauuucaaaauguaaacaggaucacauauggggccugucccagauauguuaagcaaaacacucugaaauuggcaacagggaugcgaaauguaccagagaaacaaacuagaggcauauuuggcgcaaucgcggguuucauagaaaaugguugggagggaaugguggaugguugguacgguuucaggcaucaaaauucugagggaauaggacaagcagcagaucucaaaagcacucaagcagcaaucaaucaaaucaaugggaagcugaauagguugaucgggaaaaccaacgagaaauuccaucagauugaaaaagaauucucagaaguagaagggagaauucaggaccucgagaaauauguugaggacacuaaaauagaucucuggucauacaacgcggagcuucuuguugcccuggagaaccaacauacaauugaucuaacugacucagaaaugaacaaacuguuugaaagaacaaagaagcaacugagggaaaaugcugaggauaugggcaaugguuguuucaaaauauaccacaaaugugacaaugccugcauaggaucaaucagaaauggaacuuaugaccaugauguauacagagaugaagcauuaaacaaccgguuccagaucaaaggcguugagcugaagucaggauacaaagauuggauccuauggauuuccuuugccauaucauguuuuuugcuuuguguugcuuuguugggguucaucaugugggccugccaaaaaggcaacauuaggugcaacauuugcauuuga

SEQ ID NO: 40096 - RNA, 1701 nt, Artificial Sequence
  derived and/or modified CDS sequence (wt) from hemagglutinin__InfluenzaA__AEX35516
augaagacuaucauugcuuugagcuacauucuaugucugguuuucgcucaaaaacuucccggaaaugacaacagcacggcaacgcugugccuugggcaccaugcaguaccaaacggaacgauagugaaaacaaucacgaaugaucaaauugaaguuacuaaugcuacugagcugguucagaguuccucaacagguggaauaugcgacaguccucaucagauccuugauggagaaaacugcacacuaauagaugcucuauugggagacccucagugugauggccuccaaaauaagaaaugggaucuuuuuguugaacgcagcaaagccuacagcaacuguuacccuuaugaugugccggauuaugccucccuuaggucacuaguugccucauccggcacacuggaguuuaacaaugaaagcuucaauuggacuggagucacucaaaaugggacaagcucugcuugcaaaaggagaucuaauaacaguuucuuuaguagauugaauugguugacccacuuaaaauucaaauacccagcauugaacgugacuaugccaaacaaugaaaaauuugacaaauuguacauuugggggguucaccacccggguacggacaaugaccaaaucuuccuguaugcucaagcaucaggaagaaucacagucucaaccaaaagaagccaacaaacuguaaucccgaauaucggaucuagacccagaguaaggaauauccccagcagaauaagcaucuauuggacaauaguaaaaccgggagacauacuuuugauuaacagcacagggaaucuaauugcuccuagggguuacuucaaaauacgaagugggaaaagcucaauaaugagaucagaugcacccauuggcaaaugcaauucugaaugcaucacuccaaauggaagcauucccaaugacaaaccauuucaaaauguaaacaggaucacauauggggccugucccagauauguuaagcaaaacacucugaaauuggcaacagggaugcgaaauguaccagagaaacaaacuagaggcauauuuggcgcaaucgcggguuucauagaaaaugguugggagggaaugguggaugguugguacgguuucaggcaucaaaauucugagggaauaggacaagcagcagaucucaaaagcacucaagcagcaaucaaucaaaucaaugggaagcugaauagguugaucgggaaaaccaacgagaaauuccaucagauugaaaaagaauucucagaaguagaagggagaauucaggaccucgagaaauauguugaggacacuaaaauagaucucuggucauacaacgcggagcuucuuguugcccuggagaaccaacauacaauugaucuaacugacucagaaaugaacaaacuguuugaaagaacaaagaagcaacugagggaaaaugcugaggauaugggcaaugguuguuucaaaauauaccacaaaugugacaaugccugcauagggucaaucagaaauggaacuuaugaccaugauguauacagagaugaagcauuaaacaaccgguuccagaucaaaggcguugagcugaagucaggauacaaagauuggauccuauggauuuccuuugccauaucauguuuuuugcuuuguguugcuuuguugggguucaucaugugggccugccaaaaaggcaacauuaggugcaacauuugcauuuga

SEQ ID NO: 40097 - RNA, 1701 nt, Artificial Sequence
  derived and/or modified CDS sequence (wt) from hemagglutinin__InfluenzaA__AEX35527
augaagacuaucauugcuuugagcuacauucuaugucugguuuucgcucaaaaacuucccggaaaugacaacagcacggcaacgcugugccuugggcaccaugcaguaccaaacggaacaauagugaaaacaaucacgaaugaccaaauugaaguuacuaaugcuacugagcugguucagaguuccucaacagguggaauaugcgacaguccucaucagauccuugauggagaaaacugcacacuaauagaugcucuauugggagacccucagugugauggcuuccaaaauaagaaaugggaccuuuuuguugaacgcagcaaagccuacagcaacuguuacccuuaugaugugccggauuaugucucccuuaggucacuaguugccucauccggcacacuggaguuuaacaaugaaagcuucaauuggacuggagucacucaaaauggaacaagcucugcuugcaaaaggagaucuaauaacaguuucuuuaguagauugaauugguugacccauuuaaaauucaaauacccagcauugaacguaacuaugccaaacaaugaacaauuugacaaauuguacauuugggggguucaccacccggguacggacaaugaccaaaucagccuauaugcucaagcaucaggaagaaucacagucucuaccaaaagaagccaacaaacuguaaucccgaauaucggaucuagacccaggguaagggauauccccagcagaauaagcaucuauuggacaauaguaaaaccgggagacauacuuuugauuaacagcacagggaaucuaauugcuccucgggguuacuucaaaauacgaagugggaaaagcucaauaaugagaucagaugcacccauuggcaaaugcaauucugaaugcaucacuccaaauggaagcauucccaaugacaaaccauuucaaaauguaaacaggaucacauauggggccugucccagauauguuaagcaaaacacucugaaauuggcaacagggaugcgaaauguaccagagaaacaaacuagaggcauauuuggcgcaaucgcggguuucauagaaaaugguugggagggaaugguggaugguugguacgguuucaggcaucaaaauucugagggaauaggacaagcagcagaucucaaaagcacucaagcagcaaucaaccaaaucaaugggaagcugaauagguugaucgggaaaaccaacgagaaauuccaucagauugaaaaagaauucucagaaguagaagggagaauucaggaccucgagaaauauguugaggacacuaaaauagaucucuggucauacaacgcggagcuucuuguugcccuggagaaccaacauacaauugaucuaacugacucagaaaugaacaaacuguuugaaagaacaaagaaacaacugagggaaaaugcugaggauaugggcaaugguuguuucaaaauauaccacaaaugugacaaugccugcauagggucaaucagaaauggaacuuaugaucaugauguauacagagaugaagcauuaaacaaccgguuccagaucaaagguguugagcugaagucaggauacaaagauuggauccuuuggauuuccuuugccauaucauguuuuuugcuuuguguugcuuuguugggguucaucaugugggccugccaaaaaggcaacauuaggugcaacauuugcauuuga

SEQ ID NO: 40098 - RNA, 1701 nt, Artificial Sequence
  derived and/or modified CDS sequence (wt) from hemagglutinin__InfluenzaA__AEX35549
augaagacuaucauugcuuugagcuacauucuaugucugguuuucgcucaaaaacuucccggaaaugacaacagcacggcaacgcugugccuugggcaccaugcaguaccaaacggaacgauagugaaaacaaucacgaaugaccaaauugaaguuacuaaugcuacugagcugguucagaguuccucaacagguggaauaugcgacaguccucaucagauccuugauggagaaaacugcacacuaauagaugcucuauugggagacccucagugugauggcuuccaaaauaagaaaugggaccuuuuuguugaacgcagcaaagccuacagcaacuguuacccuuaugaugugccggauuaugccucccuuaggucacuaauugccucauccggcacacuggaguuuaacaaugaaagcuucaauuggacuggagucacucaaaauggaacaagcucugcuugcaaaaggggauccaauaacaguuucuuuaguagauugaauugguugacccacuuaaaauucaaauacccagcauugaacgugacuaugccaaacaaugaagaauuugacaaauuguacauuugggggguucaccacccggguacggacaaugaccaaaucagccuauaugcucaagcaucaggaaaaaucacagucucuaccaaaagaagccaacaaacuguaaucccgaauaucggaucuagacccaggguaagggauauccccagcagaauaagcaucuauuggacaauaguaaaaccgggagacauacuuuugauuaacagcacagggaaucuaauugcuccucgggguuacuucaaaauacgaagugggaaaagcucaauaaugagaucagaugcacccauugacaaaugcaauucugaaugcaucacuccaaauggaagcauucccaaugacaaaccauuucaaaauguaaacaagaucacauauggggccugucccagauauguuaagcaaaacacucugaaauuggcaacagggaugcgaaauguaccagagaaacaaaccagaggcauauuuggcgcaaucgcggguuucauagaaaaugguugggagggaaugguggaugguugguacgguuucaggcaucaaaauucugagggaauaggacaagcagcagaucucaaaagcacucaagcagcaaucgaccaaaucaaugggaagcugaauagguugaucgggaaaaccaacgagaaauuccaucagauugaaaaagaauucucagaaguagaagggagaauccaggaccucgagaaauauguugaggacacuaaaauagaucucuggucauacaacgcggagcuucuuguugcccuggagaaccaacauacaauugaucuaacugacucagaaaugaacaaacuguuugaaagaacaaagaagcaacugagggaaaaugcugaggauaugggcaaugguuguuucaaaauauaccauaaaugugacaaugccugcauagggucaaucagaaauggaacuuaugaccaugauguauacagagaugaagcauuaaacaaccgauuccagaucaaagguguugagcugaagucaggauacaaagauuggauccuauggauuuccuuugccauaucauguuuuuugcuuuguguugcuuuguugggguucaucaugugggccugccaaaaaggcaacauuaggugcaacauuugcauuuga

SEQ ID NO: 40099 - RNA, 1701 nt, Artificial Sequence
  derived and/or modified CDS sequence (wt) from hemagglutinin__InfluenzaA__AEX35560
augaagacuaucauugcuuugagcuacauucuaugucuaguuuucgcucaaaaacuucccggaaaugacaacagcacggcaacgcugugccuugggcaccaugcaguaccaaacggaacaauagugaaaacaaucacgaaugaccaaauugaaguuacuaaugcuacugagcugguucagaguuccucaacagguggaauaugcgacaguccucaucagauccuugauggagaaaacugcacucuaauagaugcucuauugggagacccucagugugauggcuuccaaaauaagaaaugggaccuuuuuguugaacgcagcaaagccuacagcaacuguuacccuuaugaugugccggauuaugucucccuuaggucacuaguugccucauccggcacacuggaguuuaacaaugaaagcuucaauuggacuggagucacucaaaauggaacaagcucugcuugcaaaaggagaucuaauaacaguuucuuuaguagauugaauugguugacccauuuaaaauucaaauacccagcauugaacgugacuaugccaaacaaugaacaauuugacaaauuguacauuugggggguucaccacccggguacggacaaugaccaaaucagccuauaugcucaagcaucaggaagaaucacagucucuaccaaaagaagccaacaaacuguaaucccgaauaucggaucuagacccaggguaagggauauccccagcagaauaagcaucuauuggacaauaguaaaaccgggagacauacuuuugauuaacagcacagggaaucuaauugcuccucggggguacuucaaaauacgaagugggaaaagcucaauaaugagaucagaugcacccauuggcaaaugcaauucugaaugcaucacuccaaauggaagcauucccaaugacaaaccauuucaaaauguaaacaggaucacauauggggccugucccagauauguuaagcaaaacacucugaaauuggcaacagggaugcgaaauguaccagagaaacaaacuagaggcauauuuggcgcaauugcggguuucauagaaaaugguugggagggaaugguggaugguugguacgguuucaggcaucaaaauucugugggaauaggacaagcagcagaucucaaaagcacucaagcagcaaucaaccaaaucaaugggaagcugaauagguugaucgggaaaaccaacgagaaauuccaucagauugaaaaagaauucucagaaguagaagggagaauucaggaccucgagaaauauguugaggacacuaaaauagaucucuggucauacaacgcggagcuucuuguugcccuggagaaccaacauacaauugaucuaacugacucagaaaugaacaaacuguuugaaagaacaaagaagcaacugagggaaaaugcugaggauaugggcaaugguuguuucaaaauauaccacaaaugugacaaugccugcauagggucaaucagaaauggaacuuaugaucaugauguauacagagaugaagcauuaaacaaccgguuccagaucaaagguguugagcugaagucaggauacaaagauuggauccuauggauuuccuuugccauaucauguuuuuugcuuuguguugcuuuguuaggguucaucaugugggccugccaaaaaggcaacauuaggugcaacauuugcauuuga

SEQ ID NO: 40100 - RNA, 1701 nt, Artificial Sequence
  derived and/or modified CDS sequence (wt) from hemagglutinin__InfluenzaA__AEX35571
augaagacuaucauugcuuugagcuacauucuaugucugguuuucgcucaaaaacuucccggaaaugacaacagcacggcaacgcugugccuugggcaccaugcaguaccaaacggaacgauagugaaaacaaucacgaaugaccaaauugagguuacuaaugcuacugagcugguucagaguuccucaacagguggaauaugcgacaguccucaucagauccuugauggagaaaacugcacacuaauagaugcucuauugggagacccucagugugauggcuuccaaaauaagaaaugggaccuuuuuguugaacgcagcagagccuacagcaacuguuacccuuaugaugugccggauuaugccucccuuaggucacuaguugccucauccggcacacuggaguuuaacaaugaaagcuucaauuggacuggagucacucaaaauggaacaagcucugcuugcaaaaggagaucuaauaacaguuucuuuaguagauugaauugguugacccacuuaaaauucaaauacccagcauugaacgugacuaugccaaacaaugaaaaauuugacaaauuguacauuugggggguucaccacccggguacggacaaugaccaaaucuuccuguaugcucaagcaucaggaagaaucacagucucuaccaaaagaagccaacaaacuguaaucccgaauaucggaucuagacccagaguaaggaauauccccagcagaauaagcaucuauuggacaauaguaaaaccgggagacauacuuuugauuaacagcacagggaaucuaauugcuccuagggguuacuucaaaauacgaagugggaaaagcucaauaaugagaucagaugcacccauuggcaaaugcaauucugaaugcaucacuccaaauggaagcauucccaaugacaaaccauuucaaaauguaaacaggaucacauauggggccugucccagauauguuaagcaaaacacucugaaauuggcaacagggaugcgaaauguaccagagaaacaaacuagaggcauauuuggcgcaaucgcggguuucauagaaaaugguugggagggaaugguggaugguugguacgguuucaggcaucaaaauucugagggaauaggacaagcagcagaucucaaaagcacucaagcagcaaucaaucaaaucaaugggaagcugaauagguugaucgggaaaaccaacgagaaauuccaucagauugaaaaagaauucucagaaguagaagggagaauucaggaccucgagaaauauguugaggacacuaaaauagaucucuggucauacaacgcggagcuucuuguugcccuggagaaccaacauacaauugaucuaacugacucagaaaugaacaaacuguuugaaagaacaaagaagcaacugagggaaaaugcugaggauaugggcaaugguuguuucaaaauauaccacaaaugugacaaugccugcauaggaucaaucagaaauggaacuuaugaccaugauguauacagagaugaagcauuaaacaaccgguuccagaucaaaggcgucgagcugaagucaggauacaaagauuggauccuauggauuuccuuugccauaucauguuuuuugcuuuguguugcuuuguugggguucaucaugugggccugccaaaaaggcaacauuaggugcaacauuugcauuuga

SEQ ID NO: 40101 - RNA, 1701 nt, Artificial Sequence
  derived and/or modified CDS sequence (wt) from hemagglutinin__InfluenzaA__AEX35582
augaagacuaucauugcuuugagcuacauucuaugucugguuuucgcucaaaaacuucccggaaaugacaacagcacggcaacgcugugccuugggcaccaugcaguaccaaacggaacgauagugaaaacaaucacgaaugaccaaauugaaguuacuaaugcuacugagcugguucagaguuccucaacagguggaauaugcgacaguccucaucagauccuugauggagaaaacugcacacuaauagaugcucuauugggagacccucagugugauggcuuccaaaauaagaaaugggaccuuuuuguugaacgcagcaaagccuacagcaacuguuacccuuaugaugugccggauuaugccucccuuaggucacuaguugccucauccggcacacuggaguuuaacaaugaaagcuucaauuggacuggagucacucaaaauggaacaagcucugcuugcaaaaggagaucuaauaacaguuucuuuaguagauugaauugguugacccacuuaaaauucaaauacccagcauugaacgugacuaugccaaacaaugaaaaauuugacaaauuguacauuugggggguucaccacccggguacggacaaugaccaaaucuuccuguaugcucaagcaucaggaagaaucacagucucuaccaaaagaagccaacaaacuguaaucccgaauaucggaucuagacccagaguaaggaauauccccagcagaauaagcaucuauuggacaauaguaaaaccgggagacauacuuuugauuaacagcacagggaaucuaauugcuccuagggguuacuucaaaauacgaagugggaaaagcucaauaaugagaucagaugcacccauuggcaaaugcaauucugaaugcaucacuccaaauggaagcauucccaaugacaaaccauuucaaaauguaaacaggaucacauauggggccugucccagauauguuaagcaaaacacucugaaauuggcaacagggaugcgaaauguaccagagaaacaaacuagaggcauauuuggcgcaaucgcggguuucauagaaaaugguugggagggaaugguggaugguugguacgguuucaggcaucaaaauucugagggaauaggacaagcagcagaucucaaaagcacgcaagcagcaaucaaucaaaucaaugggaagcugaauagguugaucgggaagaccaacgagaaauuccaucagauugaaaaagaauucucagaaguagaagggagaauucaagaccucgagaaauauguugaggacacuaaaauagaucucuggucauacaacgcggagcuucuuguugcccuggagaaccaacauacaauugaucuaacugacucagaaaugaacaaacuguuugaaagaacaaagaagcaacugagggaaaaugcugaggauaugggcaaugguuguuucaaaauauaccacaaaugugacaaugccugcauaggaucaaucagaaauggaacuuaugaccaugauguauacagagaugaagcauuaaacaaccgguuccagaucaaaggcguugagcugaagucaggauacaaagauuggauccuauggauuuccuuugccauaucauguuuuuugcuuuguguugcuuuguugggguucaucaugugggccugccaaaaaggcaacauuaggugcaacauuugcauuuga

SEQ ID NO: 40102 - RNA, 1701 nt, Artificial Sequence
  derived and/or modified CDS sequence (wt) from hemagglutinin__InfluenzaA__AEX35593
augaagacuaucauugcuuugagcuacauucuaugucugguuuucgcucaaaaacuucccggaaaugacaacagcacggcaacgcugugccuugggcaccaugcaguaccaaacggaacgauagugaaaacaaucacgaaugaccaaauugaaguuacuaaugcuacugagcuggugcagaguuccucaacagguggaauaugcgacaguccucaucagauccuugauggagaaaacugcacacuaauagaugcucuauugggagacccucagugugauggcuuccaaaauaagaaaugggaccuuuuuguugaacgcagcaaagccuacagcaacuguuacccuuaugaugugccggauuaugccucccuuaggucacuaguugccucauccggcacacuggaguuuaacaaugaaagcuucaauuggacuggagucacccaaaauggaacaagcucugcuugcaaaaggagaucuaauaacaguuucuuuaguagauugaauugguugacccacuuaaaauucaaauacccagcauugaacgugacuaugccaaacaaugaaaaauuugacaaauuguacauuugggggguucaccacccggguacggacaaugaccaaaucuuccuguaugcucaagcaucaggaagaaucacagucucuaccaaaagaagccaacaaacuguaaucccgaauaucggaucuagacccagaguaaggaauauccccagcagaauaagcaucuauuggacaauaguaaaaccgggagacauacuuuugauuaacagcacagggaaucuaauugcuccuagggguuacuucaaaauacgaagugggaaaagcucaauaaugagaucagaugcaccccuuggcaaaugcaauucugaaugcaucacuccaaauggaagcauucccaaugacaaaccauuucaaaauguaaacaggaucacauauggggccugucccagauauguuaagcaaaacacucugaaauuggcaacagggaugcgaaauguaccagagaaacaaacuagaggcauauuuggcgcaaucgcggguuucauagaaaaugguugggagggaaugguggaugguugguacgguuucaggcaucaaaauucugagggaauaggacaagcagcagaucucaaaagcacucaagcagcaaucaaucaaaucaaugggaagcugaauagguugaucgggaaaaccaacgagaaauuccaucagauugaaaaagaauucucagaaguagaagggagaauucaggaccucgagaaauauguugaggacacuaaaauagaucucuggucauacaacgcggagcuucuuguugcccuggagaaccaacauacaauugaucuaacugacucagaaaugaacaaacuguuugaaagaacaaagaagcaacugagggaaaaugcugaggauaugggcaaugguuguuucaaaauauaccacaaaugugacaaugccugcauaggaucaaucagaaauggaacuuaugaccaugauguauacagagaugaagcauuaaacaaccgguuccagaucaaaggcguugagcugaagucaggauacaaagauuggauccuauggauuuccuuugccauaucauguuuuuugcuuuguguugcuuuguugggguucaucaugugggccugccaaaaaggcaacauuaggugcaacauuugcauuuga

SEQ ID NO: 40103 - RNA, 1701 nt, Artificial Sequence
  derived and/or modified CDS sequence (wt) from hemagglutinin__InfluenzaA__AEX35604
augaagacuaucauugcuuugagcuacauucuaugucugguuuucgcucaaaaacuucccggaaaugacaacagcacggcaacgcugugccuugggcaccaugcaguaccaaacggaacgauagugaaaacaaucacgaaugaccaaauugaaguuacuaaugcuacugagcugguucagaguuccucaacagguggaauaugcgacaguccucaucagauccuugauggagaaaacugcacacuaauagaugcucuauugggagacccucagugugaugacuuccaaaauaagaaaugggaccuuuuuguugaacgcagcaaagccuacagcaacuguuacccuuaugaugugccggauuaugccucccuuaggucacuaguugccucauccggcacacuggaguuuaacaaugaaagcuucaauuggacuggagucacucaaaauggaacaagcucugcuugcaaaaggagaucuaauaacaguuucuuuaguagauugaauugguugacccacuuaaaauucaaauacccagcauugaacgugacuaugccaaacaaugaaaaauuugacaaauuguacauuugggggguucaccacccggguacggacaaugaccaaaucuuccuguaugcucaagcaucaggaagaaucacagucucuaccaaaagaagccaacaaacuguaaucccgaauaucggaucuagacccaggguaaggaauauccccagcagaauaagcaucuauuggacaauaguaaaaccgggagacauacuuuugauuaacagcacagggaaucuaauugcuccuagggguuacuucaaaauacgaagugggaaaagcucaauaaugagaucagaugcacccauuggcaaaugcaauucugaaugcaucacuccaaauggaagcauucccaaugacaaaccauuucaaaauguaaacaggaucacauauggggccugucccagauauguuaagcaaaacacucugaaauuggcaacagggaugcgaaauguaccagagaaacaaacuagaggcauauuuggcgcaaucgcggguuucauagaaaaugguugggagggaaugguggaugguugguacgguuucaggcaucaaaauucugagggaauaggacaagcagcagaccucaaaagcacucaagcagcaaucaaucaaaucaaugggaagcugaauagguugaucgggaaaaccaacgagaaauuccaucagauugaaaaagaauucucagaaguagaagggagaauucaagaccucgagaaauauguugaggacacuaaaauagaucucuggucauacaacgcggagcuucuuguugcccuggagaaccaacauacaauugaucuaacugacucagaaaugaacaaacuguuugaaagaacaaagaagcaacugagggaaaaugcugaggauaugggcaaugguuguuucaaaauauaccacaaaugugacaaugccugcauaggaucaaucagaaauggaacuuaugaccaugauguauacagagaugaagcauuaaacaaccgguuccagaucaaaggcguugagcugaagucaggauacaaagauuggauccuauggauuuccuuugccauaucauguuuuuugcuuuguguugcuuuguugggguucaucaugugggccugccaaaaaggcaacauuaggugcaacauuugcauuuga

SEQ ID NO: 40104 - RNA, 1701 nt, Artificial Sequence
  derived and/or modified CDS sequence (wt) from hemagglutinin__InfluenzaA__AEX35615
augaagacuaucauugcuuugagcuacauucuaugucugguuuucgcucaaaaacuuccuggaaaugacaacagcacggcaacgcugugccuugggcaccaugcaguaccaaacggaacgauagugaaaacaaucacgaaugaccaaauugaaguuacuaaugcuacugagcugguucagaguucuucaacaggugaaauaugcgacaguccucaucagauccuugauggagaaaacugcacacuaauagaugcucuauugggagacccucagugugauggcuuccaaaauaagaaaugggaccuuuuuguugaacgcagcaaagccuacagcaacuguuacccuuaugaugugccggauuaugccucccuuaggucacuaguugccucauccggcacacuggaguuuaacaaugaaagcuucaauuggacuggagucacucaaaacggaacaagcucugcuugcauaaggagaucuaauaacaguuucuuuaguagauugaauugguugacccacuugaaauucaaauacccagcauugaacgugacuaugccaaacaaugaaaaauuugacaaauuguacauuugggggguucaccacccggguacggacaaugaccaaaucuuccuguaugcucaagcaucaggaagaaucacagucucuaccaaaagaagccaacaaacuguaaucccgaauaucggaucuagacccagaguaaggaauauccccagcagaauaagcaucuauuggacaauaguaaaaccgggagacauacuuuugauuaacagcacagggaaucuaauugcuccuagggguuacuucaaaauacgaagugggaaaagcucaauaaugagaucagaugcacccauuggcaaaugcaauucugaaugcaucacuccaaauggaagcauucccaaugacaaaccauuccaaaauguaaacaggaucacauacggggccugucccagauauguuaagcaaaacacucugaaauuggcaacagggaugcgaaauguaccagagaaacaaacuagaggcauauuuggcgcaaucgcggguuucauagaaaaugguugggagggaaugguggaugguugguacgguuucaggcaucaaaauucugagggaauaggacaagcagcagaucucaaaagcacucaagcagcaaucgaucaaaucaaugggaagcugaauagguugaucgggaaaaccaacgagaaauuccaucagauugaaaaagaauucucagaagucgaagggagaauucaggaccuugagaaauauauugaggacaccaaaauagaucucuggucauacaacgcggagcuucuuguugcccuggagaaccaacauacaauugaucuaacugacucagaaaugaacaaacuguuugaaaaaacaaagaagcaacugagggaaaaugcugaggauaugggcaaugguuguuucaaaauauaccacaaaugugacaaugccugcauaggaucaaucagaaauggaacuuaugaccacgauguauacagagaugaagcauuaaacaaccgguuccagaucaagggcguugagcugaagucaggauacaaagauuggauccuauggauuuccuuugccauaucauguuuuuugcuuuguguugcuuuguugggguucaucaugugggccugccaaaaaggcaacauuaggugcaacauuugcauuuga

SEQ ID NO: 40105 - RNA, 1701 nt, Artificial Sequence
  derived and/or modified CDS sequence (wt) from hemagglutinin__InfluenzaA__AEX35626
augaagacuaucauugcuuugagcuacauucuaugucugguuuucgcucaaaaacuuccuggaaaugacaacagcacggcaacgcugugccuugggcaccaugcaguaccaaacggaacaauagugaaaacaaucacgaaugaccaaauugaaguuacuaaugcuacugagcugguucagaguuccucaacaggugaaauaugcgacaguccucaucagauccuugauggagaaaacugcacacuaauagaugcucuauugggagacccucagugugauggcuuccaaaauaagaaaugggaccuuuuuguugaacgcagcaaagccuacagcaacuguuacccuuaugaugugccggauuaugccucccuuaggucacuaguugccucauccggcacacuggaguuuaacaaugaaagcuucaauuggacuggagucacucaaaauggaacaagcucugcuugcauaaggagaucuaauaacaguuucuuuaguagauugaauugguugacccacuuaaaauucaaauacccagcauugaacgugacuaugccaaacaaugaacaauuugacaaauuguacauuugggggguucaccacccggguacggacaaugaccaaaucuuccuguaugcucaagcaucaggaagaaucacagucucuaccaaaagaagccaacaaacuguaaucccgaauaucggaucuagacccagaguaaggaauaucccuagcagaauaagcaucuauuggacaauaguaaaaccgggagacauacuuuugauuaacagcacagggaaucuaauugcuccuagggguuacuucaaaauacgaagugggaaaagcucaauaaugagaucagaugcacccauuggcaaaugcaauucugaaugcaucacuccaaauggaagcauucccaaugacaaaccauuccaaaauguaaacaggaucacauacggggccugucccagauauguuaagcaaaacacucugaaauuggcaacagggaugcgaaauguaccagagaaacaaacuagaggcauauuuggcgcaaucgcggguuucauagaaaaugguugggagggaaugguggaugguugguacgguuucaggcaucaaaauucugagggaagaggacaagcagcagaucucaaaagcacucaagcagcaaucgaucaaaucaaugggaagcugaauagauugaucgggaaaaccaacgagaaauuccaucagauugaaaaagaauucucagaagucgaagggagaauucaggaccuugagaaauauguugaggacaccaaaauagaucucuggucauacaacgcggagcuucuuguugcccuggagaaccaacauacaauugaucuaacugacucagaaaugaacaaacuguuugaaaaaacaaagaagcaacugagggaaaaugcugaggauaugggcaaugguuguuucaaaauauaccacaaaugugacaaugccugcauaggaucaaucagaaauggaacuuaugaccacgauguauacagagaugaagcauuaaacaaccgguuccagaucaagggaguugagcugaagucaggguacaaagauuggauccuauggauuuccuuugccauaucauguuuuuugcuuuguguugcuuuguugggguucaucaugugggccugccaaaaaggcaacauuaggugcaacauuugcauuuga

SEQ ID NO: 40106 - RNA, 1701 nt, Artificial Sequence
  derived and/or modified CDS sequence (wt) from hemagglutinin__InfluenzaA__AEX35637
augaagacuaucauugcuuugagcuacauucuaugucugguuuucgcucaaaaacuucccggaaaugacaacagcacggcaacgcugugccuugggcaccaugcaguaccaaacggaacgauagugaaaacaaucacgaaugaccaaauugaaguuacuaaugcuacugagcugguucagaguuccucaacagguggaauaugcgacaguccucaucagauccuugauggagaaaacugcacacuaauagaugcucuauugggagacccucagugugauggcuuccaaaauaagaaaugggaccuuuuuguugaacgcagcaaagccuacagcaacuguuacccuuaugaugugccggauuaugccucccuuaggucacuaguugccucaucuggcacacuggaguuuaacaaugaaagcuucaauuggacgggagucacucaaaauggaacaagcucugcuugcaaaaggggaucugauaacaguuucuuuaguaaauugaauugguugacccacuuaaaauucaaauacccagcauugaacgugacuaugccaaacaaugaaaaauuugacaaauuguacauuugggggguucaccacccggguacggacaaugaccaaaucuucccguaugcucaagcaucaggaagaaucacagucucuaccaaaagaagccaacaaacuguaaucccgaauaucggaucuagacccagaguaaggaauauccccagcagaauaagcaucuauuggacaauaguaaaaccgggagacauacuuuugauuaacagcacagggaaucuaauugcuccuagggguuacuucaaaauacgaagugggaaaagcucaauaaugagaucagaugcacccauuggcaaaugcaauucugaaugcaucacuccaaauggaagcauucccaaugacaaaccauuucaaaauguaaacaggaucacauauggggccugucccagauauguuaagcagaacacccugaaauuggcaacagggaugcgaaauguaccagagaaacaaacuagaggcauauuuggcgcaaucgcggguuucauagaaaaugguugggagggaaugguggaugguugguacgguuucaggcaucaaaauucugagggaauaggacaagcagcagaucucaaaagcacucaagcagcaaucaaucaaaucaaugggaagcugaauagguugaucgggaaaaccaacgagaaauuccaucagauugaaaaagaauucucagaaguagaagggagaauucaggaccucgagaaauauguugaggacacuaaaauagaucucuggucauacaacgcagagcuucuuguugcccuggagaaccaacauacaauugaucuaacugacucagaaaugaacaaacuguuugaaagaacaaagaagcaacugagggaaaaugcugaggauaugggcaaugguuguuucaaaauauaccacaaaugugacaaugccugcauaggaucaaucagaaauggaacuuaugaccaugauguauacagagaugaagcauuaaacaaccgguuccagaucaaaggcguugagcugaagucaggcuacaaagauuggauccuauggauuuccuuugccauaucauguuuuuugcuuuguguugcuuuguugggguucaucaugugggccugccaaaaaggcaacauuaggugcaacauuugcauuuaa

SEQ ID NO: 40107 - RNA, 1701 nt, Artificial Sequence; identical to SEQ ID NO: 34529
  derived and/or modified CDS sequence (wt) from hemagglutinin__InfluenzaA__AEX35648

SEQ ID NO: 40108 - RNA, 1701 nt, Artificial Sequence
  derived and/or modified CDS sequence (wt) from hemagglutinin__InfluenzaA__AEX36102
augaagacuaucauugcuuugagcuacauucuaugucugguuuucgcucaaaaacuucccggaaauaacaacagcacggcaacgcugugccuugggcaccaugcaguaccaaacggaacgauagugaaaacaaucacgaaugaccaaauugaaguuacuaaugcuacugagcugguucagaguuccucaacaggugaaauaugcgacaguccucaucagauccuugauggagaaaacugcacacuaauagaugcucuauugggagacccucagugugauggcuuccaaaauaagaaaugggaccuuuuuguugaacgcagcaaagccuacagcaacuguuacccuuaugaugugccggauuaugccucccuuaggucacuaguugccucauccggcacacuggaguuuaacaaugaaagcuucaauuggacuggagucacucaaaacggaacaagcucugcuugcauaaggagaucuaauaacaguuucuuuaguagauugaauugguugacccacuuaaaauucaaauacccagcauugaacgugacuaugccaaacaaugaaaaauuugacaaauuguacauuugggggguucaccacccggguacggacaaugaccaaaucuuccuguaugcucaagcaucaggaagaaucacagucucuaccaaaagaagccaacaaacuguaaucccgaauaucggaucuagacccagaguaaggaauauccccagcagaauaagcauuuauuggacaauaguaaaaccgggagacauacuuuugauuaacagcacagggaaucuaauugcuccuagggguuacuucaaaauacgaagugggaaaagcucaauaaugagaucagaugcacccauuggcaaaugcaauucugaaugcaucacuccaaauggaagcauucccaaugacaaaccauuccaaaauguaaacaggaucacauacggggccugucccagauauguuaagcaaaacacucugaaauuggcaacagggaugcgaaauguaccagagaaacaaacuagaggcauauuuggcgcaaucgcggguuucauagaaaaugguugggagggaaugguggaugguugguacgguuucaggcaucaaaauucugagggaauaggacaagcagcagaucucaaaagcacucaagcagcaaucgaucaaaucaaugggaagcugaauagguugaucgggaaaaccaacgagaaauuccaucagauugagaaagaauucucagaagucgaagggagaauucaggaccuugagaaauauguugaggacaccaaaauagaucucuggucauacaacgcggagcuucuuguugcccuggagaaccaacauacaauugaucuaacugacucagaaaugaacaaacuguuugaaaaaacaaagaagcaacugagggaaaaugcugaggauaugggcaaugguuguuucaaaauauaccacaaaugugacaaugccugcauaggaucaaucagaaauggaacuuaugaccacgauguauacagagaugaagcauuaaacaaccgguuccagaucaagggcguugagcugaagucaggauacaaagauuggauccuauggauuuccuuugccauaucauguuuuuugcuuuguguugcuuuguugggguucaucaugugggccugccaaaaaggcaacauuaggugcaacauuugcauuuga

SEQ ID NO: 40109 - RNA, 1701 nt, Artificial Sequence
  derived and/or modified CDS sequence (wt) from hemagglutinin__InfluenzaA__AEX36113
augaagacuauuauugcuuugagcuacauucuaugucugguuuucgcucaaaaacuuccuggaaaugacaacagcacggcaacgcugugccuugggcaccaugcaguaccaaacggaacgauagugaaaacaaucacgaaugaccaaauugaaguuacuaaugcuacugagcugguucagaguuccucaacaggugaaauaugcgacaguccucaucagauccuugauggagaaaacugcacacuaauagaugcucuauugggagacccucagugugauggcuuccaaaauaagaaaugggaccuuuuuguugaacgcagcaaagccuacagcaacuguuacccuuaugaugugccggauuaugccucccuuagaucacuaguugccucauccggcacacuggaguuuaacaaugaaagcuucaauuggacuggagucacucaaaacggaacaagcucugcuugcauaaggagaucuaauaacagcuucuuuaguagauugaauugguugacccacuuaaaauucaaauacccagcauugaacgugacuaugccaaacaaugaaaaauuugacaaauuguacauuugggggguucaccacccggguacggacaaugaccaaaucuuccuguaugcucaagcaucaggaagaaucacagucucuaccaaaagaagccaacaaacuguaaucccgaauaucggaucuagacccagaguaaggaauauccccagcagaauaagcaucuauuggacaauaguaaaaccgggagacauacuuuugauuaacagcacagggaaucuaauugcuccuagggguuacuucaaaauacaaagugggaaaagcucaauaaugagaucagaugcacccauuggcaaaugcaauucugaaugcaucacuccaaauggaagcauucccaaugacaaaccauuccaaaauguaaacaggaucacauacggggccugucccagauauguuaagcaaaacacucugaaauuggcaacagggaugcgaaauguaccagagaaacaaacuagaggcauauuuggcgcaaucgcggguuucauagaaaaugguugggagggaaugguggaugguugguacgguuucaggcaucaaaauucugagggaauaggacaagcggcagaucucaaaagcacucaagcagcaaucgaucaaaucaaugggaagcugaauagguugaucgggaaaaccaacgagaaauuccaucagauugaaaaagaauucucagaagucgaagggagaauucaggaccuugagaaauauguugaggacaccaaaauagaucucuggucauacaacgcggagcuucuuguugcccuggagaaccaacauacaauugaucuaacugacucagaaaugaacaaacuguuugaaaaaacaaagaagcaacugagggaaaaugcugaggauaugggcaaugguuguuucaaaauauaccacaaaugugacaaugccugcauaggaucaaucagaaauggaacuuaugaccacgauguauacagagaugaagcauuaaacaaccgguuccagaucaagggcguugagcugaagucaggauacaaagauuggauccuauggauuucauuugccauaucauguuuuuugcuuuguguugcuuuguugggguucaucaugugggccugccaaaaaggcaacauuaggugcaacauuugcauuuga

SEQ ID NO: 40110 - RNA, 1701 nt, Artificial Sequence
  derived and/or modified CDS sequence (wt) from hemagglutinin__InfluenzaA__AEX36124
augaagacuaucauugcuuugagcuacauucuaugucugguuuucgcucaaaaacuuccuggaaaugacaacagcacggcaacgcugugccuugggcaccaugcaguaccaaacggaacaauagugaaaacaaucacgaaugaccaaauugaaguuacuaaugcuacugagcugguucagaguuccucaacaggugaaauaugcgacaguccucaucagauccuugauggagaaaacugcacacuaauagaugcucuauugggagacccucagugugauggcuuccaaaauaagaaaugggaccuuuuuguugaacgcagcaaagccuacagcaacuguuacccuuaugaugugccggauuaugccucccuuaggucacuaguugccucauccggcacacuggaguuuaacaaugaaagcuucaauuggacuggagucacucaaaauggaacaagcucugcuugcauaaggagaucuaauaacaguuucuuuaguagauugaauugguugacccacuuaaaauucaaauacccagcauugaacgugacuaugccaaacaaugaacaauuugacaaauuguacauuugggggguucaccacccggguacggacaaugaccaaaucuuccuguaugcucaagcaucaggaagaaucacagucucuaccaaaagaagccaacaaacuguaaucccgaauaucggaucuagacccagaguaaggaauaucccuagcagaauaagcaucuauuggacaauaguaaaaccgggagacauacuuuugauuaacagcacagggaaucuaauugcuccuagggguuacuucaaaauacgaaguggaaaaagcucaauaaugagaucagaugcacccauuggcaaaugcaauucugaaugcaucacuccaaauggaagcauucccaaugacaaaccauuccaaaauguaaacaggaucacauacggggccugucccagauauguuaagcaaaacacucugaaauuggcaacagggaugcgaaauguaccagagaaacaaacuagaggcauauuuggcgcaaucgcggguuucauagaaaaugguugggagggaaugguggaugguugguacgguuucaggcaucaaaauucugagggaagaggacaagcagcagaucucaaaaguacucaagcagcaaucgaucaaaucaaugggaagcugaauagauugaucgggaaaaccaacgagaaauuccaucagauugaaaaggaauucucagaagucgaagggagaauucaggaccuugagaaauauguugaggacaccaaaauagaucucuggucauacaacgcggagcuucuuguugcccuggagaaccaacauacaauugaucuaacugacucagaaaugaacaaacuguuugaaaaaacaaagaagcaacugagggaaaaugcugaggauaugggcaaugguuguuucaaaauauaccacaaaugugacaaugccugcauaggaucaaucagaaauggaacuuaugaccacgauguauacagagaugaagcauuaaacaaccgguuccagaucaagggaguugagcugaagucaggguacaaagauuggauccuauggauuuccuuugccauaucauguuuuuugcuuuguguugcuuuguugggguucaucaugugggccugccaaaaaggcaacauuaggugcaacauuugcauuuga

SEQ ID NO: 40111 - RNA, 1701 nt, Artificial Sequence
  derived and/or modified CDS sequence (wt) from hemagglutinin__InfluenzaA__AEX36146
augaagacuaucauugcuuugagcuacauucuaugucugguucucgcucaaaaacuuccuggagaugacaacagcacggcaacgcugugccuugggcaccaugcaguaccaaacggaacaauagugaaaacaaucacgaaugaccaaauugaaguuacuaaugcuacugagcugguucagaguuccucaacaggugaaauaugcgacaguccucaucagauccuugauggagaaaacugcacacuaauagaugcucuauugggagacccucagugugauggcuuccaaaauaagaaaugggaccuuuuuguugaacgcagcaaagccuacagcaacuguuacccuuaugaugugccggauuaugccucccuuaggucacuaguugccucauccggcacacuggaguuuaacaaugaaagcuucaauuggacuggagucacucaaaauggaacaagcucugcuugcauaaggagaucuaauaacaguuucuuuaguagauugaauugguugacccacuuaaaauucaaauacccagcauugaacgugacuaugccaaacaaugaacaauuugacaaauuguacauuugggggguucaccacccggguacggacaaugaccaaaucuuccuguaugcucaagcaucaggaagaaucacagucucuaccaaaagaagccaacaaacuguaaucccgaauaucggaucuagacccagaguaaggaauaucccuagcagaauaagcaucuauuggacaauaguaaaaccgggagacauacuuuugauuaacagcacagggaaucuaauugcuccuagggguuacuucaaaauacgaagugggaaaagcucaauaaugagaucagaugcacccauuggcaaaugcaauucugaaugcaucacuccaaauggaagcauucccaaugacaaaccauuccaaaauguaaacaggaucacauacggggccugucccagauauguuaagcaaaacacucugaaauuggcaacagggaugcgaaauguaccagagaaacaaacuagaggcauauuuggcgcaaucgcggguuucauagaaaaugguugggagggaaugguggaugguugguacgguuucaggcaucaaaauucugagggaagaggacaagcagcagaucucaaaagcacucaagcagcaaucgaucaaaucaaugggaagcugaauagauugaucgggaaaaccaacgagaaauuccaucagauugaaaaagaauucucagaagucgaagggagaauucaggaccuugagaaauauguugaggacaccaaaauagaucucuggucauacaacgcggagcuucuuguugcccuggagaaccaacauacaauugaucuaacugacucagaaaugaacaaacuguuugaaaaaacaaagaagcaacugagggaaaaugcugaggauaugggcaaugguuguuucaaaauauaccacaaaugugacaaugccugcauaggaucaaucagaaauggaacuuaugaccacgauguauacagagaugaagcauuaaacaaccgguuccagaucaagggaguugagcugaagucaggguacaaagauuggauccuauggauuuccuuugccauaucauguuuuuugcuuuguguugcuuuguugggguucaucaugugggccugccaaaaaggcaacauuaggugcaacauuugcauuuga

SEQ ID NO: 40112 - RNA, 1701 nt, Artificial Sequence
  derived and/or modified CDS sequence (wt) from hemagglutinin__InfluenzaA__AEX36168
augaagacuaucauugcuuugagcuacauucuaugucugguuuucgcucaaaaacuucccggaauugacaacagcacggcaacgcugugccuugggcaccaugcaguaccaaacggaacgauagugaaaacaaucacaaaugaccaaauugaaguuacuaaugcuacugagcugguucagaguuccucaacagguggaauaugcgacaguccucaucagauccuugauggagaaaacugcacacuaauagaugcucuauugggagacccucagugugauggcuuccaaaauaagaaaugggaccuuuuuguugaacgcagcaaagccuacagcaacuguuacccuuaugaugugccggauuaugccucccuuaggucacuaguugccucauccggcacacuggaguuuaacaaugaaagcuucaauugggcuggagucacucaaaauggaacaagcucugcuugcaaaaggggaucugauaacaguuucuuuaguagauugaauugguugacccacuuaaaauucaaauacccagcauugaacgugacuaugccaaacaaugaagaauuugacaaauuguacaucugggggguucaccacccggguacggacaaugaccaaaucuuccuguaugcucaagcaucaggaagaaucacagucucuaccaaaagaagccaacaaacuguaaucccgaauaucggaucuagacccagaguaaggaauauccccagcagaauaagcaucuauuggacaauaguaaaaccgggagacauacuuuugauuaacagcacagggaaucuaauugcuccuaggggcuacuucaaaauacgaagugggaaaagcucaauaaugagaucagaugcacccauuggcaaaugcaauucugaaugcaucacuccaaauggaagcauucccaaugacaaaccauuucaaaauguaaacaggaucacauacggggccugucccagauaugucaagcaaaacacucugaaauuggcaacagggaugcgaaauguaccagagaaacaaacuagaggcauauuuggcgcaaucgcggguuucauagaaaaugguugggagggaaugguggaugguugguacgguuucaggcaucaaaauucugagggaauaggacaagcagcagaucucaaaagcacucaagcagcaaucgaucaaaucaaugggaagcugaauaaguugaucgggaaaaccaacgagaaauuccaccagauugaaaaagaauucucagaaguagaagggagaauucaggaccucgagaaauauguugaggacacuaaaauagaucucuggucauacaacgcggagcuucuuguugcccuggagaaccaacauacaauugaucuaacugacucagaaaugaacaaacuguuugaaaaaacaaaaaagcaacugagggaaaaugcugaggauaugggcaaugguuguuucaaaauauaccacaaaugugacaaugccugcauaggaucaaucagaaauggaacuuaugaccaugauguauacagagaugaagcauuaaacaaccgguuuaagaucaagggcguugagcugaagucaggauacaaagauuggauccuauggauuuccuuugccauaucauguuuuuugcuuuguguugcuuuguugggguucaucaugugggccugccaaaaaggcaacauuaagugcaacauuugcauuuga

SEQ ID NO: 40113 - RNA, 1701 nt, Artificial Sequence; identical to SEQ ID NO: 40105
  derived and/or modified CDS sequence (wt) from hemagglutinin__InfluenzaA__AEX36179

SEQ ID NO: 40114 - RNA, 1701 nt, Artificial Sequence
  derived and/or modified CDS sequence (wt) from hemagglutinin__InfluenzaA__AEX36190
augaagacuaucauugcuuugagcuacauucuaugucugguuuucgcucaaaaauuuccuggaaaugacaacagcacggcaacgcugugccuugggcaccaugcaguaccaaacggaacgauagugaaaacaaucacgaaugaccaaauugaaguuacuaaugcuacugagcugguucagaguuccucaacaggugaaauaugcgacaguccucaucagauccuugauggagaaaacugcacacuaauagaugcucuauugggagacccucagugugauggcuuccaaaauaagaauugggaccuuuuuguugaacgcagcaaagccuacagcaacuguuacccuuaugaugugccggauuaugccucccuuaggucacuaguugccucauccggcacacuggaguuuaacaaugaaagcuucaauuggacuggagucacucaaaacggaacaagcucugcuugcauaaggagaucuaauaacaguuucuuuaguagauugaauugguugacccacuuaaaauucaaauacccagcauugaacgugacuaugccaaacaaugaaaauuuugacaaauuguacauuugggggguucaccacccggguacggacaaugaccaaaucuuccuguaugcucaagcaucaggaagaaucacagucucuaccaaaagaagccaacaaacuguaaucccgaauaucggaucuagacccagaguaaggaauaucccuagcagaauaagcaucuauuggacaauaguaaaaccgggagacauacuuuugauuaacagcacagggaaucuaauugcuccuagggguuacuucaaaauacgaagugggaaaagcucaauaaugagaucagaugcacccauuggcaaaugcaauuccgaaugcaucacuccaaauggaagcauucccaaugacaaaccauuccaaaauguaaacaggaucacauacggggccugucccagauauguuaagcaaaacacucugaaauuggcaacagggaugcgaaauguaccagagaaacaaacuagaggcauauuuggcgcaaucgcugguuucauagaaaaugguugggagggaaugguggaugguugguacgguuucaggcaucaaaauucugagggaauaggacaagcagcagaucucaaaagcacucaagcagcaaucgaucaaaucaaugggaagcugaauagguugaucgggaaaaccaacgagaaauuccaucagauugaaaaagaauucucagaagucgaagggagaauucaggaccuugagaaauauguugaggacaccaaaauagaucucuggucauacaacgcggagcuucuuguugcccuggagaaccaacauacaauugaucuaacugauucagaaaugaacaaacuguuugaaaaaacaaagaagcaacugagggaaaaugcugaggauaugggcaaugguuguuucaaaaucuaccacaaaugugacaaugccugcauaggaucaaucagaaauggaacuuaugaccacgauguauacagagaugaagcauuaaacaaccgguuccagaucaagggcguugagcugaagucaggauacaaagauuggauccuauggauuuccuuugccauaucauguuuuuugcuuuguauugcuuuguugggguucaucaugugggccugccaaaaaggcaacauuaggugcaacauuugcauuuga

SEQ ID NO: 40115 - RNA, 1701 nt, Artificial Sequence; identical to SEQ ID NO: 39992
  derived and/or modified CDS sequence (wt) from hemagglutinin__InfluenzaA__AEX36201

SEQ ID NO: 40116 - RNA, 1701 nt, Artificial Sequence
  derived and/or modified CDS sequence (wt) from hemagglutinin__InfluenzaA__AEX36212
augaagacuaucauugcuuugagcuacauucuaugucugguuuucgcucaaaaacuucccggaauugacaacagcacggcaacgcugugccuugggcaccaugcaguaccaaacggaacgauagugaaaacaaucacgaaugaccaaauugaaguuacuaaugcuacugagcugguucagaauuccucaacagguggaauaugcgacaguccucaucagauccuugauggagaaaacugcacacuaauagaugcucuauugggagacccucagugugauggcuuccaaaauaagaaaugggaccuuuuuguugaacgcagcaaagccuacagcaacuguuacccuuaugaugugccggauuaugccucccuuaggucacuaguugccucauccggcacacuggaguuuaacaaugaaagcuucaauuggacuggagucacucaaaauggaacaagcucugcuugcaaaaggggaucuaauaacaguuucuuuaguagauugaauugguugacccacucaaaauucaaauacccagcauugaacgugacuaugccaaacaaugaagaauuugacaaauuguacauuugggggguucaccacccggguacggacaaugaccaaaucuuccuguaugcucaagcaucaggaagaaucacagucucuaccaaaauaagccaacaaacuguaaucccgaauaucggaucuagacccagaguaaggaauauccccagcagaauaagcaucuauuggacaauaguaaaaccgggagacauacuuuugauuaacagcacagggaaucuaauugcuccuagggguuacuucaaaauacgaagugggaaaagcucaauaaugagaucagaugcacccauuggcaaaugcaauucugaaugcaucacuccaaauggaagcauucccaaugacaaaccauuucaaaauguaaacaggaucacauacggggccugucccagauauguuaagcaaaacacucugaaauuggcaacagggaugcgaaauguaccagagaaacaaacuagaggcauauuuggcgcaaucgcggguuucauagaaaaugguugggagggaaugguggaugguugguacgguuucaggcaucaaaauucugagggaauaggacaagcagcagaucucaaaagcacucaagcagcaaucgaucaaaucaaugggaagcugaauagguugaucgggaaaaccaacgagaaauuccaccagauugaaaaagaauucucagaaguagaagggagaauucaggaccucgagaaauauguugaggacacuaaaauagaucucuggucauacaacgcggagcuucuuguugcccuggagaaccaacauacaauugaucuaacugacucagaaaugaacaaacuguuugaaaagacaaagaagcaacugagggaaaaugcugaggauaugggcaaugguuguuucaaaauauaccacaaaugugacaaugccugcauaggaucaaucagaaauggaacuuaugaccaugauguauacagagaugaagcauuaaacaaccgguuucagaucaagggcguugagcugaagucaggauacaaagauuggauccuauggauuuccuuugccauaucauguuuuuugcuuuguguugcuuuguugggguucaucaugugggccugccaaaaaggcaacauuaggugcaacauuugcauuuga

SEQ ID NO: 40117 - RNA, 1701 nt, Artificial Sequence; identical to SEQ ID NO: 39990
  derived and/or modified CDS sequence (wt) from hemagglutinin__InfluenzaA__AEX36223

SEQ ID NO: 40118 - RNA, 1701 nt, Artificial Sequence
  derived and/or modified CDS sequence (wt) from hemagglutinin__InfluenzaA__AEX36234
augaagacuaucauugcuuugagcuacauucuaugucugguuuucgcucaaaaacuucccggaaaugacaacagcacggcaacgcugugccuugggcaccaugcaguaccaaacggaacgauagugaaaacaaucacgaaugaccaaauugaaguuacuaaugcuacugagcugguucagaguuccucaacagguggaauaugcgacaguccucaucagauccuugauggagaaaacugcacacuaauagaugcucuauugggagacccucagugugauggcuuccaaaauaagaaaugggaccuuuuuguugaacgcagcaaagccuacagcaacuguuacccuuaugaugugccggauuaugccucccuuaggucacuaguugccucaucuggcacacuggaguuuaacaaugaaagcuucaauuggacgggagucacucaaaauggaacaagcucugcuugcaaaaggggaucugauaacaguuucuuuaguaaauugaauugguugacccacuuaaaauucaaauacccagcauugaacgugacuaugccaaacaaugaaaaauuugacaaauuguacauuugggggguucaccacccggguacggacaaugaccaaaucuuccuguaugcucaagcaucaggaagaaucacagucucuaccaaaagaagccaacaaacuguaaucccgaauaucggaucuagacccagaguaaggaauauccccagcagaauaagcaucuauuggacaauaguaaaaccgggagacauacuuuugauuaacagcacagggaaucuaauugcuccuagggguuacuucaaaauacgaagugggaaaagcucaauaaugagaucagaugcacccauuggcaaaugcaauucugaaugcaucacuccaaauggaagcauucccaaugacaaaccauuucaaaauguaaacaggaucacauauggggccugucccagauauguuaagcagaacacccugaaauuggcaacagggaugcgaaauguaccagagaaacaaacuagaggcauauuuggcgcaaucgcggguuucauagaaaaugguugggagggaaugguggaugguugguacgguuucaggcaucaaaauucugagggaauaggacaagcagcagaucucaaaagcacucaagcagcaaucaaucaaaucaaugggaagcugaauagguugaucgggaaaaccaacgagaaauuccaucagauugaaaaagaauucucagaaguagaagggagaauucaggaccucgagaaauauguugaggacacuaaaauagaucucuggucauacaacgcggagcuucuuguugcccuggagaaccaacauacaauugaucuaacugacucagaaaugaacaaacuguuugaaagaacaaagaagcaacugagggaaaaugcugaggauaugggcaaugguugucucaaaauauaccacaaaugugacaaugccugcauaggaucaaucagaaauggaacuuaugaccaugauguauacagagaugaagcauuaaacaaccgguuccagaucaaaggcguugagcugaagucaggcuacaaagauuggauccuauggauuuccuuugccauaucauguuuuuugcuuuguguugcuuuguugggguucaucaugugggccugccaaaaaggcaacauuaggugcaacauuugcauuuaa

SEQ ID NO: 40119 - RNA, 1701 nt, Artificial Sequence
  derived and/or modified CDS sequence (wt) from hemagglutinin__InfluenzaA__AEX36245
augaagacuaucauugcuuugagcuacauucuaugucugguuuucgcucaaaaacuucccggaauugacaacagcacggcaacgcugugccuugggcaccaugcaguaccaaacggaacgauagugaaaacaaucacgaaugaccaaauugaaguuacuaaugcuacugagcugguucagaauuccucaacagguggaauaugcgacaguccucaucagauccuugauggagaaaacugcacacuaauagaugcucuauugggagacccucagugugauggcuuccaaaauaagaaaugggaccuuuuuguugaacgcagcaaaaccuacagcaacuguuacccuuaugaugugccggauuaugccucccuuaggucacuaguugccucauccggcacacuggaguuuaacaaugaaagcuucaauuggacuggagucacucaaaauggaacaagcucugcuugcaaaaggggaucuaauaacaguuucuuuaguagauugaauugguugacccacucaaaauucaaauacccagcauugaacgugacuaugccaaacaaugaagaauuugacaaauuguacauuugggggguucaccacccggguacggacaaugaccaaaucuuccuguaugcucaagcaucaggaagaaucacagucucuaccaaaagaagccaacaaacuguaaucccgaauaucggaucuagacccagaguaaggaauauccccagcagaauaagcaucuauuggacaauaguaaaaccgggagacauacuuuugauuaacagcacagggaaucuaauugcuccuagggguuacuucaaaauacgaagugggaaaagcucaauaaugagaucagaugcacccauuggcaaaugcaauucugaaugcaucacuccaaauggaagcauucccaaugacaaaccauuucaaaauguaaacaggaucacauacggggccugucccagauauguuaagcaaaacacucugaaauuggcaacagggaugcgaaauguaccagagaaacaaacuagaggcauauuuggcgcaaucgcggguuucauagaaaaugguugggagggaaugguggaugguugguacgguuucaggcaucaaaauucugagggaauaggacaagcagcagaucucaaaagcacucaagcagcaaucgaucaaaucaaugggaagcugaauagguugaucgggaaaaccaacgagaaauuccaccagauugaaaaagaauucucagaaguagaagggagaauucaggaccucgagaaauauguugaggacacuaaaauagaucucuggucauacaacgcggagcuucuuguugcccuggagaaccaacauacaauugaucuaacugacucagaaaugaacaaacuguuugaaaagacaaagaagcaacugagggaaaaugcugaggauaugggcaaugguuguuucaaaauauaccacaaaugugacaaugccugcauaggaucaaucagaaauggaacuuaugaccaugauguauacagagaugaagcauuaaacaaccgguuccagaucaagggcguugagcugaagucaggauacaaagauuggauccuauggauuuccuuugccauaucauguuuuuugcuuuguguugcuuuguugggguucaucaugugggccugccaaaaaggcaacauuaggugcaacauuugcauuuga

SEQ ID NO: 40120 - RNA, 1701 nt, Artificial Sequence
  derived and/or modified CDS sequence (wt) from hemagglutinin__InfluenzaA__AEX36256
augaagacuaucauugcuuugagcuauauucuaugucugguuuucacucaaaaacuuccuggaaaugacaacagcacggcaacgcugugccuugggcaccaugcaguaccaaacggaacgauagugaaaacaaucacgaaugaccaaauugaaguuacuaaugcuacugagcugguucagaguuccucaacaggugaaauaugcgacaguccucaucagauccuugauggagaaaacugcacacuaauagaugcucuauugggagacccucagugugauggcuuccaaaauaagaaaugggaccuuuuuguugaacgcagcaaagccuacagcaacuguuacccuuaugaugugccagauuaugccucccuuaggucacuaguugccucauccggcacacuggaguuuaacaaugaaagcuucaauuggacuggagucacucaaaacggaacaagcucugcuugcauaaggaaaucuaauaacaguuucuuuaguagauugaauugguugacccacuuaaaauucaaauacccagcauugaacgugacuaugccaaacaaugaacaauuugacaaauuguacauuugggggguucaccacccggguacggacaaugaccaaaucuuccuguaugcucaagcaucaggaagaaucacagucucuaccaaaagaagccaacaaacuguaaucccgaauaucggaucuagacccagaguaaggaauaucccuagcagaauaagcaucuauuggacaauaguaaaaccgggagacauacuuuugauuaacagcacagggaaucuaauugcuccuagggguuacuucaaaauacgaagugggaaaagcucaauaaugagaucagaugcacccauuggcaaaugcaauucugaaugcaucacuccaaauggaagcauucccaaugacaaaccauuccaaaauguaaacaggaucacauacggggccugucccagauauguuaagcaaaacacucugaaauuggcaacagggaugcgaaauguaccagagaaacaaacuagaggcauauuuggcgcaaucgcggguuucauagaaaaugguugggagggaaugguggaugguugguacgguuucaggcaucaaaauucugagggaagaggacaagcagcagaucucaaaagcacucaagcagcaaucgaucaaaucaaugggaagcugaauagauugaucgggaaaaccaacgagaaauuccaucagauugaaaaagaauucucagaagucgaagggagaauucaggaccuugagaaauauguugaggacaccaaaauagaucucuggucauacaacgcggagcuucuuguugcccuggagaaccaacauacaauugaucuaacugacucagaaaugaacaaacuguuugaaaaaacaaagaagcaacugagggaaaaugcugaggauaugggcaaugguuguuucaaaauauaccacaaaugugacaaugccugcauaggaucaaucagaaauggaacuuaugaccacgauguauacagagaugaagcauuaaacaaccgguuccagaucaagggaguugagcugaagucaggguacaaagauuggauccuauggauuuccuuugccauaucauguuuuuugcuuuguguugcuuuguugggguucaucaugugggccugccaaaaaggcaacauuaggugcaacauuugcauuuga

SEQ ID NO: 40121 - RNA, 1701 nt, Artificial Sequence
  derived and/or modified CDS sequence (wt) from hemagglutinin__InfluenzaA__AEX36267
augaagacuaucauugcuuugagcuacauucuaugucugguuuucgcucaaaaacuucccggaauugacaacagcacggcaacgcugugccuugggcaccaugcaguaccaaacggaacgauagugaaaacaaucacgaaugaccaaauugaaguuacuaaugcuacugagcugguucagaauuccucaacagguggaauaugcgacaguccucaucagauccuugauggagaaaacugcacacuaauagaugcucuauugggagacccucagugugauggcuuccaaaauaagaaaugggaccuuuuuguugaacgcagcaaagccuacagcaacuguuacccuuaugaugugccggauuaugccucccuuaggucacuaguugccucauccggcacacuggaguuuaacaaugaaagcuucaauuggacuggagucacucaaaauggaacaagcucugcuugcaaaaggggaucuaauaacaguuucuuuaguagauugaauugguugacccacucaaaauucaaauacccagcauugaacgugacuaugccaaacaaugaagaauuugacaaauuguacauuugggggguucaccacccggguacggacaaugaccaaaucuuccuguaugcucaagcaucaggaagaaucacagucucuaccaaaagaagccaacaaacuguaaucccgaauaucggaucuagacccagaguaaggaauauccccagcagaauaagcaucuauuggacaauaguaaaaccgggagacauacuuuugauuaacagcacagggaaucuaauugcuccuagggguuacuucaaaauacgaagugggaaaagcucaauaaugagaucagaugcacccauuggcaaaugcaauucugaaugcaucacuccaaauggaagcauucccaaugacaaaccauuucaaaauguaaacaggaucacauacggggccugucccagauauguuaagcaaaacacucugaaauuggcaacagggaugcgaaauguaccagagaaacaaacuagaggcauauuuggcgcaaucgcggguuucauagaaaaugguugggagggaaugguggaugguugguacgguuucaggcaucaaaauucugagggaauaggacaagcagcagaucucaaaagcacucaagcagcaaucgaucaaaucaaugggaagcugaauagguugaucgggaaaaccaacgagaaauuccaccagauugaaaaagaauucucagaaguagaagggagaauccaggaccucgagaaauauguugaggacacuaaaauagaucucuggucauacaacgcggagcuucuuguugcccuggagaaccaacauacaauugaucuaacugacucagaaaugaacaaacuguuugaaaagacaaagaagcaacugagggaaaaugcugaggauaugggcaaugguuguuucaaaauauaccacaaaugugacaaugccugcauaggaucaaucagaaauggaacuuaugaccaugauguauacagagaugaagcauuaaacaaccgguuucagaucaagggcguugagcugaagucaggauacaaagauuggauccuauggauuuccuuugccauaucauguuuuuugcuuuguguugcuuuguugggguucaucaugugggccugccaaaaaggcaacauuaggugcaacauuugcauuuga

SEQ ID NO: 40122 - RNA, 1701 nt, Artificial Sequence
  derived and/or modified CDS sequence (wt) from hemagglutinin__InfluenzaA__AEX36289
augaagacuaucauugcuuugagcuacauucuaugucugguuuucgcucaaaaacuucccggaauugacaacagcacggcaacgcugugccuugggcaccaugcaguaccaaacggaacgauagugaaaacaaucacgaaugaccaaauugaaguuacuaaugcuacugagcugguucagaauuccucaacagguggaauaugcgacaguccucaucagauccuugauggagaaaacugcacacuaauagaugcucuauugggagacccucagugugauggcuuccaaaauaagaaaugggaccuuuuuguugaacgcagcaaagccuacagcaacuguuacccuuaugaugugccggauuaugccucccuuaggucacuaguugccucauccggcacacuggaguuuaacaaugaaagcuucaauuggacuggagucacucaaaauggaacaagcucugcuugcaaaaggggaucuaauaacaguuucuuuaguagauugaauugguugacccacucaaaauucaaauacccagcauugaacgugacuaugccaaacaaugaagaauuugacaaauuguacauuugggggguucaccacccggguacggacaaugaccaaaucuuccuguaugcucaagcaucaggaagaaucacagucucuaccaaaauaagccaacaaacuguaaucccgaauaucggaucuagacccagaguaaggaauauccccagcagaauaagcaucuauuggacaauaguaaaaccgggagacauacuuuugauuaacagcacaggaaaucuaauugcuccuagggguuacuucaaaauacgaagugggaaaagcucaauaaugagaucagaugcacccauuggcaaaugcaauucugaaugcaucacuccaaauggaagcauucccaaugacaaaccauuucaaaauguaaacaggaucacauacggggccugucccagauauguuaagcaaaacacucugaaauuggcaacagggaugcgaaauguaccagagaaacaaacuagaggcauauuuggcgcaaucgcggguuucauagaaaaugguugggagggaaugguggaugguugguacgguuacaggcaucaaaauucugagggaauaggacaagcagcagaucucaaaagcacucaagcagcaaucgaucaaaucaaugggaagcugaauagguugaucgggaaaaccaacgagaaauuccaccagauugaaaaagaauucucagaaguagaagggagaauucaggaccucgagaaauauguugaggacacuaaaauagaucucuggucauacaacgcggagcuucuuguugcccuggagaaccaacauacaauugaucuaacugacucagaaaugaacaaacuguuugaaaagacaaagaagcaacugagggaaaaugcugaggauaugggcaaugguuguuucaaaauauaccacaaaugugacaaugccugcauaggaucaaucagaaauggaacuuaugaccaugauguauacagagaugaagcauuaaacaaccgguuucagaucaagggcguugagcugaaguuaggauacaaagauuggauccuauggauuuccuuugccauaucauguuuuuugcuuuguguugcuuuguugggguucaucaugugggccugccaaaaaggcaacauuaggugcaacauuugcauuuga

SEQ ID NO: 40123 - RNA, 1701 nt, Artificial Sequence
  derived and/or modified CDS sequence (wt) from hemagglutinin__InfluenzaA__AEX36300
augaagacuaucauugcuuugagcuacauucuaugucugguuuucgcucaaaaacuucccggaauugacaacagcacggcaacgcugugccuugggcaccaugcaguaccaaacggaacgauagugaaaacaaucacgaaugaccaaauugaaguuacuaaugcuacugagcugguucagaauuccucaacagguggaauaugcgacaguccucaucagauccuugauggagaaaacugcacacuaauagaugcucuauugggagacccucagugugauggcuuccaaaauaaaaaaugggaccuuuuuguugaacgcagcaaagccuacagcaacuguuacccuuaugaugugccggauuaugccucccuuaggucacuaguugccucauccggcacacuggaguuuagcaaugaaagcuucaauuggacuggagucacucaaaauggaacaagcucugcuugcaaaaggggaucuaauaacaguuucuuuaguaaauugaauugguugacccacucaaaauucaaauacccagcauugaacgugacuaugccaaacaaugaagaauuugacaaauuguacauuugggggguucaccacccggguacggacaaugaccaaaucuuccuguaugcucaagcaucaggaagaaucacagucucuaccaaaagaagccaacaaacuguaaucccgaauaucggaucuagacccagaguaaggaauauccccagcagaauaagcaucuauuggacaauaguaaaaccgggagacauacuuuugauuaacagcacagggaaucuaauugcuccuagggguuacuucaagauacgaagugggaaaagcucaauaaugagaucagaugcacccauuggcaaaugcaauucugaaugcaucacuccaaauggaagcauccccaaugacaaaccauuucaaaauguaaacaggaucacauacggggccugucccagauauguuaagcaaaacacucugaaauuggcaacagggaugcgaaauguaccagagaaacaaacuagaggcauauuuggcgcaaucgcggguuucauagaaaaugguugggagggaaugguggaugguugguacgguuucaggcaucaaaauucugagggaauaggacaagcagcagaucucaaaagcacucaagcagcaaucgaucaaaucaaugggaagcugaauagguugaucgggaaaaccaacgagaaauuccaccagauugaaaaagaauucucagaaguagaagggagaauucaggaccucgagaaauauguugaggacacuaaaauagaucucuggucauacaacgcggagcuucuuguugcccuggagaaccaacauacaauugaucuaacugacucagaaaugaacaaacuguuugaaaagacaaagaagcaacugagggaaaaugcugaggauaugggcaaugguuguuucaaaauauaccacaaaugugacaaugccugcauaggaucaaucagaaauggaacuuaugaccaugauguauacagagaugaagcauuaaacaaccgguuucagaucaagggcguugaacugaagucaggauacaaagauuggauccuauggauuuccuuugccauaucauguuuuuugcuuuguguugcuuuguugggguucaucaugugggccugccaaaaaggcaacauuaggugcaacauuugcauuuga

SEQ ID NO: 40124 - RNA, 1701 nt, Artificial Sequence
  derived and/or modified CDS sequence (wt) from hemagglutinin__InfluenzaA__AEX36311
augaagacuaucauugcuuugagcuacauucuaugucugguuuucgcucaaaaacuucccggaauugacaacagcacggcaacgcugugccuugggcaccaugcaguaccaaacggaacgauagugaaaacaaucacgaaugaccaaauugaaguuacuaaugcuacugagcugguucagaguuccucaacagguggaauaugcgacaguccucaucagauccuugauggagaaaacugcacacuaauagaugcucuauugggagacccucagugugauggcuuccaaaauaagaaaugggaccuuuuuguugaacgcagcaaagccuacagcaacuguuacccuuaugaugugccggauuaugccucccuuaggucacuaguugccucauccggcacacuggaguucaacaaugaaagcuucaauugggcuggagucacucaaaauggaacaagcucugcuugcaaaaggggaucuaauaacaguuucuuuaguagauugaauugguugacccacuuaaaauucaaauacccagcauugaacgugacuaugccaaacaaugaagaauuugacaaauuguacauuugggggguucaccacccggguacggacaaugaccaaaucuuccuguaugcucaagcaucaggaagaaucacagucucuaccaaaagaagccaacaaacuguaaucccgaauaucggaucuagacccagaguaaggaauauccccagcagaauaagcaucuauuggacaauaguaaaaccgggagacauacuuuugauuaacagcacagggaaucuaauugcuccuaggggcuacuucaaaauacgaagugggaaaagcucaauaaugagaucagaugcacccauuggcaaaugcaauucugaaugcaucacuccaaauggaagcauucccaaugacaaaccauuucaaaauguaaacaggaucacauacggggccugucccagauauguuaaacaaaacacucugaaauuggcaacagggaugcgaaauguaccagagaaacaaacuagaggcauauuuggcgcaaucgcggguuucauagaaaaugguugggagggaaugguggaugguugguacgguuucaggcaucaaaauucugagggaauaggacaagcagcagaucucaaaagcacucaagcagcaaucgaucaaaucaaugggaagcugaauagguugaucgggaaaaccaacgagaaauuccaccagauugaaaaagaauucucagaaguagaagggagaauucaggaccucgagaaauauguugaggacacuaaaauagaucucuggucauacaacgcggagcuucuuguugcccuggagaaccaacauacaauugaucuaacugacucagaaaugaacaaacuguuugaaaaaacaaagaagcaacugagggaaaaugcugaggauaugggcaaugguuguuucaaaauauaccacaaaugugacaaugccugcauaggaucaaucagaaauggaacuuaugaccaugauguauacagagaugaagcauuaaacaaccgguuucagaucaagggcguugagcugaagucaggauacaaagauuggauccuauggauuuccuuugccauaucauguuuuuugcuuuguguugcuuuguugggguucaucaugugggccugccaaaaaggcaacauuaggugcaacauuugcauuuga

SEQ ID NO: 40125 - RNA, 1701 nt, Artificial Sequence
  derived and/or modified CDS sequence (wt) from hemagglutinin__InfluenzaA__AEX36322
augaagacuaucauugcuuugagcuacauucuaugucugguuuucgcucaaaaacuucccggaauugacaacagcacggcaacgcugugccuugggcaccaugcaguaccaaacggaacgauagugaaaacaaucacgaaugaccaaauugaaguuacuaaugcuacugagcugguucagaauuccucaacagguggaauaugcgacaguccucaucagauccuugauggagaaaacugcacacuaauagaugcucuauugggagacccucagugugauggcuuccaaaauaagaaaugggaccuuuuuguugaacgcagcaaagccuacagcaacuguuacccuuaugaugugccggauuaugccucccuuaggucacuaguugccucauccggcacacuggaguuuaacaaugaaagcuucaauuggacuggagucacucaaaauggaacaagcucugcuugcaaaaggggaucuaauaacaguuucuuuaguagauugaauugguugacccacucaaaauucaaauacccagcauugaacgugacuaugccaaacaaugaagaauuugacaaauuguacauuugggggguucaccacccggguacggacaaugaccaaaucuucccuuaugcucaagcaucaggaagaaucacagucucuaccaaaauaagccaacaaacuguaaucccgaauaucggaucuagacccagaguaaggaauauccccagcagaauaagcaucuauuggacaauaguaaaaccgggagacauacuuuugauuaacagcacagggaaucuaauugcuccuagggguuacuucaaaauacgaagugggaaaagcucaauaaugagaucagaugcacccauuggcaaaugcaauucugaaugcaucacuccaaauggaagcauucccaaugacaaaccauuucaaaauguaaacaggaucacauacggggccugucccagauauguuaagcaaaacacucugaaauuggcaacagggaugcgaaauguaccagagaaacaaacuagaggcauauuuggcgcaaucgcggguuucauagaaaaugguugggagggaaugguggaugguugguacgguuucaggcaucaaaauucugagggaauaggacaagcagcagaucucaaaagcacucaagccgcaaucgaucaaaucaaugggaagcugaauagguugauugggaaaaccaacgagaaauuccaccagauugaaaaagaauucucagaaguagaagggagaauucaggaccucgagaaauauguugaggacacuaaaauagaucucuggucauacaacgcggagcuucuuguugcccuggagaaccaacauacaauugaucuaacugacucagaaaugaacaaacuguuugaaaagacaaagaagcaacugagggaaaaugcugaggauaugggcaaugguuguuucaaaauauaccacaaaugugacaaugccugcauaggaucaaucagaaauggaacuuaugaccaugauguauacagagaugaagcauuaaacaaccgguuucagaucaagggcguugagcugaagucaggauacaaagauuggauccuauggauuuccuuugccauaucauguuuuuugcuuuguauugcuuuguugggguucaucaugugggccugccaaaaaggcaacauuaggugcaacauuugcauuuga

SEQ ID NO: 40126 - RNA, 1701 nt, Artificial Sequence
  derived and/or modified CDS sequence (wt) from hemagglutinin__InfluenzaA__AEX36333
augaagacuaucauugcuuugagcuacauucuaugucugguuuucgcucaaaaacuucccggaauugacaacagcacggcaacgcugugucuugggcaccaugcaguaccaaacggaacgauagugaaaacaaucacgaaugaccaaauugaaguuacuaaugcuacugagcugguucagaauuccucaacagguggaauaugcgacaguccucaucagauccuugauggagaaaacugcacacuaauagaugcucuauugggagacccucagugugauggcuuccaaaauaagaaaugggaccuuuuuguugaacgcagcaaagccuacagcaacuguuacccuuaugaugugccggauuaugccucccuuaggucacuaguugccucauccggcacacuggaguuuaacaaugaaagcuucaauuggacuggagucacucaaaauggaacaagcucugcuugcaaaaggggaucuaauaacaguuucuuuaguagauugaauugguugacccacucaaaauucaaauacccagcauugaacgugacuaugccaaacaaugaagaauuugacaaauuguacauuugggggguucaccacccggguacggacaaugaccaaaucuuccuguaugcucaagcaucaggaagaaucacagucucuaccaaaagaagccaacaaacuguaaucccgaauaucggaucuagacccagaguaaggaauauccccagcagaauaagcaucuauuggacaauaguaaaaccgggagacauacuuuugauuaacagcacagggaaucuaauugcuccuagggguuacuucaaaauacgaagugggaaaagcucaauaaugagaucagaugcacccauuggcaaaugcaauucugaaugcaucacuccaaauggaagcauucccaaugacaaaccauuucaaaauguaaacaggaucacauacggggccugucccagauauguuaagcaaaacacucugaaauuggcaacagggaugcgaaauguaccagagaaacaaacuagaggcauauuuggcgcaaucgcggguuucauagaaaaugguugggagggaaugguggaugguugguacgguuucaggcaucaaaauucugagggaauaggacaagcagcagaucucaaaagcacucaagcagcaaucgaucaaaucaaugggaagcugaauagguugaucgggaaaaccaacgagaaauuccaccagauugaaaaagaauucucagaaguagaagggagaauucaggaccucgagaaauauguugaggacacuaaaauagaucucuggucauacaaugcggagcuucuuguugcccuggagaaccaacauacaauugaucuaacugacucagaaaugaacaaacuguuugaaaagacaaagaagcaacugagggaaaaugcugaggauaugggcaaugguuguuucaaaauauaccacaaaugugacaaugccugcauaggaucaaucagaaauggaacuuaugaccaugaugcauacagagaugaagcauuaaacaaccgguuucagaucaagggcguugagcugaagucaggauacaaagauuggauccuauggauuuccuuugccauaucauguuuuuugcuuuguguugcuuuguugggguucaucaugugggccugccaaaaaggcaacauuaggugcaacauuugcauuuga

SEQ ID NO: 40127 - RNA, 1701 nt, Artificial Sequence
  derived and/or modified CDS sequence (wt) from hemagglutinin__InfluenzaA__AEX36344
augaagacuaucauugcuuugagcuacauucuaugucugguuuucgcucaaaaacuucccggaauugacaacagcacggcaacgcugugccuugggcaccaugcaguaccaaacggaacgauagugaaaacaaucacgaaugaccaaauugaaguuacuaaugcuacugagcugguucagaguuccucaacagguggaauaugcgacaguccucaucagauccuugauggagaaaacugcacacuaauagaugcucuauugggagacccucagugugauggcuuccaaaauaagaaaugggaccuuuuuguugaacgcagcaaugccuacagcaacuguuacccuuaugaugugccggauuaugccucccuuaggucacuaguugccucauccggcacacuggaguuuaacaaugaaagcuucaauugggcuggagucacucaaaauggaacaagcucugcuugcaaaaggggaucuaauaacaguuucuuuaguagauugaauugguugacccacuuaaaauucaaauacccagcauugaacgugacuaugccaaacaaugaagaauuugacaaauuguacauuugggggguucaccacccggguacggacaaugaccaaaucuuccuguaugcucaagcaucaggaagaaucacagucucuaccaaaagaagccaacaaacuguaaucccgaauaucggaucuagacccagaguaaggaauauccccagcagaauaagcaucuauuggacaauaguaaaaccgggagacauacuuuugauuaacagcacagggaaucuaauugcuccuaggggcuacuucaaaauacgaagugggaaaagcucaauaaugagaucagaugcacccauuggcaaaugcaauucugaaugcaucacuccaaauggaagcauucccaaugacaaaccauuucaaaauguaaacaggaucacauacggggccugucccagauauguuaagcaaaacacucugaaauuggcaacagggaugcgaaauguaccagagaaacaaacuagaggcauauuuggcgcaaucgcggguuucauagaaaaugguugggagggaaugguggaugguugguacgguuucaggcaucaaaauucugagggaauaggacaagcagcagaucucaaaagcacucaagcagcaaucgaucaaaucaaugggaagcugaauagguugaucgggaaaaccaacgagaaauuccaccagauugaaaaagaauucucagaaguagaagggagaauucaggaccucgagaaauauguugaggacacuaaaauagaucucuggucauacaacgcggagcuucuuguugcccuggagaaccaacauacaauugaucuaacugacucagaaaugaacaaacuguuugaaaaaacaaagaagcaacugagggaaaaugcugaggauaugggcaaugguuguuucaaaauauaccacaaaugugacaaugccugcauagaaucaaucagaaauggaacuuaugaccaugauguauacagagaugaagcauuaaacaaccgguuucagaucaagggcguugagcugaagucaggauacaaagauuggauccuauggauuuccuuugccauaucauguuuuuugcuuuguguugcuuuguugggguucaucaugugggccugccaaaaaggcaacauuaggugcaacauuugcauuuga

SEQ ID NO: 40128 - RNA, 1701 nt, Artificial Sequence
  derived and/or modified CDS sequence (wt) from hemagglutinin__InfluenzaA__AEX36366
augaagacuaucauugcuuugagcuacauucuaugucugguuuucgcucaaaaacuuuccggaaaugacaacagcacggcaacgcugugccuugggcaccaugcaguaccaaacggaacgauagugaaaacaaucacgaaugaccagauugaaguuacuaaugcuacugagcugguucagaguuccucaacaggugaaauaugcgacaguccucaucagauccuugauggagaaaacugcacacuaauagaugcucuauugggagacccucagugugauggcuuccaaaauaagaaaugggaccuuuuuguugaacgcagcaaagccuacagcaacuguuacccuuaugaugugccggauuaugccucccuuaggucacuaguugccucauccggcacacuggaguuuaacaaugaaagcuucaauuggacuggagucacucaaaacggaacaagcucugcuugcauaaggagaucuaauaacaguuucuuuaguagauugaauugguugacccacuuaaaauucaaauacccagcauugaacgugacuaugccaaacaaugaaaaauuugacaaauuguacauuugggggguucaccacccggguacggacaaugaccaaaucuuccuguaugcucaagcaucaggaagaaucacagucucuaccaaaagaagccaacaaacuguaaucccgaauaucggaucuagacccagaguaaggaauauccccagcagaauaagcauuuauuggacaauaguaaaaccgggagacauacuuuugauuaacagcacagggaaucuaauugcuccuagggguuacuucaaaauacgaagugggaaaagcucaauaaugagaucagaugcacccauuggcaaaugcaauucugaaugcauaacuccaaauggaagcauucccaaugacaaaccauuccaaaauguaaacaggaucacauacggggccugucccagauauguuaagcaaaacacucugaaauuggcaacagggaugcgaaauguaccagagaaacaaacuagaggcauauuuggcgcaaucgcggguuucauagaaaaugguugggagggaaugguggaugguugguacgguuucaggcaucaaaauucugagggaauaggacaagcagcagaucucaaaagcacucaagcagcaaucgaucaaaucaaugggaagcugaauagguugaucgggaaaaccaacgagaaauuccaucagauugaaaaagaauucucagaagucgaagggagaauucaggaucuugagaaauauguugaggacaccaaaauagaucucuggucauacaacgcggagcuucuuguugcccuggagaaccaacauacaauugaucuaacugacucagaaaugaacaaacuguuugaaaaaacaaagaagcaacugagggaaaaugcugaggauaugggcaaugguuguuucaaaauauaccacaaaugugacaaugccugcauaggaucaaucagaaauggaacuuaugaccacgauguauacagagaugaagcauuaaacaaccgguuccagaucaagggcguugagcugaagucaggauacaaagauuggauccuauggauuuccuuugccauaucauguuuuuugcuuuguguugcuuuguugggguucaucaugugggccugccaaaaaggcaacauuaggugcaacauuugcauuuga

SEQ ID NO: 40129 - RNA, 1701 nt, Artificial Sequence; identical to SEQ ID NO: 39998
  derived and/or modified CDS sequence (wt) from hemagglutinin__InfluenzaA__AEX36377

SEQ ID NO: 40130 - RNA, 1701 nt, Artificial Sequence
  derived and/or modified CDS sequence (wt) from hemagglutinin__InfluenzaA__AEX36388
augaagacuaucauugcuuugagcuacauucuaugucugguuuucgcucaaaaacuuccgggaaaugacaacagcacggcaacgcugugccuugggcaccaugcaguaccaaacggaacgauagugaaaacaaucacgaaugaccaaauugaaguuacuaaugcuacugagcugguucagaguuccucaacaggugaaauaugcgacaguccucaucagauccuugauggagaaaacugcacacuaauagaugcucuauugggagacccucagugugauggcuuccaaaauaagaaaugggaccuuuuuguugaacgcagcaaagccuacagcaacuguuacccuuaugaugugccggauuaugccucccuuaggucacuaguugccucauccggcacacuggaguuuaacaaugaaagcuucaauuggacuggagucacucaaaacggaacaagcucugccugcauaaggagaucuaauaacaguuucuuuaguagauugaauugguugacccacuuaaaauucaaauacccagcauugaacgugacuaugccaaacaaugaaaaauuugacaaauuguacauuugggggguucaccacccggguacggacaaugaccaaaucuuccuguaugcucaagcaucaggaagaaucacagucucuaccaaaagaagccaacaaacuguaaucccgaauaucggaucuagacccagaguaaggaauaucccuagcagaauaagcaucuauuggacaauaguaaaaccgggagacauacuuuugauuaacagcacagggaaucuaauugcuccuagggguuacuucaaaauacgaagugggaaaagcucaauaaugagaucagaugcacccauuggcaaaugcaauucugaaugcaucacuccaaauggaagcauuccuaaugacaaaccauuccaaaauguaaacaggaucacauacggggccugucccagauauguuaagcaaaacacucugaaauuggcaacagggaugcgaaauguaccagagaaacaaacuagaggcauauuuggcgcaaucgcggguuucauagaaaaugguugggagggaaugauggaugguugguacgguuucaggcaucaaaauucugagggaauaggacaagcagcagaucucaaaagcacucaagcagcaaucgaucaaaucaaugggaagcugaauagauugaucgggaaaaccaacgagaaauuccaucagauugaaaaagaauucucagaagucgaagggagaauucaggaccuugagaaauauguugaggacaccaaaauagaucucuggucauacaacgcggagcuucuuguugcccuggagaaccaacauacaauugaucuaacugacucagaaaugaacaaacuguuugaaaaaacaaagaagcaacugagggaaaaugcugaggauaugggcaaugguuguuucaaaauauaccacaaaugugacaaugccugcauaggaucaaucagaaauggaacuuaugaccacgauguauacagagaugaagcauuaaacaaccgguuccagaucaagggcguugagcugaagucaggguacaaagauuggauccuauggauuuccuuugccauaucauguuuuuugcuuuguguugcuuuguugggguucaucaugugggccugccaaaaaggcaacauuaggugcaacauuugcauuuga

SEQ ID NO: 40131 - RNA, 1701 nt, Artificial Sequence
  derived and/or modified CDS sequence (wt) from hemagglutinin__InfluenzaA__AEX36399
augaagacuaucauugcuuugagcuacauucuaugucugguuuucgcucaaaaacuucccggaaaugacaacagcacggcaacgcugugccuugggcaccaugcaguaccaaacggaacgauagugaaaacaaucacgaaugaccaaacugaaguuacuaaugcuacugagcugguucagaguuccucaacaggugaaauaugcgacaguccucaucagauccuugauggagaaaacugcacacuaauagaugcucuauugggagacccucagugugauggcuuccaaaauaagaaaugggaccuuuuuguugaacgcagcaaagccuacagcaacuguuacccuuaugaugugccggauuaugccucccuuaggucacuaguugccucauccggcacacuggaguuuaacaaugaaagcuucaauuggacuggagucacucaaaacggaacaagcucugcuugcauaaggagaucuaauaacaguuucuuuaguagauugaauugguugacccacuuaaaauucaaauacccagcauugaacgugacuaugccaaacaaugaaaaauuugacaaauuguacauuugggggguucaccacccggguacggacaaugaccaaaucuuccuguaugcucaagcaucaggaagaaucacagucucuaccaaaagaagccaacaaacuguaaucccgaauaucggaucuagacccagaguaaggaauauccccagcagaauaagcauuuauuggacaauaguaaaaccgggagacauacuuuugauuaacagcacagggaaucuaauugcuccuagggguuauuucaaaauacgaagugggaaaagcucaauaaugagaucagaugcacccauuggcaaaugcaauucugaaugcauaacuccaaauggaagcauucccaaugacaaaccauuccaaaauguaaacaggaucacauacggggccugucccagauauguuaagcaaaacacucugaaauuggcaacagggaugcgaaauguaccagagaaacaaacuagaggcauauuuggcgcaaucgcagguuucauagaaaaugguugggagggaaugguggaugguugguacgguuucaggcaucaaaauucugagggaauaggacaagcagcagaucucaaaagcacucaagcagcaaucgaucaaaucaaugggaagcugaauagguugaucgggaaaaccaacgagaaauuccaucagauugaaaaagaauucucagaagucgaagggagaauucaggaccuugagaaauauguugaggacaccaaaauagaucucuggucauacaacgcggagcuucuuguugcccuggagaaccaacauacaauugaucuaacugacucagaaaugaacaaacuguuugaaaaaacaaagaagcaacugagggaaaaugcugaggauaugggcaaugguuguuucaaaauauaccacaaaugugacaaugccugcauaggaucaaucagaaauggaacuuaugaccacgauguauacagagaugaagcauuaaacaaccgguuccagaucaagggcguugagcugaagucaggauacaaagauuggauccuauggauuuccuuugccauaucauguuuuuugcuuuguguugcuuuguugggguucaucaugugggccugccaaaaaggcaacauuaggugcaacauuugcauuuga

SEQ ID NO: 40132 - RNA, 1701 nt, Artificial Sequence
  derived and/or modified CDS sequence (wt) from hemagglutinin__InfluenzaA__AEX36410
augaagacuauuauugcuuugagcuacauucuaugucugguuuucgcucaaaaacuucccggaaaugacaacagcacggcaacgcugugccuugggcaccaugcaguaccaaacggaacgauagugaaaacaaucacgaaugaccaaauugaaguuacuaaugcuacugagcugguucagaauuccucaacaggugaaauaugcgacaguccucaucagauccuugauggagaaaacugcacacuaauagaugcucuauugggagacccucagugugauggcuuccaaaauaagaaaugggaccuuuuuguugaacgcagcaaagccuacagcaacuguuacccuuaugaugugccggauuaugccucccuuaggucacuaguugccucauccggcacacuggaguuuaacaaugaaagcuucaauuggacuggagucacucaaaacggaacaagcucugcuugcauaaggagaucuaauaacaguuucuuuaguagauugaauugguugacccacuuaaaauucaaauacccagcauugaacgugacuaugccaaacaaugaaaaauuugacaaauuguacauuugggggguucaccacccggguacggacaaugaccaaaucuuccuguaugcucaagcaucaggaagaaucacagucucuaccaaaagaagccaacaaacuguaaucccgaauaucggaucuagacccagaguaaggaauauccccagcagaauaagcauuuauuggacaauaguaaaaccgggagacauacuuuugauuaacagcacagggaaucuaauugcuccuagggguuacuucaaaauacgaagugggaaaagcucaauaaugagaucagaugcacccauuggcaaaugcaauucugaaugcaucacuccaaauggaagcauucccaaugacaaaccauuccaaaauguaaacaggaucacauacggggccugucccagauauguuaagcaaaacacucugaaauuggcaacagggaugcgaaauguaccagagaaacaaacuagaggcauauuuggcgcaaucgcggguuucauagaaaaugguugggagggaaugguggaugguugguacgguuucaggcaucaaaauucugagggaauaggacaagcagcagaucucaaaagcacucaagcagcaaucgaucaaaucaaugggaagcugaauagguugaucgggaaaaccaacgagaaauuccaucagauugaaaaagaauucucagaagucgaagggagaauucaggaccuugagaaauauguugaggacaccaaaauagaucucuggucauacaacgcagagcuucuuguugcccuggagaaccaacauacaauugaucuaacugacucagaaaugaacaaacuguuugaaaaaacaaagaagcaacugagggaaaaugcugaggauaugggcaaugguuguuucaaaauauaccacaaaugugacaaugccugcauaggaucaaucagaaauggaacuuaugaccacgauguguacagagaugaagcauuaaacaaccgguuccagaucaagggcguugagcugaagucaggauacaaagauuggauccuauggauuuccuuugccauaucauguuuuuugcuuuguguugcuuuguugggguucaucaugugggccugccaaaaaggcaacauuaggugcaacauuugcauuuga

SEQ ID NO: 40133 - RNA, 1701 nt, Artificial Sequence
  derived and/or modified CDS sequence (wt) from hemagglutinin__InfluenzaA__AEX36421
augaagacuaucauugcuuugagcuacauucuaugucugguuuucgcucaaaaacuuccuggaaaugacaacagcacggcaacgcugugccuugggcaccaugcaguaccaaacggaacgauagugaaaacaaucacgaaugaccaaauugaaguuacuaaugcuacugagcugguucagaguuccucaacaggugaaauaugcgacaguccucaucagauccuugauggagaaaacugcacacuaauagaugcucuauugggagacccucaaugugauggcuuccaaaauaagaaaugggaccuuuuuguugaacgcagcaaagccuacagcaacuguuacccuuaugaugugccggauuaugccucccuuaggucacuaguugccucauccggcacacuggaguuuaacaaugaaagcuucaauuggacuggagucacucaaaacggaacaagcucugcuugcauaaggagaucuaauaacaguuucuuuaguagauugaauugguugacccacuuaaaauucaaauacccagcauugaacgugacuaugccaaacaaugaacaauuugacaaauuguacauuugggggguucaccacccggguacggacaaugaccaaaucuuccuguaugcucaagcaucaggaagaaucacagucucuaccaaaagaagccaacaaacuguaaucccgaauaucggaucuagacccagaguaaggaauaucccuagcagaauaagcaucuauuggacaauaguaaaaccgggagacauacuuuugauuaacagcacagggaaucuaauugcuccuagggguuacuucaaaauacgaagugggaaaagcucaauaaugagaucagaugcacccauuggcaaaugcaauucugaaugcaucacuccaaauggaagcauucccaaugacaaaccauuccaaaauguaaacaggaucacauacggggccugucccagauauguuaagcaaaacacucugaaauuggcaacagggaugcgaaauguaccagagaaacaaacuagaggcauauuuggcgcaaucgcggguuucauagaaaaugguugggagggaaugguggaugguugguacgguuucaggcaucaaaauucugagggaagaggacaagcagcagaucucaaaagcacucaagcagcaaucgaucaaaucaaugggaagcugaauagauugaucgggaaaaccaacgagaaauuccaucagauugaaaaagaauucucagaagucgaagggagaauucaggaccuugagaaauauguugaggacaccaaaauagaucucuggucauacaacgcggagcuucuuguugcccuggagaaccaacauacaauugaucuaacugacucagaaaugaacaaacuguuugaaaaaacaaagaagcaacugagggaaaaugcugaggauaugggcaaugguuguuucaaaauauaccacaaaugugacaaugccugcauaggaucaaucagaaauggaacuuaugaccacgauguauacagagaugaagcauuaaacaaccgguuccagaucaagggaguugagcugaagucaggguacaaagauuggauccuauggauuuccuuugccauaucauguuuuuugcuuuguguugcuuuguugggguucaucaugugggccugccaaaaaggcaacauuaggugcaacauuugcauuuga

SEQ ID NO: 40134 - RNA, 1701 nt, Artificial Sequence
  derived and/or modified CDS sequence (wt) from hemagglutinin__InfluenzaA__AEX36432
augaagacuaucauugcuuugagcuacauucuaugucugguuuucgcucaaaaacuuccuggaaaugacaacagcacggcaacgcugugccuugggcaccaugcaguaccaaacggaacgauagugaaaacaaucacgaaugaccaaauugaaguuacuaaugcuacugagcugguucagaguuccucaacaggugaaauaugcgacaguccucaucagguccuugauggagaaaacugcacacuaauagaugcucuauugggagacccucaaugugauggcuuccaaaauaagaaaugggaccuuuuuguugaacgcagcaaagccuacagcaacuguuacccuuaugaugugccggauuaugccucccuuaggucacuaguugccucauccggcacacuggaguuuaacaaugaaagcuucaauuggacuggagucacucaaaacggaacaagcucugcuugcauaaggagaucuaauaacaguuucuuuaguagauugaauugguugacccacuuaaaauucaaauacccagcauugaacgugacuaugccaaacaaugaacaauuugacaaauuguacauuugggggguucaccacccggguacggacaaugaccaaaucuuccuguaugcucaagcaucaggaagaaucacagucucuaccaaaagaagccaacaaacuguaaucccgaauaucggaucuagacccagaguaaggaauaucccuagcagaauaagcaucuauuggacaauaguaaaaccgggagacauacuuuugauuaacagcacagggaaucuaauugcuccuagggguuacuucaaaauacgaagugggaaaagcucaauaaugagaucagaugcacccauuggcaaaugcaauucugaaugcaucacuccaaauggaagcauucccaaugacaaaccauuccaaaauguaaacaggaucacauacggggccugucccagauauguuaagcaaaacacucugaaauuggcaacagggaugcgaaauguaccagagaaacaaacuagaggcauauuuggcgcaaucgcggguuucauagaaaaugguugggagggaaugguggaugguugguacgguuucaggcaucaaaauucugagggaagaggacaagcagcagaucucaaaagcacucaagcagcaaucgaucaaaucaaugggaagcugaauagauugaucgggaaaaccaacgagaaauuccaucagauugaaaaagaauucucagaagucgaagggagaauucaggaccuugagaaauauguugaggacaccaaaauagaucucuggucauacaacgcggagcuucuuguugcccuggagaaccaacauacaauugaucuaacugacucagaaaugaacaaacuguuugaaaaaacaaagaagcaacugagggaaaaugcugaggauaugggcaaugguuguuucaaaauauaccacaaaugugacaaugccugcauaggaucaaucagaaauggaacuuaugaccacgauguauacagagaugaagcauuaaacaaccgguuccagaucaagggaguugagcugaagucaggguacaaagauuggauccuauggauuuccuuugccauaucauguuuuuugcuuuguguugcuuuguugggguucaucaugugggccugccaaaaaggcaacauuaggugcaacauuugcauuuga

SEQ ID NO: 40135 - RNA, 1701 nt, Artificial Sequence
  derived and/or modified CDS sequence (wt) from hemagglutinin__InfluenzaA__AEX36443
augaagacuaucauugcuuugagcuacauucuaugucugguuuucgcucaaaaacuuccuggaaaugacaacagcacggcaacgcugugccuugggcaccaugcaguaccaaacggaacgauagugaaaacaaucacgaaugaccaaauugaaguuacuaaugcuacugagcugguucagaguuccucaacaggugaaauaugcaacaguccucaucagauccuugauggagaaaacugcacacuaauagaugcucuauugggagacccucagugugauggcuuccaaaauaagaaaugggaccuuuuuguugaacgcagcaaagccuacagcaacuguuacccuuaugaugugccggauuaugccucccuuaggucacuaguugccucauccggcacacuggaguuuaacaaugaaagcuucaauuggacuggagucacucaaaacggaacaagcucugcuugcauaaggagaucuaauaacaguuucuuuaguagauugaauugguugacccacuuaaaauucaaauacccagcauugaacgugacuaugccaaacaaugaagaauuugacaaauuguacauuugggggguucaccacccggguacggacaaugaccaaaucuuccuguaugcucaagcaucaggaagaaucacagucucuaccaaaagaagccaacaaacuguaaucccgaauaucggaucuagacccagaguaaggaauauccccagcagaauaagcaucuauuggacaauaguaaaaccgggagacauacuuuugauuaacagcacagggaaucuaauugcuccuagggguuacuucaaaauacgaagugggaaaagcucaauaaugagaucagaugcacccauuggcaaaugcaauucugaaugcaucacuccaaauggaagcauucccaaugacaaaccauuccaaaauguaaacaggaucacauacggggccugucccagauauguuaagcaaaacacucugaaauuggcaacagggaugcgaaauguaccagagaaacaaacuagaggcauauuuggcgcaaucgcggguuucauagaaaaugguugggagggaaugguggaugguugguacgguuucaggcaucaaaauucugagggaauaggacaagcagcagaucucaaaagcacucaagcagcaaucgaucaaaucaaugggaagcugaauagguugaucgggaaaaccaacgagaaauuccaucagauugaaaaagaauucucagaagucgaagggaggauucaggaccuugagaaauauguugaggauaccaaaauagaucucuggucauacaacgcggagcuucuuguugcccuggagaaccaacauacaauugaucuaacugacucagaaaugaacaaacuguuugaaaaaacaaagaagcaacugagggaaaaugcugaggauaugggcaaugguuguuucaaaauauaccacaaaugugacaaugccugcauaggaucaaucagaaauggaacuuaugaccacgauguauacagagaugaagcauuaaacaaccgguuccagaucaagggcguugagcugaagucaggauacaaagauuggauccuauggauuuccuuugccauaucauguuuuuugcuuuguguugcuuuguugggguucaucaugugggccugccaaaaaggcaacauuaggugcaacauuugcauuuga

SEQ ID NO: 40136 - RNA, 1701 nt, Artificial Sequence
  derived and/or modified CDS sequence (wt) from hemagglutinin__InfluenzaA__AEX36454
augaagacuaucauugcuuugagcuacauucuaugucugguuuucgcucaaaaacuuccuggaaaugacaacagcacggcaacgcugugccuugggcaccaugcaguaccaaacggaacgauagugaaaacaaucacgaaugaccaaauugaaguuacuaaugcuacugagcugguucagaguuccucaacaggugaaauaugcaacaguccucaucagauccuugauggagaaaacugcacacuaauagaugcucuauugggagacccucagugugauggcuuccaaaauaagaaaugggaccuuuuuguugaacgcagcaaagccuacagcaacuguuacccuuaugaugugccggauuaugccucccuuaggucacuaguugccucauccggcacacuggaguuuaacaaugaaagcuucaauuggacuggagucacucaaaacggaacaagcucugcuugcauaaggagaucuaauaacaguuucuuuaguagauugaauugguugacccacuuaaaauucaaauacccagcauugaacgugacuaugccaaacaaugaagaauuugacaaauuguacauuugggggguucaccacccggguacggacaaugaccaaaucuuccuguaugcucaagcaucaggaagaaucacagucucuaccaaaagaagccaacaaacuguaaucccgaauaucggaucuagacccagaguaaggaauauccccagcagaauaagcaucuauuggacaauaguaaaaccgggagacauacuuuugauuaacagcacagggaaucuaauugcuccuagggguuacuucaaaauacgaagugggaaaagcucaauaaugagaucagaugcacccauuggcaaaugcaauucugaaugcaucacuccaaauggaagcauucccaaugacaaaccauuccaaaauguaaacaggaucacauacggggccugucccagauauguuaagcaaaacacucugaaauuggcaacagggaugcgaaauguaccagagaaacaaacuagaggcauauuuggcgcaaucgcggguuucauagaaaaugguugggagggaaugguggaugguugguacgguuucaggcaucaaaauucugagggaauaggacaagcagcagaucucaaaagcacucaagcagcaaucgaucaaaucaaugggaagcugaauagguugaucgggaaaaccaacgagaaauuccaucagauugaaaaagaauucucagaagucgaagggaggauucaggaccuugagaaauauguugaggauaccaaaauagaucucuggucauacaacgcggagcuucuuguugcccuggagaaccaacauacaauugaucuaacugacucagaaaugaacaaacuguuugaaaaaacaaagaagcaacugagggaaaaugcugaggauaugggcaaugguuguuucaaaauauaccacaaaugugacaaugccugcauaggaucaaucagaaauggaacuuaugaccacgauguauacagagaugaagcauuaaacaaccgguuccagaucaagggcguugagcugaagucaggauacaaagauuggauccuauggauuuccuuugccauaucauguuuuuugcuuuguguuguuuuguugggguucaucaugugggccugccaaaaaggcaacauuaggugcaacauuugcauuuga

SEQ ID NO: 40137 - RNA, 1701 nt, Artificial Sequence
  derived and/or modified CDS sequence (wt) from hemagglutinin__InfluenzaA__AEX36465
augaagacuaucauugcuuugagcuacauucuaugucugguuuucgcucaaaaacuucccggaauugacaacagcacggcaacgcugugccuugggcaccaugcaguaccaaacggaacgauagugaaaacaaucacgaaugaccaaauugaaguuacuaaugcuacugagcugguucagaguuccucaacagguggaauaugcgacaguccucaucagauccuugauggagaaaacugcacacuaauagaugcucuauugggagacccucagugugauggcuuccaaaauaagaaaugggaccuuuuuguugaacgcagcaaagccuacagcaacuguuacccuuaugaugugccggauuaugccucccuuaggucacuaguugccucauccggcacacuggaguuuaacaaugaaagcuucaauuggacuggagucacucaaaauggaacaagcucugcuugcaaaaggggaucuaauaacaguuucuuuaguagauugaauugguugacccacucaaaauucaaauacccagcauugaacgugacuaugccaaacaaugaagaauuugacaaauuguacauuugggggguucaccacccggguacggacaaugaccaaaucuuccuguaugcucaagcaucaggaagaaucacagucucuaccaaaagaagccaacaaacuguaaucccgaauaucggaucuagacccagaguaaggaauauccccagcagaauaagcaucuauuggacaauaguaaaaccgggagacauacuuuugauuaacagcacagggaaucuaauugcuccuagggguuacuucaaaauacgaagugggaaaagcucaauaaugagaucagaugcacccauuggcaaaugcaauucugaaugcaucacuccaaauggaagcauucccaaugacaaaccauuucaaaauguaaacaggaucacauacggggccugucccagauauguuaagcaaaacacucugaaauuggcaacagggaugcgaaauguaccagagaaacaaacuagaggcauauuuggagcaaucgcggguuucauagaaaaugguugggagggaaugguggaugguugguacgguuucaggcaucaaaauucugagggaauaggacaagcagcagaucucaaaagcacucaagcagcaaucgaucaaaucaaugggaagcugaauagguugaucgggaaaaccaacgagaaauuccaccagauugaaaaagaauucucagaaguagaagggagaauucaggaccucgagaaauauguugaggacacuaaaauagaucucuggucauacaacgcggagcuucuuguugcccuggagaaccaacauacaauugaucuaacugacucagaaaugaacaaacuguuugaaaagacaaagaagcaacugagggaaaaugcugaggauaugggcaaugguuguuucaaaauauaccacaaaugugacaaugccugcauaggaucaaucagaaauggaacuuaugaccaugauguauacagagaugaagcauuaaacaaccgguuucagaucaagggcguugagcugaagucaggauacaaagauuggauccuauggauuuccuuugccauaucauguuuuuugcuuuguguugcuuuguugggguucaucaugugggccugccaaaaaggcaacauuaggugcaacauuugcauuuga

SEQ ID NO: 40138 - RNA, 1701 nt, Artificial Sequence
  derived and/or modified CDS sequence (wt) from hemagglutinin__InfluenzaA__AEX36476
augaagacuaucauugcuuugagcuacauucuaugucugguuuucgcucaaaaacuucccggaauugacaacagcacggcaacgcugugccuugggcaccaugcaguaccaaacggaacgauagugaaaacaaucacgaaugaccaaauugaaguuacuaaugcuacugagcugguucagaguuccucaacagguggaauaugcgacaguccucaucagauccuugauggagaaaacugcacacuaauagaugcucuauugggagacccucagugugauggcuuccaaaauaagaaaugggaccuuuuuguugaacgcagcaaagccuacagcaacuguuacccuuaugaugugccggauuaugccucccuuaggucacuaguugccucauccggcacacuggaguuuaacaaugaaagcuucaauuggacuggagucacucaaaauggaacaagcucugcuugcaaaaggggaucuaauaacaguuucuuuaguagauugaauugguugacccacucaaaauucaaauacccagcauugaacgugacuaugccaaacaaugaagaauuugacaaauuguacauuugggggguucaccacccggguacggacaaugaccaaaucuucccguaugcucaagcaucaggaagaaucacagucucuaccaaaagaagccaacaaacuguaaucccgaauaucggaucuagacccagaauaaggaauauccccagcagaauaagcaucuauuggacaauaguaaaaccgggagacauacuuuugauuaacagcacagggaaucuaauugcuccuagggguuacuucaaaauacgaagugggaaaagcucaauaaugagaucagaugcacccauuggcaaaugcgauucugaaugcaucacuccaaauggaagcauucccaaugacaaaccauuucaaaauguaaacaggaucacauacggggccugucccagauauguuaagcaaaacacucugaaauuggcaacagggaugcgaaauguaccagagaaacaaacuagaggcauauuuggcgcaaucgcggguuucauagaaaaugguugggagggaaugguggaugguugguacgguuucaggcaucaaaauucugagggaauaggacaagcagcagaucucaaaagcacucaagcagcaaucgaucaaaucaaugggaagcugaauagguugaucgggaaaaccaacgagaaauuccaccagauugaaaaagaauucucagaaguagaagggagaauucaggaccucgagaaauacguugaggacacuaaaauagaucucuggucauacaacgcggagcuucuuguugcccuggagaaccaacauacaauugaucuaacugacucagaaaugaacaaacuguuugaaaagacaaagaagcaacugagggaaaaugcugaggauaugggcaaugguuguuucaaaauauaccacaaaugugacaaugccugcauaggaucaaucagaaauggaacuuaugaccaugauguauacagagaugaagcauuaaacaaccgguuucagaucaagggcguugagcugaagucaggauacaaagauuggauccuauggauuuccuuugccauaucauguuuuuugcuuuguguugcuuuguugggguucaucaugugggccugccaaaaaggcaacauuaggugcaacauuugcauuuga

SEQ ID NO: 40139 - RNA, 1701 nt, Artificial Sequence
  derived and/or modified CDS sequence (wt) from hemagglutinin__InfluenzaA__AEX36487
augaagacuaucauugcuuugagcuacauucuaugucugguuuucgcucaaaaacuucccggaauugacaacagcacggcaacgcugugccuugggcaccaugcaguaccaaacggaacgauagugaaaacaaucacgaaugaccaaauugaaguuacuaaugcuacugagcugguucagaguuccucaacagguggaauaugcgacaguccucaucagauccuugauggagaaaacugcacacuaauagaugcucuauugggagacccucagugugauggcuuccaaaauaagaaaugggaccuuuuuguugaacgcagcaaagccuacagcaacuguuacccuuaugaugugccggauuaugccucccuuaggucacuaguugccucauccggcacacuggaguuuaacaaugaaagcuucaauuggacuggagucacucaaaauggaacaagcucugcuugcaaaaggggaucuaauaacaguuucuuuaguagauugaauugguugacccacucaaaauucaaauacccagcauugaacgugacuaugccaaacaaugaagaauuugacaaauuguacauuugggggguucuccacccggguacggacaaugaccaaaucuuccuguaugcucaagcaucaggaagaaucacagucucuaccaaaagaagccaacaaacuguaaucccgaauaucggaucuagacccagaguaaggaauauccccagcagaauaagcaucuauuggacaauaguaaaaccgggagacauacuuuugauuaacagcacagggaaucuaauugcuccuagggguuacuucaaaauacgaagugggaaaagcucaauaaugagaucagaugcacccauuggcaaaugcaauucugaaugcaucacuccaaauggaagcauucccaaugacaaaccauuucaaaauguaaacaggaucacauacggggccugucccagauauguuaagcaaaacacucugaaauuggcaacagggaugcgaaauguaccagagaaacaaacuagaggcauauuuggagcaaucgcggguuucauagaaaaugguugggagggaaugguggaugguugguacgguuucaggcaucaaaauucugagggaauaggacaagcagcagaucucaaaagcacucaagcagcaaucgaucaaaucaaugggaagcugaauagguugaucgggaaaaccaacgagaaauuccaccagauugaaaaagaauucucagaaguagaagggagaauucaggaccucgagaaauauguugaggacacuaaaauagaucucuggucauacaacgcggagcuucuuguugcccuggagaaccaacauacaauugaucuaacugacucagaaaugaacaaacuguuugaaaagacaaagaagcaacugagggaaaaugcugaggauaugggcaaugguuguuucaaaauauaccacaaaugugacaaugccugcauaggaucaaucagaaauggaacuuaugaccaugauguauacagagaugaagcauuaaacaaccgguuucagaucaagggcguugagcugaagucaggauacaaagauuggauccuauggauuuccuuugccauaucauguuuuuugcuuuguguugcuuuguugggguucaucaugugggccugccaaaaaggcaacauuaggugcaacauuugcauuuga

SEQ ID NO: 40140 - RNA, 1701 nt, Artificial Sequence
  derived and/or modified CDS sequence (wt) from hemagglutinin__InfluenzaA__AEX36498
augaagacuaucauugcuuugagcuacauucuaugucugguuuucgcucaaaaacuucccggaauugacaacagcacggcaacguugugccuugggcaccaugcaguaccaaacggaacgauagugaaaacaaucacgaaugaccaaauugaaguuacuaaugcuacugagcugguucagaauuccucaacagguggaauaugcgacaguccucaucagauccuugauggagaaaacugcacacuaauagaugcucuauugggagacccucagugugauggcuuccaaaauaagaaaugggaccuuuuuguugaacgcagcaaagccuacagcaacuguuacccuuaugaugugccggauuaugccucccuuaggucacuaguugccucauccggcacacuggaguuuaacaaugaaagcuucaauuggacuggagucacucaaaauggaacaagcucugcuugcaaaaggggaucuaauaacaguuucuuuaguagauugaauugguugacccacucaaaauucaaauacccagcauugaacgugacuaugccaaacaaugaagaauuugacaaauuguacauuugggggguucaccacccggguacggacaaugaccaaaucuuccuguaugcucaagcaucaggaagaaucacagucucuaccaaaagaagccaacaaacuguaaucccgaauaucggaucuagacccagaguaaggaauauccccagcagaauaagcaucuauuggacaauaguaaaaccgggagacauacuuuugauuaacagcacagggaaucuaauugcuccuagggguuacuucaaaauacgaagugggaaaagcucaauaaugagaucagaugcacccauuggcaaaugcaauucugaaugcaucacuccaaauggaagcauucccaaugacaaaccauuucaaaauguaaacaggaucacauacggggccugucccagauauguuaagcaaaacacucugaaauuggcaacagggaugcgaaauguaccagagaaacaaacuagaggcauauuuggcgcaaucgcggguuucauagaaaaugguugggagggaaugguggaugguugguacgguuucaggcaucaaaauucugagggaauaggacaagcagcagaucucaaaagcacucaagcagcaaucgaucaaaucaaugggaagcugaauagguugaucgggaaaaccaacgagaaauuccaccagauugaaaaagaauucucagaaguagaagggagaauucaggaccucgagaaauauguugaggacacuaaaauagaucucuggucauacaacgcggagcuucuuguugcccuggagaaccaacauacaauugaucuaacugacucagaaaugaacaaacuguuugaaaagacaaagaagcaacugagggaaaaugcugaggauaugggcaaugguuguuucaaaauauaccacaaaugugacaaugccugcauaggaucaaucagaaauggaacuuaugaccaugauguauacagagaugaagcauuaaacaaccgguuucagaucaagggcguugagcugaagucaggauacaaagauuggauccuauggauuuccuuugccauaucauguuuuuugcuuuguguugcuuuguugggguucaucaugugggccugccaaaaaggcaacauuaggugcaacauuugcauuuga

SEQ ID NO: 40141 - RNA, 1701 nt, Artificial Sequence
  derived and/or modified CDS sequence (wt) from hemagglutinin__InfluenzaA__AEX36509
augaagacuaucauugcuuugagcuacauucuaugucugguuuucgcucaaaaacuucccggaauugacaacagcacggcaacgcugugccuugggcaccaugcaguaccaaacggaacgauagugaaaacaaucacgaaugaccaaauugaaguuacuaaugcuacugagcugguucagaauuccucaacagguggaauaugcgacaguccucaucagauccuugauggagaaaacugcacacuaauagaugcucuauugggagacccucagugugauggcuuccaaaauaagaaaugggaccuuuuuguugaacgcagcaaagccuacagcaacuguuacccuuaugaugugccggauuaugccucccuuaggucacuaguugccucauccggcacacuggaguuuaacaaugaaagcuucaauuggacuggagucacucaaaauggaacaagcucugcuugcaaaaggggaucuaauaacaguuucuuuaguagauugaauugguugacccacucaaaauucaaauacccagcauugaacgugacuaugccaaacaaugaagaauuugacaaauuguacauuugggggguucaccacccggguacggacaaugaccaaaucuucccguaugcucaagcaucaggaagaaucacagucucuaccaaaagaagccaacaaacuguaaucccgaauaucggaucuagacccagaguaaggaauauccccagcagaauaagcaucuauuggacaauaguaaaaccgggagacauacuuuugauuaacagcacagggaaucuaauugcuccuagggguuacuucaaaauacgaagugggaaaagcucaauaaugagaucagaugcacccauuggcaaaugcaauucugaaugcaucacuccaaauggaagcauucccaaugacaaaccauuucaaaauguaaacaggaucacauacggggccugucccagauauguuaagcaaaacacucugaaauuggcaacagggaugcgaaauguaccagagaaacaaacuagaggcauauuuggcgcaaucgcggguuucauagaaaaugguugggagggaaugguggaugguugguacgguuucaggcaucaaaauucugagggaauaggacaagcagcagaucucaaaagcacucaagcagcaaucgaucaaaucaaugggaagcugaauagguugaucgggaaaaccaacgagaaauuccaccagauugaaaaagaauucucagaaguagaagggagaauucaggaccucgagaaauauguugaggacacuaaaauagaucucuggucauacaacgcggagcuucuuguugcccuggagaaccaacauacaauugaucuaacugacucagaaaugaacaaacuguuugaaaagacaaagaagcaacugagggaaaaugcugaggauaugggcaaugguuguuucaaaauauaccacaaaugugacaaugccugcauaggaucaaucagaaauggaacuuaugaccaugauguauacagagaugaagcauuaaacaaccgguuucagaucaagggcguugagcugaagucaggauacaaagauuggauccuauggauuuccuuugccauaucauguuuuuugcuuuguguugcuuuguugggguucaucaugugggccugccaaaaaggcaacauuaggugcaacauuugcauuuga

SEQ ID NO: 40142 - RNA, 1701 nt, Artificial Sequence
  derived and/or modified CDS sequence (wt) from hemagglutinin__InfluenzaA__AEX36520
augaagacuaucauugcuuugagcuacauucuaugucugguuuucgcucaaaaacuuccuggaaaugacaacagcacggcaacgcugugccuugggcaccaugcaguaccaaacggaacaauagugaaaacaaucacgaaugaccaaauugaaguuacuaaugcuacugagcugguucagaguuccucaacaggugaaauaugcgacaguccucaucagauccuugauggagaaaacugcacacuaauagaugcucuauugggagacccucagugugauggcuuccaaaauaagaaaugggaccuuuuuguugaacgcagcaaagccuacagcaacuguuaccccuaugaugugccggauuaugccucccuuaggucacuaguugccucauccggcacacuggaguuuaacaaugaaagcuucaauuggacuggagucacucaaaauggaacaagcucugcuugcauaaggagaucuaauaacaguuucuuuaguagauugaauugguugacccacuuaaaauucaaauacccagcauugaacgugacuaugccaaacaaugaacaauuugacaaauuguacauuugggggguucaccacccggguacggacaaugaccaaaucuuccuguaugcucaagcaucaggaagaaucacagucucuaccaaaagaagccaacaaacuguaaucccgaauaucggaucuagacccagaguaaggaauaucccuagcagaauaagcaucuauuggacaauaguaaaaccgggagacauacuuuugauuaacagcacagggaaucuaauugcuccuagggguuacuucaaaauacgaagugggaaaagcucaauaaugagaucagaugcacccauuggcaaaugcaauucugaaugcaucacuccaaauggaagcauucccaaugacaaaccauuccaaaauguaaacaggaucacauacggggccugucccagauauguuaagcaaaacacucugaaauuggcaacagggaugcgaaauguaccagagaaacaaacuagaggcauauuuggcgcaaucgcagguuucauagaaaaugguugggagggaaugguggaugguugguacgguuucaggcaucaaaauucugagggaagaggacaagcagcagaucucaaaagcacucaagcagcaaucgaucaaaucaaugggaagcugaauagauugaucgggaaaaccaacgagaaauuccaucagauugaaaaagaauucucagaagucgaagggagaauucaggaccuugagaaauauguugaggacaccaaaauagaucucuggucauacaacgcggagcuucuuguugcccuggagaaccaacauacaauugaucuaacugacucagaaaugaacaaacuguuugaaaaaacaaagaagcaacugagggaaaaugcugaggauaugggcaaugguuguuucaaaauauaccacaaaugugacaaugccugcauaggaucaaucagaaauggaacuuaugaccacaauguauacagagaugaagcauuaaacaaccgguuccagaucaagggaguugagcugaagucaggguacaaagauuggauccuauggauuuccuuugccauaucauguuuuuugcuuuguguugcuuuguugggguucaucaugugggccugccaaaaaggcaacauuaggugcaacauuugcauuuga

SEQ ID NO: 40143 - RNA, 1701 nt, Artificial Sequence
  derived and/or modified CDS sequence (wt) from hemagglutinin__InfluenzaA__AEX36531
augaagacuaucauugcuuugagcuacauucuaugucugguuuucgcucaaaaacuuccuggaaaugacaacagcacggcaacgcugugccuugggcaccaugcaguaccaaacggaacgauagugaaaacaaucacgaaugaccaaauugaaguuacuaaugcuacugagcugguucagaguuccucaacaggugaaauaugcgacaguccucaucagauccuugauggagaaaacugcacacuaauagaugcucuauugggagacccucagugugauggcuuccaaaauaagaaaugggaccuuuuuguugaacgcagcaaagccuacagcaacuguuacccuuaugaugugccggauuaugccucccuuaggucacuaguugccucauccggcacacuggaguuuaacaaugaaagcuucaauuggaccggagucacucaaaacggaacaagcucugcuugcauaaggagaucuaauaacaguuucuuuaguagauugaauugguugacccacuuaaaauucaaauacccagcauugaacguaacuaugccaaacaaugaacaauuugacaaauuguacauuugggggguucaccacccggguacggacaaugaccaaaucuuccuguaugcucaagcaucaggaagaaucacagucucuaccaaaagaagccaacaaacuguaaucccgaauaucggaucuagacccagaguaaggaauaucccuagcagaauaagcaucuauuggacaauaguaaaaccgggagacauacuuuugauuaacagcacagggaaucuaauugcuccuagggguuacuucaaaauacgaagugggaaaagcucaauaaugagaucagaugcacccauuggcaaaugcaacucugaaugcaucacuccaaauggaagcauucccaaugacaaaccauuccaaaauguaaacaggaucacauacggggccugucccagauauguuaagcaaaacacucugaaauuggcaacagggaugcggaauguaccagagaaacaaacuagaggcauauuuggcgcaaucgcggguuucauagaaaaugguugggagggaaugguggaugguugguacgguuucaggcaucaaaauucugagggaagaggacaagcagcagaucucaaaagcacucaagcagcaaucgaucaaaucaaugggaagcugaauagauugaucgggaaaaccaacgagaaauuccaucagauugaaaaagaauucucagaagucgaagggagaauucaggaccuugauaaauauguugaggacacuaaaauagaucucuggucauacaacgcggagcuucuuguugcccuggagaaccaacauacaauugaucuaacugacucagaaaugaacaaacuguuugaaaaaacaaagaagcaacugagggaaaaugcugaggauaugggcaaugguuguuuuaaaauauaccacaaaugugacaaugccugcauaggaucaaucagaaauggaacuuaugaccacgauguauacagagaugaagcauuaaacaaccgguuccagaucaagggaguugagcugaagucaggguacaaagauuggauccuauggauuuccuuugccauaucauguuuuuugcuuuguguugcuuuguugggguucaucaugugggccugccaaaaaggcaacauuaggugcaacauuugcauuuga

SEQ ID NO: 40144 - RNA, 1701 nt, Artificial Sequence
  derived and/or modified CDS sequence (wt) from hemagglutinin__InfluenzaA__AEX36542
augaagacuaucauugcuuugagcuacauucuaugucugguuuucgcucaaaaacuuccuggaaaugacaacagcacggcaacgcugugccuugggcaccaugcaguaccaaacggaacaauagugaaaacaaucacgaaugaccaaauugaaguuacuaaugcuacugagcugguucagaauuccucaacaggugaaauaugcgacaguccucaucagauccuugauggagaaaacugcacacuaauagaugcucuauugggagacccucagugugauggcuuccaaaauaagaaaugggaccuuuuuguugaacgcagcaaagccuacagcaacuguuacccuuaugaugugccggauuaugccucccuuaggucacuaguugccucauccggcacacuggaguuuaacaaugaaagcuucaauuggacuggagucacucaaaauggaacaagcucugcuugcauaaggagaucuaauaacaguuucuuuaguagauugaauugguugacccacuuaaaauucaaauauccagcauugaacgugacuaugccaaacaaugaacaauuugacaaauuguacauuugggggguucaccacccggguacggacaaugaccaaaucuuccuguaugcucaagcaucaggaagaaucacagucucuaccaaaagaagccaacaaacuguaaucccgaauaucggaucuagacccagaguaaggaauaucccuagcagaauaagcauuuauuggacaauaguaaaaccgggagacauacuuuugauuaacagcacagggaaucuaauugcuccuagggguuacuucaaaauacgaagugggaaaagcucaauaaugagaucagaugcacccauuggcaaaugcaauucugaaugcaucacuccaaauggaagcauucccaaugacaaaccauuccaaaauguaaacaggaucacauacggggccugucccagauauguuaagcaaaacacucugaaauuggcaacagggaugcgaaauguaccagagaaacaaacuagaggcauauuuggcgcaaucgcggguuucauagaaaaugguugggagggaaugguggaugguugguacgguuucaggcaucaaaauucugagggaagaggacaagcagcagaucucaaaagcacucaagcagcaaucgaucaaaucaaugggaagcugaauagauugaucgggaaaaccaacgagaaauuccaucagauugaaaaagaauucucagaagucgaagggagaauucaggaccuugagaaauauguugaggacaccaaaauagaucucuggucauacaacgcggagcuucuuguugcccuggagaaccaacauacaauugaucuaacugacucagaaaugaacaaacuguuugaaaaaacaaagaagcaacugagggaaaaugcugaggauaugggcaaugguuguuucaaaauauaccacaaaugugacaaugccugcauaggaucaaucagaaauggaacuuaugaccacgauguauacagagaugaagcauuaaacaaccgguuccagaucaagggaguugagcugaagucaggguacaaagauuggauccuauggauuuccuuugccauaucauguuuuuugcuuuguguugcuuuguugggguucaucaugugggccugccaaaaaggcaacauuaggugcaacauuugcauuuga

SEQ ID NO: 40145 - RNA, 1701 nt, Artificial Sequence; identical to SEQ ID NO: 40144
  derived and/or modified CDS sequence (wt) from hemagglutinin__InfluenzaA__AEX36553

SEQ ID NO: 40146 - RNA, 1701 nt, Artificial Sequence; identical to SEQ ID NO: 40144
  derived and/or modified CDS sequence (wt) from hemagglutinin__InfluenzaA__AEX36564

SEQ ID NO: 40147 - RNA, 1701 nt, Artificial Sequence
  derived and/or modified CDS sequence (wt) from hemagglutinin__InfluenzaA__AEX36575
augaagacuaucauugcuuugagcuacauucuaugucugguuuucgcucaaaaacuuccuggaaauggcaacagcacggcaacgcugugccuugggcaccaugcaguaccaaacggaacaauagugaaaacaaucacgaaugaccaaauugaaguuacuaaugcuacugagcugguucagaguuccucaacaggugaaauaugcgacaguccucaucagauccuugauggagagaacugcacacuaauagaugcucuauugggagacccucaaugugauggcuuccaaaauaagaaaugggaccuuuuuguugaacgcagcaaagccuacagcaacuguuacccuuaugaugugccggauuaugccucccuuaggucacuaguugccucauccggcacacuggaguuuaacaaugaaagcuucaauuggacuggagucacucaaaacggaacaagcucugcuugcauaaggagaucuaauaacaguuucuuuaguagauugaauugguugacccacuuaaaauucaaauacccagcauugaacgugacuaugccaaacaaugaacaauuugacaaauuguacauuugggggguucaccacccggguacggacaaugaccaaaucuuccuguaugcucaagcaucaggaagaaucacagucucuaccaaaagaagccaacaaacuguaaucccgaauaucggaucuagacccagaguaaggaauaucccuagcagaauaagcaucuauuggacaauaguaaaaccgggagacauacuuuugauuaacagcacagggaaucuaauugcuccuagggguuacuucaaaauacgaagugggaaaagcucaauaaugagaucagaugcacccauuggcaaaugcaauucugaaugcaucacuccaaauggaagcauucccaaugacaaaccauuccaaaauguuaacaggaucacauacggggccugucccagauauguuaagcaaaacacucugaaauuggcaacagggaugcgaaauguaccagagaaacaaacuagaggcauauuuggcgcaaucgcggguuucauagaaaaugguugggagggaaugguggaugguugguacgguuucaggcaucaaaauucugaaggaagaggacaagcagcagaucucaaaagcacucaagcagcaaucgaucaaaucaaugggaagcugaauagauugaucgggaaaaccaacgagaaauuccaucagauugaaaaagaauucucagaagucgaagggagaauucaggaccuugagaaauauguugaggacaccaaaauagauaucuggucauacaacgcggagcuucuuguugcccuggagaaccaacauacaauugaucuaacugacucagaaaugaacaaacuguuugaaaaaacaaagaagcaacugagggaaaaugcugaggauaugggcaaugguuguuucaaaauauaccacaaaugugacaaugccugcauaggaucaaucagaaauggaacuuaugaccacgauguauacagagaugaagcauuaaacaaccgguuccagaucaagggaguugagcugaagucaggguacaaagauuggauccuauggauuuccuuugccauaucauguuuuuugcuuuguguugcuuuguugggguucaucaugugggccugccaaaaaggcaacauuaggugcaacauuugcauuuga

SEQ ID NO: 40148 - RNA, 1701 nt, Artificial Sequence
  derived and/or modified CDS sequence (wt) from hemagglutinin__InfluenzaA__AEX36586
augaagacuaucauugcuuugagcuacauucuaugucugguuuucgcucaaaaacuuccuggaaaugacaacaacacggcaacgcugugccuugggcaccaugcaguaccaaacggaacaauagugaaaacaaucacgaaugaccaaauugaaguuacuaaugcuacugagcugguucagaguuccucaacaggugaaauaugcgacaguccucaucagauccuugauggagagaacugcacacuaauagaugcucuauugggagacccucaaugugauggcuuccaaaauaagaaaugggaccuuuuuguugaacgcagcaaagccuacagcaacuguuacccuuaugaugugccggauuaugccucccuuaggucacuaguugccucauccggcacacuggaguuuaacaaugaaagcuucaauuggacuggagucacucaaaacggaacaagcucugcuugcauaaggagaucuaauaacaguuucuuuaguagauugaauugguugacccacuuaaaauucaaauacccagcauugaacgugacuaugccaaacaaugaacaauuugacaaauuguacauuugggggguucaccacccggguacggacaaugaccaaaucuuccuguaugcucaagcaucaggaagaaucacagucucuaccaaaagaagccaacaaacuguaaucccgaauaucggaucuagacccagaguaaggaauaucccuagcagaauaagcaucuauuggacaauaguaaaaccaggagacauacuuuugauuaacagcacagggaaucuaauugcuccuagggguuacuucaaaauacgaagugggaaaagcucaauaaugagaucagaugcacccauuggcaaaugcaauucugaaugcaucacuccaaauggaagcauucccaaugacaaaccauuccaaaauguuaacagaaucacauacggggccugucccagauauguuaagcaaaacacucugaaauuggcaacagggaugcgaaauguaccagagaaacaaacuagaggcauauuuggcgcaaucgcggguuucauagaaaaugguugggagggaaugguggaugguugguacgguuucaggcaucaaaauucugaaggaagaggacaagcagcagaucucaaaagcacucaagcagcaaucgaucaaaucaaugggaagcugaauagauugaucgggaaaaccaacgagaaauuccaucagauugaaaaagaauucucagaagucgaagggagaauucaggaccuugagaaauauguugaggacaccaaaauagaucucuggucauacaacgcggagcuucuuguugcccuggagaaccaacauacaauugaucuaacugacucagaaaugaacaaacuguuugaaaaaacaaagaagcaacugagggaaaaugcugaggauaugggcaaugguuguuucaaaauauaccacaaaugugacaaugccugcauaggaucaaucagaaauggaacuuaugaccacgauguauacagagaugaagcauuaaacaaccgguuccagaucaagggaguugagcuaaagucaggauacaaagauuggauccuauggauuuccuuugccauaucauguuuuuugcuuuguguugcuuuguugggguucaucaugugggccugccaaaaaggcaacauuaggugcaacauuugcauuuga

SEQ ID NO: 40149 - RNA, 1701 nt, Artificial Sequence
  derived and/or modified CDS sequence (wt) from hemagglutinin__InfluenzaA__AEX36597
augaagacuaucauugcuuugagcuacauucuaugucugguuuucgcucaaaaacuuccuggaaaugacaacagcauggcaacgcugugccuugggcaccaugcaguaccaaacggaacaauagugaaaacaaucacgaaugaccaaauugaaguuacuaaugcuacugagcugguucagaguuccucaacaggugaaauaugcgacaguccucaucagauccuugauggagagaacugcacacuaauagaugcucuauugggagacccucaaugugauggcuuccaaaauaagaaaugggaccuuuuuguugaacgcagcaaagccuacagcaacuguuacccuuaugaugugccggauuaugccucccuuaggucacuaguugccucauccggcacacuggaguuuaacaaugaaagcuucaauuggacuggagucacucaaaacggaacaagcucugcuugcauaaggagaucuaauaacaguuucuuuaguagauugaauugguugacccacuuaaaauucaaauacccagcauugaacgugacuaugccaaacaaugaacaauuugacaaauuguacauuugggggguucaccacccggguacggacaaugaccaaaucuuccuguaugcucaagcaucaggaagaaucacagucucuaccaaaagaagccaacaaacuguaaucccgaauaucggaucuagacccagagugaggaauaucccuagcagaauaagcaucuauuggacaauaguaaaaccgggagacauacuuuugauuaacagcacagggaaucuaauugcuccuagggguuacuucaaaauacgaagugggaaaagcucaauaaugagaucagaugcacccauuggcaaaugcaauucugaaugcaucacuccaaauggaagcauucccaaugacaaaccauuccaaaauguuaacaggaucacauacggggccugucccagauauguuaagcaaaacacucugaaauuggcaacagggaugcgaaauguaccagagaaacaaacuagaggcauauuuggcgcaaucgcggguuucauagaaaaugguugggagggaaugguggaugguugguacgguuucaggcaucaaaauucugaaggaagaggacaagcagcagaucucaaaagcacucaagcagcaaucgaucaaaucaaugggaagcugaauagauugaucgggaaaaccaacgagaaauuccaucagauugaaaaagaauucucagaagucgaagggagaauucaggaccuugagaaauauguugaggacaccaaaguagaucucuggucauacaacgcggagcuucuuguugcccuggagaaccaacauacaauugaucuaacugacucagaaaugaacaaacuguuugaaaaaacaaagaagcaacugagggaaaaugcugaggauaugggcaaugguuguuucaaaauauaccacaaaugugacaaugccugcauaggaucaaucagaaauggaacuuaugaccacgauguauacagagaugaagcauuaaacaaccgguuccagaucaagggaguugagcugaagucaggguacaaagauuggauccuauggauuuccuuugccauaucauguuuuuugcuuuguguugcuuuguugggguucaucaugugggccugccaaaaaggcaacauuaggugcaacauuugcauuuga

SEQ ID NO: 40150 - RNA, 1701 nt, Artificial Sequence
  derived and/or modified CDS sequence (wt) from hemagglutinin__InfluenzaA__AEX36608
augaagacuaucauugcuuugagcuacauucuaugucugguuuucgcucaaaaacuucccggaaaugacaacagcacggcaacgcugugccuugggcaccaugcaguaccaaacggaacgauagugaaaacaaucacgaaugaccaaauugaaguuacuaaugcuacugagcugguucagaguuccucaacagguggaauaugcgacaguccucaucagauccuugauggagaaaacugcacacuaauagaugcucuauugggagacccucagugugauggcuuccaaaauaagaaaugggaccuuuuuguugaacgcagcaaagccuacagcaacuguuauccuuaugaugugccggauuaugccucccuuaggucacuaguugccucauccggcacacuggaguuuaacaaugaaaacuucaauuggacuggagucacucaaaauggaacaagcucugcuugcaaaaggagaucuaauaacaguuucuuuaguagauugaauugguugacccacuuaaaauucaaauacccagcauugaacgugacuaugccaaacaaugaaaaauuugacaaauuguacauuugggggguucaccacccggguacggacaaugaccaaaucuuccuguaugcucaagcaucaggaagaaucacagucucuaccaaaagaagccaacaaacuguaaucccgaauaucggaucuagacccagaguaaggaauauccccagcagaauaagcaucuauuggacaauaguaaaaccgggagacauacuuuugauuaacagcacagggaaucuaauugcuccuagggguuacuucaagauacgaagugggaaaagcucaauaaugagaucagaugcacccauuggcaaaugcaauucugaaugcaucacuccaaauggaagcauucccaaugacaaaccauuucaaaauguaaacaggaucacauauggggccugucccagauauguuaagcaaaacacucugaaauuggcaacagggaugcgaaauguaccagagaaacaaacuagaggcauauuuggcgcaaucgcggguuucauagaaaaugguugggagggaaugguggaugguugguacgguuucaggcaucaaaauucugagggaauaggacaagcagcagaucucaaaagcacucaagcagcaaucaaucaaaucaaugggaagcugaauagguugaucgggaaaaccaacgagaaauuccaucagauugaaaaagaauucucagaaguagaagggagaauucaggaccucgagaaauauguugaggacacuaaaauagaucucuggucauacaacgcggagcuucuuguugcccuugagaaccaacauacaauugaucuaacugacucagaaaugaacaaacuguuugaaagaacaaagaagcaacugagggaaaaugcugaggauaugggcaaugguuguuucaaaauauaccacaaaugugacaaugccugcauaggaucaaucagaaauggaacuuaugaccaugauguauacagagaugaagcauuaaacaaacgguuccagaucaaaggcguugagcugaagucaggauacaaagauuggauccuauggauuuccuuugccauaucauguuuuuugcuuuguguugcuuuguugggguucaucaugugggccugccaaaaaggcaacauuaggugcaacauuugcauuuga

SEQ ID NO: 40151 - RNA, 1701 nt, Artificial Sequence; identical to SEQ ID NO: 39973
  derived and/or modified CDS sequence (wt) from hemagglutinin__InfluenzaA__AEX36619

SEQ ID NO: 40152 - RNA, 1701 nt, Artificial Sequence
  derived and/or modified CDS sequence (wt) from hemagglutinin__InfluenzaA__AEX63617
auggaagcaaaauuauuuguauuauucugugcauucacugcacuaaaagcugacaccauuuguguaggcuaccaugccaacaauuccacagacacugucgacacaauacuggagaaaaaugugacuguuacccauucaguuaauuuacuggaaaacagccauaaugggaaacucugcagccugaauggaaagauccccuuacaacuggggaacugcaacguagcaggauggauccuuggcaacccaaaaugugacuugcugcucacagcgaauucguggucuuacauaauagagacuucaaauucaaaaaauggagcaugcuaccccggagaauucgcugauuaugaagaguuaaaggagcagcugaguacaguuucuucauuugaaagauuugaaauuuucccaaaggcaaccucauggccaaaccaugauaccaccagagguaccacaguugcaugcucccacucuggagccaacagcuuuuaucggaauuuacuauggauaguaaagaaaggaaacuccuauccuaagcucagcaagucauacacaaacaauaagggaaaggaagugcuuguaauuuggggagugcaccacccuccgaccgacaguguccaacaaacccucuaccagaauaaucauacauauguuucaguuggaucaucaaaauacuacaaaagguucacaccagaaauaguagcaagaccuaaagucagagaacaagcaggcagaaugaauuauuacuggacacuguuagaucaaggggacaccauaacuuuugaagccacugggaauuuaauagcaccauggcacgcauuugcauugaaaaaaggcucuaguucuggaauuaugaggucggaugcucagguucacaauugcacuacaaagugccaaacuccccauggggccuugaaaggcaaucuuccuuuucagaauguacaucccgucacuauuggagaaugccccaaauauguuaaaagcacccaacugagaauggcaacaggacuaaggaauauccccucuauucaauccagaggacuuuucggggcaauugccggauucauugaaggaggauggacaggaaugguagauggaugguauggauaucaccaucgaaaugagcagggaucugguuacgcagcagaucagaaaagcacacaaauugcaauugaugggauaaguaacaaagugaacucagugauugaaaaaaugaacauucaauuuacuucagugggcaaggaguucaauagucuagagaaaaggauggaaaauuugaauaagaagguugaugauggguuuuuggauguauggacauauaacgcugaguugcucauuuuacucgagaaugaaaggacucuagauuuccaugaccuuaacguaaaaaauuuauaugaaaaggucaaaucacaacuaaggaacaaugcuaaggaaaucggaaauggcugcuuugaguucuaucacaaaugugauaaugagugcauggaaagcguaaagaauggcacauacaauuaucucaaauauucagaagaauccaaguugaauagggaggaaauagauggugugaaacuagaaucaaugggaauucaccagauuuuggcgaucuacuccacagucgccaguucccuggucuuauuagucucccugggggcaaucagcuucuggauguguucuaaugggucauugcaaugcagaguaugcauuuaa

SEQ ID NO: 40153 - RNA, 1698 nt, Artificial Sequence; identical to SEQ ID NO: 35290
  derived and/or modified CDS sequence (wt) from hemagglutinin__InfluenzaA__AEX92873

SEQ ID NO: 40154 - RNA, 1701 nt, Artificial Sequence
  derived and/or modified CDS sequence (wt) from hemagglutinin__InfluenzaA__AEY69088
augaaggcaauacuaguaguucugcuauauacauuugcaaccgcaaaugcagacacauuauguauagguuaucaugcgaacaauucaacagacacuguagacacaguacuagaaaagaauguaacaguaacacacucuguuaaccuucuagaagacaagcauaacgggaaacuaugcaaacuaagagggguagccccauugcauuuggguaaauguaacauugcuggcuggauccugggaaauccagagugugaaucacucuccacagcaagcucaugguccuacauuguggaaacaucuaguucagacaauggaacguguuacccaggagauuucaucgauuaugaggagcuaagagagcaauugagcucagugucaucauuugaaagguuugagauauuccccaagacaaguucauggcccaaucaugacucgaacaaagguguaacggcagcauguccucaugcuggagcaaaaagcuucuacaaaaauuuaauauggcuaguuaaaaaagggaauucauacccaaagcucagcaaauccuacauuaaugauaaagggaaagaaguccucgugcuauggggcauucaccauccaucuacuagugcugaccaacaaagucucuaucagaaugcagaugcauauguuuuuguggggacaucaagauacagcaagaaguucaagccggaaauagcaauaagacccaaagugagggaucaagaagggagaaugaacuauuacuggacacuaguagagccgggagacaaaauaacauucgaagcaacuggaaaucuagugguaccgagauaugcauucgcaauggaaagaaaugcuggaucugguauuaucauuucagauacaccaguccacgauugcaauacaacuugucagacacccaagggugcuauaaacaccagccucccauuucagaauauacauccgaucacaauuggaaaauguccaaaauauguaaaaagcacaaaauugagacuggccacaggauugaggaaugucccgucuauucaaucuagaggccuauuuggggccauugccgguuucauugaagggggguggacagggaugguagauggaugguacgguuaucaccaucaaaaugagcaggggucaggauaugcagccgaccugaagagcacacagaaugccauugacaagauuacuaacaaaguaaauucuguuauugaaaagaugaauacacaguucacagcaguagguaaagaguucaaccaccuggaaaaaagaauagagaauuuaaauaaaaaaguugaugaugguuuccuggacauuuggacuuacaaugccgaacuguugguucuauuggaaaaugaaagaacuuuggacuaccacgauucaaaugugaagaacuuauaugaaaagguaagaagccaguuaaaaaacaaugccaaggaaauuggaaacggcugcuuugaauuuuaccacaaaugcgauaacacgugcauggaaagugucaaaaaugggacuuaugacuacccaaaauacucagaggaagcaaaauuaaacagagaagaaauagaugggguaaagcuggaaucaacaaggauuuaccagauuuuggcgaucuauucaacugucgccaguucauugguacugguagucucccugggggcaaucaguuucuggaugugcucuaaugggucucuacaguguagaauauguauuuaa

SEQ ID NO: 40155 - RNA, 1701 nt, Artificial Sequence; identical to SEQ ID NO: 35442
  derived and/or modified CDS sequence (wt) from hemagglutinin__InfluenzaA__AEY69098

SEQ ID NO: 40156 - RNA, 1701 nt, Artificial Sequence
  derived and/or modified CDS sequence (wt) from hemagglutinin__InfluenzaA__AEY69120
augaagacuaucauugcuuugagcuacauucuaugucugguuuucgcucaaaaacuuccuggaaaugacaacagcacggcaacgcugugccuugggcaccaugcaguaccaaacggaacgauagugaaaacaaucacgaaugaccaaauugaaguuacuaaugcuacugagcugguucagaguuccucaacaggugaaauaugcgacaguccucaucagauccucgauggagaaaacugcacgcuaauagaugcucuauugggagacccucagugugauggcuuccaaaauaagaaaugggaccuuuuuguugaacgaagcaaagccuacagcaacuguuacccuuaugaugugccggauuaugccucccuuaggucacuaguugccucauccggcacacuggaguuuaacaaugaaagcuucaauuggacuggagucacucaaaacggaacaagcucugcuugcauaaggagaucuaauaauaguuucuuuaguagauugaauugguugacccacuuaaacuucaaauacccagcauugaacgugacuaugccaaacaaugaacaauuugacaaauuguacauuugggggguucaccacccggguacggacaaggaccaaaucuuccuguaugcucaagcaucaggaagaaucacaguaucuaccaaaagaagccaacaagcuguaaucccgaauaucggaucuagacccagaguaaggaauaucccuagcagaauaagcaucuauuggacaauaguaaaaccgggggacauacuuuugauuaacagcacagggaaucuaauugcuccuagggguuacuucaaaauacgaaguggaaaaagcucaauaaugagaucagaugcacccauuggcaaaugcaauucugaaugcaucacuccaaauggaagcauucccaaugacaaaccauuccaaaauguaaacaggaucacauacggggccugucccagauauguuaagcaaaacacucugaaauuggcaacaggaaugcgaaauguaccagagaaacaaacuagaggcauauuuggcgcaauagcagguuucauagaaaaugguugggagggaaugguggaugguugguacgguuucaggcaucaaaauucugagggaagaggacaagcagcagaucucaaaagcacucaagcagcaauugaucaaaucaaugggaagcugaauagauugaucgggaaaaccaacgagaaauuccaucagauugaaaaagaauucucagaagucgaagggagaauucaggaccuugagaaauauguugaggacacuaaaauagaucucuggucauacaacgcggagcuucuuguugcccuggagaaccaacauacaauugaucuaacugacucagaaaugaacaaacuguuugaaaaaacaaagaagcaacugagggaaaaugcugaggauaugggcaaugguuguuucaaaauauaccacaaaugugacaaugccugcauaggaucaaucagaaauggaacuuaugaccacgauguauacagagaugaagcauuaaacaaccgguuccagaucaagggaguugagcugaagucaggguacaaagacuggauccuauggauuuccuuugccauaucauguuuuuugcuuuguguugcuuuguugggguucaucaugugggccugccaaaaaggcaacauuaggugcaacauuugcauuuga

SEQ ID NO: 40157 - RNA, 1701 nt, Artificial Sequence
  derived and/or modified CDS sequence (wt) from hemagglutinin__InfluenzaA__AEY69131
augaagacuaucauugcuuugagcuacauucuaugucugguuuucgcucaaaaacuuccuggaaaugacaacagcacggcaacgcugugccuugggcaccaugcaguaccaaacggaacgauagugaaaacaaucacgaaugaccaaauugaaguuacuaaugcuacugagcugguucagaguuccucaacaggugaaauaugcgacaguccucaucagauccuugauggaaaaaacugcacacuaauagaugcucuauugggagacccucagugugauggcuuccaaaauaagaaaugggaccuuuuuguugaacgcagcaaagccuacagcaacuguuacccuuaugaugugccggauuaugccucccuuaggucacuaguugccucauccggcacacuggaguuuaacaaugaaagcuucaauuggacuggagucacucaaaacggaacaagcucugcuugcauaaggagaucuaaaaacaguuucuuuaguagauugaauugguugacccacuuaaacuucaaauacccagcauugaacgugacuaugccaaacaaugaacaauuugacaaauuguacauuugggggguucaccacccggguacggacaaagaccaaaucuuccuguaugcucaagcaucaggaagaaucacagucucuaccaaaagaagccaacaaacugcaaucccgaauaucggaucuagacccagaguaaggaauaucccuagcagaauaagcaucuauuggacaauaguaaaaccgggagacauacuuuugauuaacagcacagggaaucuaauugcuccuagggguuacuucaaaauacgaagugggaaaagcucaauaaugagaucagaugcacccauuggcaaaugcaauucugaaugcaucacuccaaauggaagcauucccaaugacaaaccauuccaaaauguaaacaggaucacauacggggccugucccagauauguuaagcaaaacacucugaaauuggcaacagggaugcgaaauguaccagagaaacaaacuagaggcauauuuggcgcaaucgcggguuucauagaaaaugguugggaaggaaugguggaugguugguacgguuucaggcaucaaaauucugagggaagaggacaagcagcagaucucaaaagcacucaagcagcaaucgaucaaaucaaugggaagcugaauagauugaucgggaaaaccaacgagaaauuccaucagauugaaaaggaauucucagaagucgaagggagaauucaggaccuugagaaauauguugaggacacuaaaauagaucucuggucauacaacgcggagcuucuuguugcccuggagaaccaacauacaauugaucuaacugacucagaaaugaacaaacuguuugaaaaaacaaagaagcaacugagggaaaaugcugaggauaugggcaaugguuguuucaaaauauaccacaaaugugacaaugccugcauaggaucaaucagaaauggaacuuaugaccacgauguauacagagaugaagcacuaaacaaccgguuucagaucaagggaguugagcugaagucaggguacaaagauuggauccuauggauuuccuuugccauaucauguuuuuugcuuuguguugcuuuguugggguucaucaugugggccugccaaaaaggcaacauuaggugcaacauuugcauuuga

SEQ ID NO: 40158 - RNA, 1701 nt, Artificial Sequence
  derived and/or modified CDS sequence (wt) from hemagglutinin__InfluenzaA__AEY69153
augaagacuaucauugcuuugagcuacauucuaugucugguuuucgcucaaaaacuuccuggaaaugacaacagcacggcaacgcugugccuugggcaccaugcaguaccaaacggaacgauagugaaaacaaucacgaaugaccaaauugaaguuacuaaugcuacugagcugguucagaguuccucaacaggugaaauaugcgacaguccucaucagauccuugauggaaaaaacugcacacuaauagaugcucuauugggagacccucagugugauggcuuacaaaauaagaaaugggaccuuuuuguugaacgcagcaaagccuacagcaacuguuacccuuaugaugugccggauuaugccucccuuaggucacuaguugccucauccggcacacuggaguuuaacaaugaaagcuucaauuggacuggagucacucaaaacggaacaagcucugcuugcauaaggagaucuaaaaacaguuucuuuaguagauugaauugguugacccacuuaaacuucaaauacccagcauugaacgugacuaugccaaacaaugaacaauuugacaaauuguacauuugggggguucaccacccggguacggacaaagaccaaaucuuccuguaugcucaagcaucaggaagaaucacagucucuaccaaaagaagccaacaaacugcaaucccgaauaucggaucuagacccagaguaaggaauaucccuagcagaauaagcaucuauuggacaauaguaaaaccgggagacauacuuuugauuaacagcacagggaaucuaauugcuccuagggguuacuucaaaauacgaagugggaaaagcucaauaaugagaucagaugcacccauuggcaaaugcaauucugaaugcaucacuccaaauggaagcauucccaaugacaaaccauuccaaaauguaaacaggaucacauacggggccugucccagauauguuaagcaaaacacucugaaauuggcaacagggaugcgaaauguaccagagaaacaaacuagaggcauauuuggcgcaaucgcggguuucauagaaaaugguugggagggaaugguggaugguugguacgguuucaggcaucaaaauucugagggaagaggacaagcagcagaucucaaaagcacucaagcagcaaucgaucaaaucaaugggaagcugaauagauugaucgggaaaaccaacgagaaauuccaucagauugaaaaagaauucucagaagucgaagggagaauucaggaccuugagaaauauguugaggacacuaaaauagaucucuggucauacaacgcggagcuucuuguugcccuggagaaccaacauacaauugaucuaacugacucagaaaugaacaaacuguuugaaaaaacaaagaagcaacugagggaaaaugcugaggauaugggcaaugguuguuucaaaauauaccacaaaugugacaaugccugcauaggaucaaucagaaauggaacuuaugaccacgauguauacagagaugaagcauuaaacaaccgguuucagaucaagggaguugagcugaagucaggguacaaagauuggauccuauggauuuccuuugccauaucauguuuuuugcuuuguguugcuuuguugggguucaucaugugggccugccaaaaaggcaacauuaggugcaacauuugcauuuga

SEQ ID NO: 40159 - RNA, 1701 nt, Artificial Sequence
  derived and/or modified CDS sequence (wt) from hemagglutinin__InfluenzaA__AEY69164
augaagacuaucauugcuuugagcuacauucuaugucugguuuucgcucaaaaacuuccuggaaaugacaacagcacggcaacgcugugccuugggcaccaugcaguaccaaacggaacgauagugaaaacaaucacgaaugaccaaauugaaguuacuaaugcuacugagcugguucagaguuccucaacaggugaaauaugcgacaguccucaucagauccuugauggaaaaaacugcacacuaauagaugcucuauugggagacccucagugugauggcuuccaaaauaagaaaugggaccuuuuuguugaacgcagcaaagccuacagcaacuguuacccuuaugaugugccggauuaugccucccuuaggucacuaguugccucauccggaacacuggaguuuaacaaugaaagcuucaauuggacuggagucacucaaaacggaacaagcucugcuugcauaaggagaucuaaaaacaguuucuuuaguagauugaauugguugacccacuuaaacuucaaauacccagcauugaacgugacuaugccaaacaaugaacaauuugacaaauuguacauuugggggguucaccacccggguacggacaaagaccaaaucuuccuguaugcucaagcaucaggaagaaucacagucucuaccaaaagaagccaacaaacugcaaucccgaauaucggaucuagacccagaguaaggaauaucccuagcagaauaagcaucuauuggacaauaguaaaaccgggagacauacuuuugauuaacagcacagggaaucuaauugcuccuagggguuacuucaaaauacgaagugggaaaagcucaauaaugagaucagaugcacccauuggcaaaugcaauucugaaugcaucacuccaaauggaagcauucccaaugacaaaccauuccaaaauguaaacaggaucacauacggggccugucccagauauguuaagcaaaacacucugaaauuggcaacagggaugcgaaauguaccagagaaacaaacuagaggcauauuuggcgcaaucgcggguuucauagaaaaugguugggagggaaugguggaugguugguacgguuucaggcaucaaaauucugagggaagaggacaagcagcagaucucaaaagcacucaagcagcaaucgaucaaaucaaugggaagcugaauagauugaucgggaaaaccaacgagaaauuccaucagauugaaaaagaauucucagaagucgaagggagaauucaggaccuugagaaauauguugaggacacuaaaauagaucucuggucauacaacgcggagcuucuuguugcccuggagaaccaacauacaauugaucuaacugacucagaaaugaacaaacuguuugaaaaaacaaagaagcaacugagggaaaaugcugaggauaugggcaaugguuguuucaaaauauaccacaaaugugacaaugccugcauaggaucaaucagaaauggaacuuaugaccacgauguauacagagaugaagcacuaaacaaccgguuucagaucaagggaguugagcugaagucaggguacaaagauuggauccuauggauuuccuuugccauaucauguuuuuugcuuuguguugcuuuguugggguucaucaugugggccugccaaaaaggcaacauuaggugcaacauuugcauuuga

SEQ ID NO: 40160 - RNA, 1701 nt, Artificial Sequence; identical to SEQ ID NO: 40159
  derived and/or modified CDS sequence (wt) from hemagglutinin__InfluenzaA__AEY69175

SEQ ID NO: 40161 - RNA, 1701 nt, Artificial Sequence; identical to SEQ ID NO: 40159
  derived and/or modified CDS sequence (wt) from hemagglutinin__InfluenzaA__AEY69186

SEQ ID NO: 40162 - RNA, 1701 nt, Artificial Sequence
  derived and/or modified CDS sequence (wt) from hemagglutinin__InfluenzaA__AEY69197
augaagacuaucauugcuuugagcuacauucuaugucugguuuucgcucaaaaacuuccuggaaaugacaacagcacggcaacgcugugccuugggcaccaugcaguaccaaacggaacgauagugaaaacaaucacgaaugaccaaauugaaguuacuaaugcuaccgagcugguucagaguuccucaacaggugaaauaugcgacaguccucaucagauccuugauggaaaaaacugcacacuaauagaugcucuauugggagacccucagugugauggcuuccaaaauaagaaaugggaccuuuuuguugaacgcagcaaagccuacagcaacuguuacccuuaugaugugccggauuaugccucccuuaggucacuaguugccucauccggcacacuggaguuuaacaaugaaagcuucaauuggacuggagucacucaaaacggaacaagcucugcuugcauaaggagaucuaaaaacaguuucuuuaguagauugaauugguugacccacuuaaacuucaaauacccagcauugaacgugacuaugccaaacaaugaacaauuugacaaauuguacauuugggggguucaccacccggguacggacaaagaccaaaucuuccuguaugcucaagcaucaggaagaaucacugucucuaccaaaagaagccaacaaacugcaaucccgaauaucggaucuagacccagaguaaggaauaucccuagcagaauaagcaucuauuggacaauaguaaaaccgggagacauacuuuugauuaacagcacagggaaucuaauugcuccuagggguuacuucaaaauacgaagugggaaaagcucaauaaugagaucagaugcacccauuggcaaaugcaauucugaaugcaucacuccaaauggaagcauucccaaugacaaaccauuccaaaauguaaacaggaucacauacggggccugucccagauauguuaagcaaaacacucugaaauuggcaacagggaugcgaaauguaccagagaaacaaacuagaggcauauuuggcgcaaucgcggguuucauagaaaaugguugggagggaaugguggaugguugguacgguuucaggcaucaaaauucugagggaagaggacaagcagcagaucucaaaagcacucaagcagcaaucgaucaaaucaaugggaagcugaauagauugaucgggaaaaccaacgagaaauuccaucagauugaaaaggaauucucagaagucgaagggagaauucaggaccuugagaaauauguugaggacacuaaaauagaucucuggucauacaacgcggagcuucuuguugcccuggagaaccaacauacaauugaucuaacugacucagaaaugaacaaacuguuugaaaaaacaaagaagcaacugagggaaaaugcugaggauaugggcaaugguuguuucaaaauauaccacaagugugacaaugccugcauaggaucaaucagaaauggaacuuaugaccacgauguauacagagaugaagcacuaaacaaccgguuucagaucaagggaguugagcugaagucaggguacaaagauuggauccuauggauuuccuuugccauaucauguuuuuugcuuuguguugcuuuguugggguucaucaugugggccugccaaaaaggcaacauuaggugcaacauuugcauuuga

SEQ ID NO: 40163 - RNA, 1701 nt, Artificial Sequence; identical to SEQ ID NO: 40162
  derived and/or modified CDS sequence (wt) from hemagglutinin__InfluenzaA__AEY69208

SEQ ID NO: 40164 - RNA, 1701 nt, Artificial Sequence
  derived and/or modified CDS sequence (wt) from hemagglutinin__InfluenzaA__AEY69219
augaagacuaucauugcuuugagcuacauucuaugucugguuuucgcucaaaaacuuccuggaaaugacaacagcacggcaacgcugugccuugggcaccaugcaguaccaaacggaacgauagugaaaacaaucacgaaugaccaaauugaaguuacuaaugcuacugagcugguucagaguuccucaacaggugaaauaugcgacaguccucaucagauccuugauggaaaaaacugcacacuaauagaugcucuauugggagacccucagugugauggcuuccaaaauaagaaaugggaccuuuuuguugaacgcagcaaagccuacagcaacuguuacccuuaugaugugccagauuaugccucccuuaggucacuaguugccucauccggcacacuggaguuuaacaaugaaagcuucaauuggacuggagucacucaaaacggaacaagcucugcuugcauaaggagaucuaaaaacaguuucuuuaguagauugaauugguugacccacuuaaacuucaaauacccagcauugaacgugacuaugccaaacaaugaacaauuugacaaauuguacauuugggggguucaccacccggguacggacaaagaccaaaucuuccuguaugcucaagcaucaggaagaaucacagucucuaccaaaagaagccaacaaacugcaaucccgaauaucggaucuagacccagaguaaggaauaucccuagcagaauaagcaucuauuggacaauaguaaaaccgggagacauacuuuugauuaacagcacagggaaucuaauugcuccuagggguuacuucaaaauacgaagugggaaaagcucaauaaugagaucagaugcacccauuggcaaaugcaauucugaaugcaucacuccaaauggaagcauucccaaugacaaaccauuccaaaauguaaacaggaucacauacggggccugucccagauauguuaagcaaaacacucugaaauuggcaacagggaugcgaaauguaccagagaaacaaacuagaggcauauuuggcgcaaucgcggguuucauagaaaaugguugggagggaaugguggaugguugguacgguuucaggcaucaaaauucugagggaagaggacaagcagcagaucucaaaagcacucaagcagcaaucgaucaaaucaaugggaagcugaauagauugaucgggaaaaccaacgagaaauuccaucagauugaaaaagaauucucagaagucgaagggagaauucaggaccuugagaaauauguugaggacacuaaaauagaucucuggucauacaacgcggagcuucuuguugcccuggagaaccaacauacaauugaucuaacugacucagaaaugaacaaacuguuugaaaaaacaaagaagcaacugagggaaaaugcugaggauaugggcaaugguuguuucaaaauauaccacaaaugugacaaugccugcauaggaucaaucagaaauggaacuuaugaccacgauguauacagagaugaagcacuaaacaaccgguuucagaucaagggaguugagcugaagucaggguacaaagauuggauccuauggauuuccuuugccauaucauguuuuuugcuuuguguugcuuuguugggguucaucaugugggccugccaaaaaggcaacauuaggugcaacauuugcauuuga

SEQ ID NO: 40165 - RNA, 1701 nt, Artificial Sequence
  derived and/or modified CDS sequence (wt) from hemagglutinin__InfluenzaA__AEY69258
augaagacuaucauugcuuugagcuacauucuaugucugguuuucgcucaaaaacuuccuggaaaugacaacagcacggcaacgcugugccuugggcaccaugcaguaccaaacggaacgauagugaaaacaaucacgaaugaccaaauugaaguuacuaaugcuacugagcugguucagaguuccucaacaggugaaauaugcgacaguccucaucagauccuugauggagaaaacugcacacuaauagaugcucuauugggagacccucagugugauggcuuccaaaauaagaaaugggaccuuuuuguugaacgaagcaaagccuacagcaacuguuacccuuaugaugugccggauuaugccucccuuaggucacuaguugccucauccggcacacuggaguuuaacaaugaaagcuucaauuggacuggagucacucaaaacggaacaagcucugcuugcauaaggagaucuaauaauaguuucuuuaguagauugaauugguugacccacuuaaacuucaaauacccagcauugaacgugacuaugccaaacaaugaacaauuugacaaauuguacauuugggggguucaccacccggguacggacaaggaccaaaucuuccuguaugcucaagcaucaggaagaaucacaguaucuaccaaaagaagccaacaagcuguaaucccgaauaucggaucuagacccagaguaaggaauaucccuagcagaauaagcaucuauuggacaauaguaaaaccgggggacauacuuuugauuaacagcacagggaaucuaauugcuccuagggguuacuucaaaauacgaaguggaaaaagcucaauaaugagaucagaugcacccauuggcaaaugcaauucugaaugcaucacuccaaauggaagcauucccaaugacaaaccauuccaaaauguaaacaggaucacauacggggccugucccagauauguuaagcaaaacacucugaaauuggcaacaggaaugcgaaauguaccagagaaacaaacuagaggcauauuuggcgcaauagcggguuucauagaaaaugguugggagggaaugguggaugguugguacgguuucaggcaucaaaauucugagggaagaggacaagcagcagaucucaaaagcacucaagcagcaauugaucaaaucaaugggaagcugaauagauugaucgggaaaaccaacgagaaauuccaucagauugaaaaagaauucucagaagucgaagggagaauucaggaccuugagaaauauguugaggacacuaaaauagaucucuggucauacaacgcggagcuucuuguugcccuggagaaccaacauacaauugaucuaacugacucagaaaugaacaaacuguuugaaaaaacaaagaagcaacugagggaaaaugcugaggauaugggcaaugguuguuucaaaauauaccacaaaugugacaaugccugcauaggaucaaucagaaauggaacuuaugaccacgauguauacagagaugaagcauuaaacaaccgguuccagaucaagggaguugagcugaagucaggguacaaagauuggauccuauggauuuccuuugccauaucauguuuuuugcuuuguguugcuuuguugggguucaucaugugggccugccaaaaaggcaacauuaggugcaacauuugcauuuga

SEQ ID NO: 40166 - RNA, 1701 nt, Artificial Sequence; identical to SEQ ID NO: 40164
  derived and/or modified CDS sequence (wt) from hemagglutinin__InfluenzaA__AEY69269

SEQ ID NO: 40167 - RNA, 1701 nt, Artificial Sequence; identical to SEQ ID NO: 40156
  derived and/or modified CDS sequence (wt) from hemagglutinin__InfluenzaA__AEY69291

SEQ ID NO: 40168 - RNA, 1701 nt, Artificial Sequence; identical to SEQ ID NO: 40156
  derived and/or modified CDS sequence (wt) from hemagglutinin__InfluenzaA__AEY69302

SEQ ID NO: 40169 - RNA, 1701 nt, Artificial Sequence; identical to SEQ ID NO: 40156
  derived and/or modified CDS sequence (wt) from hemagglutinin__InfluenzaA__AEY69313

SEQ ID NO: 40170 - RNA, 1701 nt, Artificial Sequence; identical to SEQ ID NO: 40156
  derived and/or modified CDS sequence (wt) from hemagglutinin__InfluenzaA__AEY69785

SEQ ID NO: 40171 - RNA, 1701 nt, Artificial Sequence
  derived and/or modified CDS sequence (wt) from hemagglutinin__InfluenzaA__AEY69807
augaagacuaucauugcuuugagcuacauucuaugucugguuuucgcucaaaaacuuccuggaaaugacaacagcacggcaacgcugugccuugggcaccaugcaguaccaaacggaacgauagugaaaacaaucacgaaugaccaaauugaaguuacuaaugcuacugagcugguucagaguuccucaacaggugaaauaugcgacaguccucaucagauccuugauggaaaaaacugcacacuaauagaugcucuauugggagacccucagugugauggcuuacaaaauaagaaaugggaccuuuuuguugaacgcagcaaagccuacagcaacuguuacccuuaugaugugccggauuaugccucccuuaggucacuaguugccucauccggcacacuggaguuuaacaaugaaagcuucaauuggacuggagucacucaaaacggaacaagcucugcuugcauaaggagaucuaaaaacaguuucuuuaguagauugaauugguugacccacuuaaacuucaaauacccagcauugaacgugacuaugccaaacaaugaacaauuugacaaauuguacauuugggggguucaccacccggguacggacaaagaccaaaucuuccuguaugcucaagcaucaggaagaaucacagucucuaccaaaagaagccaacaaacugcaaucccgaauaucggaucuagacccagaguaaggaauaucccuagcagaauaagcaucuauuggacaauaguaaaaccgggagacauacuuuugauuaacagcacagggaaucuaauugcuccuagggguuacuucaaauuacgaagugggaaaagcucaauaaugagaucagaugcacccauuggcaaaugcaauucugaaugcaucacuccaaauggaagcauucccaaugacaaaccauuccaaaauguaaacaggaucacauacggggccugucccagauauguuaagcaaaacacucugaaauuggcaacagggaugcgaaauguaccagagaaacaaacuagaggcauauuuggcgcaaucgcggguuucauagaaaaugguugggagggaaugguggaugguugguacgguuucaggcaucaaaauucugagggaagaggacaagcagcagaucucaaaagcacucaagcagcaaucgaucaaaucaaugggaagcugaauagauugaucgggaaaaccaaugagaaauuccaucagauugaaaaagaauucucagaagucgaagggagaauucaggaccuugagaaauauguugaggacacuaaaauagaucucuggucauacaacgcggagcuucuuguugcccuggagaaccaacauacaauugaucuaacugacucagaaaugaacaaacuguuugaaaaaacaaagaagcaacugagggaaaaugcugaggauaugggcaaugguuguuucaaaauauaccacaaaugugacaaugccugcauaggaucaaucagaaauggaacuuaugaccacgauguauacagagaugaagcauuaaacaaccgguuucagaucaagggaguugagcugaagucaggguacaaagauuggauccuauggauuuccuuugccauaucauguuuuuugcuuuguguugcuuuguugggguucaucaugugggccugccaaaaaggcaacauuaggugcaacauuugcauuuga

SEQ ID NO: 40172 - RNA, 1701 nt, Artificial Sequence
  derived and/or modified CDS sequence (wt) from hemagglutinin__InfluenzaA__AEY69818
augaagacuaucauugcuuugagcuacauucuaugucugguuuucgcucaaaaacuuccuggaaaugacaacagcacggcaacgcugugccuugggcaccaugcaguaccaaacggaacgauagugaaaacaaucacgaaugaccaaauugaaguuacuaaugcuacugagcugguucagaguuccucaacaggugaaauaugcgacaguccucaucagauccuugauggaaaaaacugcacacuaauagaugcucuauugggagacccucagugugauggcuuccaaaauaagaaaugggaccuuuuuguugaacgcagcaaagccuacagcaacuguuacccuuaugaugugccagauuaugccucccuuaggucacuaguugccucauccggcacacuggaguuuaacaaugaaagcuucaauuggacuggagucacucaaaacggaacaagcucugcuugcauaaggagaucuaaaaacaguuucuuuaguagauugaauugguugacccacuuaaacuucaaauacccagcauugaacgugacuaugccaaacaaugaacaauuugacaaauuguacauuugggggguucaccacccggguacggacaaagaccaaaucuuccuguaugcucaagcaucaggaagaaucacagucucuaccaaaagaagccaacaaacugcaaucccgaauaucggaucuagacccagaguaaggaauaucccuagcagaauaagcaucuauuggacaauaguaaaaccgggagacauacuuuugauuaacagcacagggaaucuaauugcuccuagggguuacuucaaaauacgaagugggaaaagcucaauaaugagaucagaugcacccauuggcaaaugcaauucugaaugcaucacuccaaauggaagcauucccaaugacaaaccauuccaaaauguaaacaggaucacauacggggccugucccagauauguuaagcaaaacacucugaaauuggcaacagggaugcgaaauguaccagagaaacaaacuagaggcauauuuggcgcaaucgcggguuucauagaaaaugguugggagggaaugguggaugguugguacgguuucaggcaucaaaauucugagggaagaggacaagcagcagaucucaaaagcacucaagcagcaaucgaucaaaucaaugggaagcugaauagauugaucgggaaaaccaacgagaaauuccaucagauugaaaaagaauucucagaagucgaagggagaauucaggaccuugagaaauauguugaggacacuaaaauagaucucuggucauacaacgcggagcuucuuguugcccuggaaaaccaacauacaauugaucuaacugacucagaaaugaacaaacuguuugaaaaaacaaagaagcaacugagggaaaaugcugaggauaugggcaaugguuguuucaaaauauaccacaaaugugacaaugccugcauaggaucaaucagaaauggaacuuaugaccacgauguauacagagaugaagcacuaaacaaccgguuucagaucaagggaguugagcugaagucaggguacaaagauuggauccuauggauuuccuuugccauaucauguuuuuugcuuuguguugcuuuguugggguucaucaugugggccugccaaaaaggcaacauuaggugcaacaucugcauuuga

SEQ ID NO: 40173 - RNA, 1701 nt, Artificial Sequence
  derived and/or modified CDS sequence (wt) from hemagglutinin__InfluenzaA__AEY69829
augaagacuaucauugcuuugagcuacauucuaugucugguuuucgcucaaaaacuuccuggaaaugacaacagcacggcaacgcugugccuugggcaccaugcaguaccaaacggaacgauagugaaaacaaucacgaaugaccaaauugaaguuacuaaugcuacugagcugguucagaguuccucaacaggugaaauaugcgacaguccucaucagauccuugauggaaaaaacugcacacuaauagaugcucuauugggagacccucagugugauggcuuccaaaauaagaaaugggaccuuuuuguugaacgcagcaaagccuacagcaacuguuacccuuaugaugugccggauuaugccucccuuaggucacuaguugccucauccggcacacuggaguuuaacaaugaaagcuucaauuggacuggagucacucaaaacggaacaagcucugcuugcauaaggagaucuaaaaacaguuucuuuaguagauugaauugguugacccacuuaaacuucaaauacccagcauugaacgugacuaugccaaacaaugaacaauuugacaaauuguacauuugggggguucaccacccggguacggacaaagaccaaaucuuccuguaugcucaagcaucaggaagaaucacagucucuaccaaaagaagccaacaaacugcaaucccgaauaucggaucuagacccagaguaaggaauaucccuagcaggauaagcaucuauuggacaauaguaaaaccgggagacauacuuuugauuaacagcacagggaaucuaauugcuccuagggguuacuucaaaauacgaagugggaaaagcucaauaaugagaucagaugcacccauuggcaaaugcaauucugaaugcaucacuccaaauggaagcauucccaaugacaaaccauuccaaaauguaaacaggaucacauacggggccugucccagauauguuaagcaaaacacucugaaauuggcaacagggaugcgaaauguaccagagaaacaaacuagaggcauauuuggcgcaaucgcggguuucauagaaaaugguugggagggaaugguggaugguugguacgguuucaggcaucaaaauucugagggaagaggacaagcagcagaucucaaaagcacucaagcagcaaucgaucaaaucaaugggaagcugaauagauugaucgggaaaaccaacgagaaauuccaucagauugaaaaggaauucucagaagucgaagggagaauucaggaccuugagaaauauguugaggacacuaaaauagaucucuggucauacaacgcggagcuucuuguugcccuggagaaccaacauacaauugaucuaacugacucagaaaugaacaaacuguuugaaaaaacaaagaagcaacugagggaaaaugcugaggauaugggcaaugguuguuucaaaauauaccacaaaugugacaaugccugcauaggaucaaucagaaauggaacuuaugaccacgauguauacagagaugaagcacuaaacaaccgguuucagaucaagggaguugagcugaagucaggguacaaagauuggauccuauggauuuccuuugccauaucauguuuuuugcuuuguguugcuuuguugggguucaucaugugggccugccaaaaaggcaacauuaggugcaacauuugcauuuga

SEQ ID NO: 40174 - RNA, 1701 nt, Artificial Sequence
  derived and/or modified CDS sequence (wt) from hemagglutinin__InfluenzaA__AEY69840
augaagacuaucauugcuuugagcuacauucuaugucugguuuucgcucaaaaacuuccuggaaaugacaacagcacggcaacgcugugccuugggcaccaugcaguaccaaacggaacgauagugaaaacaaucacgaaugaccaaauugaaguuacuaaugcuacugagcugguucagaguuccucaacaggugaaauaugcgacaguccucaucagauccuugauggaaaaaacugcacacuaauagaugcucuauugggagacccucagugugauggcuuccaaaauaagaaaugggaccuuuuuguugaacgcagcaaagccuacagcaacuguuacccuuaugaugugccggauuaugccucccuuaggucacuaguugccucauccggcacacuggaguuuaacaaugaaagcuucaauuggacuggagucacucaaaacggaacaagcucugcuugcauaaggagaucuaaaaacaguuucuuuaguagauugaauugguugacccacuuaaacuucaaauacccagcauugaacgugacuaugccaaacaaugaacaauuugacaaauuguacauuugggggguucaccacccggguacggacaaagaccaaaucuuccuguaugcucaagcaucaggaagaaucacagucucuaccaaaagaagccaacaaacugcaaucccgaauaucggaucuagacccagaguaaggaauaucccuagcagaauaagcaucuauuggacaauaguaaaaccgggagacauacuuuugauuaacagcacagggaaucuaauugcuccuagggguuacuucaaaauacgaagugggaaaagcucaauaaugagaucagaugcacccauuggcaaaugcaauucugaaugcaucacuccaaauggaagcauucccaaugacaaaccauuccaaaauguaaacaggaucacauacggggccugucccagauauguuaagcaaaacacucugaaauuggcaacagggaugcgaaauguaccagagaaacaaacuagaggcauauuuggcgcaaucgcggguuucauagaaaaugguugggagggaaugguggaugguugguacgguuucaggcaucaaaauucugagggaagaggacaagcagcagaucucaaaagcacucaagcagcaaucgaucaaaucaaugggaagcugaauagauugaucgggaaaaccaacgagaaauuccaucagauugaaaaagaauucucagaagucgaagggagaauucaggaccuugagaaauauguugaggacacuaaaauagaucucuggucauacaacgcggagcuucuuguugcccuggagaaccaacauacaauugaucuaacugacucagaaaugaacaaacuguuugaaaaaacaaagaagcaacugagggaaaaugcugaggauaugggcaaugguuguuucaaaauauaccacaaaugugacaaugccugcauaggaucaaucagaaauggaacuuaugaccacgauguauacagagaugaagcacuaaacaaccgguuucagaucaagggaguugagcugaagucaggguacaaagauuggauccuauggauuuccuuugccauaucauguuuuuugcuuuguguugcuuuguugggguucaucaugugggccugccaaaaaggcaacauuaggugcaacauuugcauuuga

SEQ ID NO: 40175 - RNA, 1701 nt, Artificial Sequence
  derived and/or modified CDS sequence (wt) from hemagglutinin__InfluenzaA__AEY69851
augaagacuaucauugcuuugagcuacauucuaugucugguuuucgcucaaaaacuuccuggaaaugacaacagcacggcaacgcugugccuugggcaccaugcaguaccaaacggaacgauagugaaaacaaucacgaaugaccaaauugaaguuacuaaugcuacugagcugguucagaguuccucaacaggugaaauaugcgacaguccucaucagauccuugaugggaaaaacugcacacuaauagaugcucuauugggagacccucagugugauggcuuccaaaauaagaaaugggaccuuuuuguugaacgcagcaaagccuacagcaacuguuacccuuaugaugugccggauuaugccucccuuaggucacuaguugccucauccggcacacuggaguuuaacaaugaaagcuucaauuggacuggagucacucaaaacggaacaagcucugcuugcauaaggagaucuaaaaacaguuucuuuaguagauugaauugguugacccacuuaaacuucaaauacccagcauugaacgugacuaugccaaacaaugaacaauuugacaaauuguacauuugggggguucaccacccgggcacggacaaagaccaaaucuuccuguaugcucaagcaucaggaagaaucacagucucuaccaaaagaagccaacaaacugcaaucccgaauaucggaucuagacccagaguaaggaauaucccuagcagaauaagcaucuauuggacaauaguaaaaccgggagacauacuuuugauuaacagcacagggaaucuaauugcuccuagggguuacuucaaaauacgaagugggaaaagcucaauaaugagaucagaugcacccauuggcaaaugcaauucugaaugcaucacuccaaauggaagcauucccaaugacaaaccauuccaaaauguaaacaggaucacauacggggccugucccagauauguuaagcaaaacacucugaaauuggcaacagggaugcgaaauguaccagagaaacaaacuagaggcauauuuggcgcaaucgcggguuucauagaaaaugguugggaaggaaugguggaugguugguacgguuucaggcaucaaaauucugagggaagaggacaagcagcagaucucaaaagcacucaagcagcaaucgaucaaaucaaugggaagcugaauagauugaucgggaaaaccaacgagaaauuccaucagauugaaaaggaauucucagaagucgaagggagaauucaggaccuugagaaauauguugaggacacuaaaauagaucucuggucauacaacgcggagcuucuuguugcccuggagaaccaacauacaauugaucuaacugacucagaaaugaacaaacuguuugaaaaaacaaagaagcaacugagggaaaaugcugaggauaugggcaaugguuguuucaaaauauaccacaaaugugacaaugccugcauaggaucaaucagaaauggaacuuaugaccacgauguauacagagaugaagcacuaaacaaccgguuucagaucaaggggguugagcugaagucaggguacaaagauuggauccuauggauuuccuuugccauaucauguuuuuugcuuuguguugcuuuguugggguucaucaugugggccugccaaaaaggcaacauuaggugcaacauuugcauuuga

SEQ ID NO: 40176 - RNA, 1701 nt, Artificial Sequence
  derived and/or modified CDS sequence (wt) from hemagglutinin__InfluenzaA__AEY69873
augaagacuaucauugcuuugagcuacauucuaugucugguuuucgcucaaaaacuuccuggaaaugacaacagcacggcaacgcugugccuugggcaccaugcaguaccaaacggaacgauagugaaaacaaucacgaaugaccaaauugaaguuacuaaugcuacugagcugguucagaguuccucaacaggugaaauaugcgacaguccucaucagauccuugauggaaaaaacugcacacuaauagaugcucuauugggagacccucagugugauggcuuccaaaauaagaaaugggaccuuuuuguugaacgcagcaaagccuacagcaacuguuacccuuaugaugugccggauuaugccucccuuaggucacuaguugccucauccggcacacuggaguuuaacaaugaaagcuucaauuggacuggagucacucaaaacggaacaagcucugcuugcauaaggagaucuaaaaacaguuucuuuaguagauugaauugguugacccacuuaaacuucaaauacccagcauugaacgugacuaugccaaacaaugaacaauuugacaaauuguacauuugggggguucaccacccggguacggacaaagaccaaaucuuccuguaugcucaagcaucaggaagaaucacagucucuaccaaaagaagccaacaaacugcaaucccgaauaucggaucuagacccagaguaaggaauaucccuagcagaauaagcaucuauuggacaauaguaaaaccgggagacauacuuuugauuaacagcacagggaaucuaauugcuccuagggguuacuucaaaauacgaagugggaaaagcucaauaaugagaucagaugcacccauuggcaaaugcaauucugaaugcaucacuccaaauggaagcauucccaaugacaaaccauuccaaaauguaaacaggaucacauacggggccugucccagauauguuaagcaaaacacucugaaauuggcaacagggaugcgaaauguaccagagaaacaaacuagaggcauauuuggcgcaaucgcggguuucauagaaaaugguugggagggaaugguggaugguugguacgguuucaggcaucaaaauucugagggaagaggacaagcagcagaucucaaaagcacucaagcagcaaucgaucaaaucaaugggaagcugaauagauugaucgggaaaaccaacgagaaauuccaucagauugaaaaggaauucucagaagucgaagggagaauucaggaccuugagaaauauguugaggacacuaaaauagaucucuggucauacaacgcggagcuucuuguugcccuggagaaccaacauacaauugaucuaacugacucagaaaugaacaaacuguuugaaaaaacaaagaagcaacugagggaaaaugcugaggauaugggcaaugguuguuucaaaauauaccacaaaugugacaaugccugcauaggaucaaucagaaauggaacuuaugaccacgauguauacagagaugaagcacuaaacaaccgguuucagaucaagggaguugagcugaagucaggguacaaagauuggauccuauggauuuccuuugccauaucauguuuuuugcuuuguguugcuuuguugggguucaucaugugggccugccaaaaaggcaacauuaggugcaacauuugcauuuga

SEQ ID NO: 40177 - RNA, 1701 nt, Artificial Sequence
  derived and/or modified CDS sequence (wt) from hemagglutinin__InfluenzaA__AEY69884
augaagacuaucauugcuuugagcuacauucuaugucugguuuucgcucaaaaacuuccuggaaaugacaacagcacggcaacgcugugccuugggcaccaugcaguaccaaacggaacgauagugaaaacaaucacgaaugaccaaauugaaguuacuaaugcuacugagcugguucagaguuccucaacaggugaaauaugcgacaguccucaucagauccuugauggaaaaaacugcacacuaauagaugcucuauugggagacccucagugugauggcuuccaaaauaagaaaugggaccuuuuuguugaacgcagcaaagccuacagcaacuguuacccuuaugaugugccggauuaugccucccuuaggucacuaguugccucauccggcacacuggaguuuaacaaugaaagcuucaauuggacuggagucacucaaaacggaacaagcucugccugcauaaggagaucuaaaaacaguuucuuuaguagauugaauugguugacccacuuaaacuucaaauacccagcauugaacgugacuaugccaaacaaugaacaauuugacaaauuguacauuugggggguucaccacccggguacggacaaagaccaaaucuuccuguaugcucaagcaucaggaagaaucacagucucuaccaaaagaagccaacaaacugcaaucccgaauaucggaucuagacccagaguaaggaauaucccuagcagaauaagcaucuauuggacaauaguaaaaccgggagacauacuuuugauuaacagcacagggaaucuaauugcuccuagggguuacuucaaaauacgaagugggaaaagcucaauaaugagaucagaugcacccauuggcaaaugcaauucugaaugcaucacuccaaauggaagcauucccaaugacaaaccauuccaaaauguaaacaggaucacauacggggccugucccagauauguuaagcaaaacacucugaaauuggcaacagggaugcgaaauguaccagagaaacaaacuagaggcauauuuggcgcaaucgcggguuucauagaaaaugguugggagggaaugguggaugguugguacgguuucaggcaucaaaauucugagggaagaggacaagcagcagaucucaaaagcacucaagcagcaaucgaucaaaucaaugggaagcugaauagauugaucgggaaaaccaacgagaaauuccaucagauugaaaaggaauucucagaagucgaagggagaauucaggaccuugagaaauauguugaggacacuaaaauagaucucuggucauacaacgcggagcuucuuguugcccuggagaaccaacauacaauugaucuaacugacucagaaaugaacaaacuguuugaaaaaacaaagaagcaacugagggaaaaugcugaggauaugggcaaugguuguuucaaaauauaccacaaaugugacaaugccugcauaggaucaaucagaaauggaacuuaugaccacgauguauacagagaugaagcacuaaacaaccgguuucagaucaagggaguugagcugaagucaggguacaaagauuggauccuauggauuuccuuugccauaucauguuuuuugcuuuguguugcuuuguugggguucaucaugugggccugccaaaaaggcaacauuaggugcaacauuugcauuuga

SEQ ID NO: 40178 - RNA, 1701 nt, Artificial Sequence; identical to SEQ ID NO: 40176
  derived and/or modified CDS sequence (wt) from hemagglutinin__InfluenzaA__AEY69895

SEQ ID NO: 40179 - RNA, 1701 nt, Artificial Sequence; identical to SEQ ID NO: 40158
  derived and/or modified CDS sequence (wt) from hemagglutinin__InfluenzaA__AEY69906

SEQ ID NO: 40180 - RNA, 1701 nt, Artificial Sequence
  derived and/or modified CDS sequence (wt) from hemagglutinin__InfluenzaA__AEY69917
augaagacuaucauugcuuugagcuacauucuaugucugguuuucgcucaaaaacuuccuggaaaugacaacagcacggcaacgcugugccuugggcaccaugcaguaccaaacggaacgauagugaaaacaaucacgaaugaccaaauugaaguuacuaaugcuacugagcugguucagaguuccucaacaggugaaauaugcgacaguccucaucagauccuugauggaaaaaauugcacacuaauagaugcucuauugggagacccucagugugauggcuuccaaaauaagaaaugggaccuuuuuguugaacgcagcaaagccuacagcaacuguuacccuuaugaugugccggauuaugccucccuuaggucacuaguugccucauccggaacacuggaguuuaacaaugaaagcuucaauuggacuggagucacucaaaacggaacaagcucugcuugcauaaggagaucuaaaaacaguuucuuuaguagauugaauugguugacccacuuaaacuucaaauacccagcauugaacgugacuaugccaaacaaugaacaauuugacaaauuguacauuugggggguucaccacccggguacggacaaagaccaaaucuuccuguaugcucaagcaucaggaagaaucacagucucuaccaaaagaagccaacaaacugcaaucccgaauaucggaucuagacccagaguaaggaauaucccuagcagaauaagcaucuauuggacaauaguaaaaccgggagacauacuuuugauuaacagcacagggaaucuaauugcuccuagggguuacuucaaaauacgaagugggaaaagcucaauaaugagaucagaugcacccauuggcaaaugcaauucugaaugcaucacuccaaauggaagcauucccaaugacaaaccauuccaaaauguaaacaggaucacauacggggccugucccagauauguuaagcaaaacacucugaaauuggcaacagggaugcgaaauguaccagagaaacaaacuagaggcauauuuggcgcaaucgcggguuucauagaaaaugguugggagggaaugguggaugguugguacgguuucaggcaucaaaauucugagggaagaggacaagcagcagaucucaaaagcacucaagcagcaaucgaucaaaucaaugggaagcugaauagauugaucgggaaaaccaacgagaaauuccaucagauugaaaaagaauucucagaagucgaagggagaauucaggaccuugagaaauauguugaggacacuaaaauagaucucuggucauacaacgcggagcuucuuguugcccuggagaaccaacauacaauugaucuaacugacucagaaaugaacaaacuguuugaaaaaacaaagaagcaacugagggaaaaugcugaggauaugggcaaugguuguuucaaaauauaccacaaaugugacaaugccugcauaggaucaaucagaaauggaacuuaugaccacgauguauacagagaugaagcacuaaacaaccgguuucagaucaagggaguugagcugaagucaggguacaaagauuggauccuauggauuuccuuugccauaucauguuuuuugcuuuguguugcuuuguugggguucaucaugugggccugccaaaaaggcaacauuaggugcaacauuugcauuuga

SEQ ID NO: 40181 - RNA, 1701 nt, Artificial Sequence
  derived and/or modified CDS sequence (wt) from hemagglutinin__InfluenzaA__AEY69939
augaagacuaucauugcuuugagcuacauucuaugucugguuuucgcucaaaaaauuccuggaaaugacaacagcacggcaacgcugugccuugggcaccaugcaguaccaaacggaacgauagugaaaacaaucacgaaugaccaaauugaaguuacuaaugcuacugagcugguucagaguuccucaacaggugaaauaugcgacaguccucaucagauccuugauggaaaaaacugcacacuaauagaugcucuauugggagacccucagugugauggcuuccaaaauaagaaaugggaccuuuuuguugaacgcagcaaagccuacagcaacuguuacccuuaugaugugccggauuaugccucccuuaggucacuaguugccucauccggcacacuggaguuuaacaaugaaagcuucaauuggacuggagucacucaaaacggaacaagcucugcuugcauaaggagaucuaaaaacaguuucuuuaguagauugaauugguugacccacuuaaacuucaaauacccagcauugaacgugacuaugccaaacaaugaacaauuugacaaauuguacauuugggggguucaccacccggguacggacaaagaccaaaucuuccuguaugcucaagcaucaggaagaaucacagucucuaccaaaagaagccaacaaacugcaaucccgaauaucggaucuagacccagaguaaggaauaucccuagcagaauaagcaucuauuggacaauaguaaaaccgggagacauacuuuugauuaacagcacagggaaucuaauugcuccuagggguuacuucaaaauacgaagugggaaaagcucaauaaugagaucagaugcacccauuggcaaaugcaauucuggaugcaucacuccaaauggaagcauucccaaugacaaaccauuccaaaauguaaacaggaucacauacggggucugucccagauauguuaagcaaaacacucugaaauuggcaacagggaugcgaaauguaccagagaaacaaacuagaggcauauuuggcgcaaucgcggguuucauagaaaaugguugggagggaaugguggaugguugguacgguuucaggcaucaaaauucugagggaagaggacaagcagcagaucucaaaagcacucaagcagcaaucgaucaaaucaaugggaagcugaauagauugaucgggaaaaccaacgagaaauuccaucagauugaaaaagaauucucagaagucgaagggagaauucaggaccuugagaaauauguugaggacacuaaaauagaucucuggucauacaacgcggagcuucuuguugcccuggagaaccaacauacaauugaucuaacugacucagaaaugaacaaacuguuugaaaaaacaaagaagcaacugagggaaaaugcugaggauaugggcaaugguuguuucaaaauauaccacaaaugugacaaugccugcauaggaucaaucagaaauggaacuuaugaccacgauguauacagagaugaagcacuaaacaaccgguuucagaucaagggaguugagcugaagucaggguacaaagauugguuccuauggauuuccuuugccauaucauguuuuuugcuuuguguugcuuuguugggguucaucaugugggccugccaaaaaggcaacauuaggugcaacauuugcauuuga

SEQ ID NO: 40182 - RNA, 1701 nt, Artificial Sequence; identical to SEQ ID NO: 40181
  derived and/or modified CDS sequence (wt) from hemagglutinin__InfluenzaA__AEY69950

SEQ ID NO: 40183 - RNA, 1701 nt, Artificial Sequence; identical to SEQ ID NO: 40181
  derived and/or modified CDS sequence (wt) from hemagglutinin__InfluenzaA__AEY69961

SEQ ID NO: 40184 - RNA, 1701 nt, Artificial Sequence
  derived and/or modified CDS sequence (wt) from hemagglutinin__InfluenzaA__AEY69994
augaagacuaucauugcuuugagcuacauucuaugucugguuuucgcucaaaaaauuccuggaaaugacaacagcacggcaacgcugugccuugggcaccaugcaguaccaaacggaacgauagugaaaacaaucacgaaugaccaaauugaaguuacuaaugcuacugagcugguucagaguuccucaacaggugaaauaugcgacaguccucaucagauccuugauggaaaaaacugcacacuaauagaugcucuauugggagacccucagugugauggcuuccaaaauaagaaaugggaccuuuuuguugaacgcagcaaagccuacagcaacuguuacccuuaugaugugccggauuaugccucccuuaggucacuaguugccucauccggcacacuggaguuuaacaaugaaagcuucaauuggacuggagucacucaaaacggaacaagcucugcuugcauaaggagaucuaaaaacaguuucuuuaguagauugaauugguugacccacuuaaacuucaaauacccagcauugaacgugacuaugccaaacaaugaacaauuugacaaauuguacauuugggggguucaccacccggguacggacaaagaccaaaucuuccuguaugcucaagcaucaggaagaaucacagucucuaccaaaagaagccaacaaacugcaaucccgaauaucggaucuagacccagaguaaggaauaucccuagcagaauaagcaucuauuggacaauaguaaaaccgggagacauacuuuugauuaacagcacagggaaucuaauugcuccuagggguuacuucaaaauacgaagugggaaaagcucaauaaugagaucagaugcacccauuggcaaaugcaauucuggaugcaucacuccaaauggaagcauucccaaugacaaaccauuccaaaauguaaacaggaucacauacggggccugucccagauauguuaagcaaaacacucugaaauuggcaacagggaugcgaaauguaccagagaaacaaacuagaggcauauuuggcgcaaucgcggguuucauagaaaaugguugggagggaaugguggaugguugguacgguuucaggcaucaaaauucugagggaagaggacaagcagcagaucucaaaagcacucaagcagcaaucgaucaaaucaaugggaagcugaauagauugaucgggaaaaccaacgagaaauuccaucagauugaaaaagaauucucagaagucgaagggagaauucaggaccuugagaaauauguugaggacacuaaaauagaucucuggucauacaacgcggagcuucuuguugcccuggagaaccaacauacaauugaucuaacugacucagaaaugaacaaacuguuugaaaaaacaaagaagcaacugagggaaaaugcugaggauaugggcaaugguuguuucaaaauauaccacaaaugugacaaugccugcauaggaucaaucagaaauggaacuuaugaccacgauguauacagagaugaagcacuaaacaaccgguuucagaucaagggaguugagcugaagucaggguacaaagauugguuccuauggauuuccuuugccauaucauguuuuuugcuuuguguugcuuuguugggguucaucaugugggccugccaaaaaggcaacauuaggugcaacauuugcauuuga

SEQ ID NO: 40185 - RNA, 1701 nt, Artificial Sequence; identical to SEQ ID NO: 40184
  derived and/or modified CDS sequence (wt) from hemagglutinin__InfluenzaA__AEY70005

SEQ ID NO: 40186 - RNA, 1701 nt, Artificial Sequence; identical to SEQ ID NO: 40159
  derived and/or modified CDS sequence (wt) from hemagglutinin__InfluenzaA__AEY70016

SEQ ID NO: 40187 - RNA, 1701 nt, Artificial Sequence
  derived and/or modified CDS sequence (wt) from hemagglutinin__InfluenzaA__AEY70256
augaagacuaucauugcuuugagcuacauucuaugucugguuuucgcucaaaaacuuccuggaaaugacaacagcacggcaacgcugugccuugggcaccaugcaguaccaaacggaacgauagugaaaacaaucacgaaugaccaaauugaaguuacuaaugcuacugagcugguucagaguuccucaacaggugaaauaugcgacaguccucaucagauccuugauggaaaaaacugcacacuaauagaugcucuauugggagacccucagugugauggcuuccaaaauaagaaaugggaccuuuuuguugaacgcagcaaagccuacggcaacuguuacccuuaugaugugccggauuaugccucccuuaggucacuaguugccucauccggaacacuggaguuuaacaaugaaagcuucaauuggacuggagucacucaaaacggaacaagcucugcuugcauaaggagaucuaaaaacaguuucuuuaguagauugaauugguugacccacuuaaacuucaaauacccagcauugaacgugacuaugccaaacaaugaacaauuugacaaauuguacauuugggggguucaccacccggguacggacaaagaccaaaucuuccuguaugcucaagcaucaggaagaaucacagucucuaccaaaagaagccaacaaacugcaaucccgaauaucggaucuagacccagaguaaggaauaucccuagcagaauaagcaucuauuggacaauaguaaaaccgggagacaugcuuuugauuaacagcacagggaaucuaauugcuccuagggguuacuucaaaauacgaagugggaaaagcucaauaaugagaucagaugcacccauuggcaaaugcaauucugaaugcaucacuccaaauggaagcauucccaaugacaaaccauuccaaaauguaaacaggaucacauacggggccugucccagauauguuaagcaaaacacucugaaauuggcaacagggaugcgaaauguaccagagaaacaaacuagaggcauauuuggcgcaaucgcggguuucauagaaaaugguugggagggaaugguggaugguugguacgguuucaggcaucaaaauucugagggaagaggacaagcagcagaucucaaaagcacucaagcagcaaucgaucaaaucaaugggaagcugaauagauugaucgggaaaaccaacgagaaauuccaucagauugaaaaagaauucucagaagucgaagggagaauucaggaccuugagaaauauguugaggacacuaaaauagaucucuggucauacaacgcggagcuucuuguugcccuggagaaccaacauacaauugaucuaacugacucagaaaugaacaaacuguuugaaaaaacaaagaagcaacugagggaaaaugcugaggauaugggcaaugguuguuucaaaauauaccacaaaugugacaaugccugcauaggaucaaucagaaauggaacuuaugaccacgauguauacagagaugaagcacuaaacaaccgguuucagaucaagggaguugagcugaagucaggguacaaagauuggauccuauggauuuccuuugccauaucauguuuuuugcuuuguguugcuuuguugggguucaucaugugggccugccaaaaaggcaacauuaggugcaacauuugcauuuga

SEQ ID NO: 40188 - RNA, 1701 nt, Artificial Sequence
  derived and/or modified CDS sequence (wt) from hemagglutinin__InfluenzaA__AEY70267
augaagacuaucauugcuuugagcuacauucuaugucugguuuucgcucaaaaacuuccuggaaaugacaacagcacggcaacgcugugccuugggcaccaugcaguaccaaacggaacgauagugaaaacaaucacgaaugaccaaauugaaguuacuaaugcuacugagcugguucagaguuccucaacaggugaaauaugcgacaguccucaucagauccuugauggaaaaaacugcacacuaauagaugcucuauugggagacccucagugugauggcuuccaaaauaagaaaugggaccuuuuuguugaacgcagcaaagccuacagcaacuguuacccuuaugaugugccggauuaugccucccuuaggucacuaguugccucauccggcacacuggaguuuaacaaugaaagcuucaauuggacuggagucacucaaaacggaacaagcucugcuugcauaaggagaucuaaaaacaguuucuuuaguagauugaauugguugacccacuuaaacuucaaauacccagcauugaacgugacuaugccaaacaaugaacaauuugacaaauuguacauuugggggguucaccacccggguacggacaaagaccaaaucuuccuguaugcucaagcaucaggaagaaucacagucucuaccaaaagaagccaacaaacugcaaucccgaauaucggaucuagacccagaguaaggaauaucccuagcaggauaagcaucuauuggacaauaguaaaaccgggagacauacuuuugauuaacagcacagggaaucuaauugcuccuagggguuacuucaaaauacgaagugggaaaagcucaauaaugagaucagaugcacccauuggcaaaugcaauucugaaugcaucacuccaaauggaagcauucccaaugacaaaccauuccaaaauguaaacaggaucacauacggggccugucccagauauguuaagcaaaacacucugaaauuggcaacagggaugcgaaauguaccagagaaacaaacuagaggcauauuuggcgcaaucgcggguuucauagaaaaugguugggagggaaugguggaugguugguacgguuucaggcaucaaaauucugagggaagaggacaagcagcagaucucaaaagcacucaagcagcaaucgaucaaaucaaugggaagcugaauagauugaucgggaaaaccaacgagaaauuccaucagauugaaaaggaauucucagaagucgaagggagaauucaggaccuugagaaauauguugaggacacuaaaauagaucucuggucauacaacgcggagcuucuuguugcccuggagaaccaacauacaauugaucuaacugacucagaaaugaacaaauuguuugaaaaaacaaagaagcaacugagggaaaaugcugaggauaugggcaaugguuguuucaaaauauaccacaaaugugacaaugccugcauaggaucaaucagaaauggaacuuaugaccacgauguauacagagaugaagcacuaaacaaccgguuucagaucaagggaguugagcugaagucaggguacaaagauuggauccuauggauuuccuuugccauaucauguuuuuugcuuuguguugcuuuguugggguucaucaugugggccugccaaaaaggcaacauuaggugcaacauuugcauuuga

SEQ ID NO: 40189 - RNA, 1701 nt, Artificial Sequence; identical to SEQ ID NO: 40188
  derived and/or modified CDS sequence (wt) from hemagglutinin__InfluenzaA__AEY70278

SEQ ID NO: 40190 - RNA, 1701 nt, Artificial Sequence; identical to SEQ ID NO: 35611
  derived and/or modified CDS sequence (wt) from hemagglutinin__InfluenzaA__AEY70289

SEQ ID NO: 40191 - RNA, 1701 nt, Artificial Sequence
  derived and/or modified CDS sequence (wt) from hemagglutinin__InfluenzaA__AEY70300
augaagacuaucauugcuuugagcuacauucuaugucugguuuucgcucaaaaacuuccuggaaaugacaacagcacggcaacgcugugccuugggcaccaugcaguaccaaacggaacgauagugaaaacaaucacgaaugaccaaauugaaguuacuaaugcuacugagcugguucagaguuccucaacaggugaaauaugcgacaguccucaucagauccuugauggaaaaaacugcacacuaauagaugcucuauugggagacccucagugugauggcuuccaaaauaagaaaugggaccuuuuuguugaacgcagcaaagccuacagcaacuguuacccuuaugaugugccggauuaugccucccuuaggucacuaguugccucauccggcacacuggaguuuaacaaugaaagcuucaauuggacuggagucacucaaaacggaacaagcucugcuugcauaaggagaucuaaaaacaguuucuuuaguagauugaauugguugacccacuuaaacuucaaauacccagcauugaacgugacuaugccaaacaaugaacaauuugacaaauuguacauuugggggguucaccacccggguacggacaaagaccaaaucuuccuguaugcucaagcaucaggaagaaucacagucucuaccaaaagaagccaacaaacugcaaucccgaauaucggaucuagacccagaguaaggaauaucccuagcagaauaagcaucuauuggacaauaguaaaaccgggagacauacuuuugauuaacagcacagggaaucuaauugcuccuagggguuacuucaaaauacgaagugggaaaagcucaauaaugagaucagaugcacccauuggcaaaugcaauucugaaugcaucacuccaaauggaagcauucccaaugacaaaccauuccaaaauguaaacaggaucacauacggggcuugucccagauauguuaagcaaaacacucugaaauuggcaacagggaugcgaaauguaccagagaaacaaacuagaggcauauuuggcgcaaucgcggguuucauagaaaaugguugggagggaaugguggaugguugguacgguuucaggcaucaaaauucugagggaagaggacaagcagcagaucucaaaagcacucaagcagcaaucgaucaaaucaaugggaagcugaauagauugaucgggaaaaccaacgagaaauuccaucagauugaaaaagaauucucagaagucgaagggagaauucaggaccuugagaaauauguugaggacacuaaaauagaucucuggucauacaacgcggagcuucuuguugcccuggagaaccaacauacaauugaucuaacugacucagaaaugaacaaacuguuugaaaaaacaaagaagcaacugagggaaaaugcugaggauaugggcaaugguuguuucaaaauauaccacaaaugugacaaugccugcauaggaucaaucagaaauggaacuuaugaccacgauguauacagagaugaagcauuaaacaaccgguuucagaucaagggaguugagcugaagucaggguacaaagauuggauccuauggauuuccuuugccauaucauguuuuuugcuuuguguugcuuuguugggguucaucaugugggccugccaaaaaggcaacauuaggugcaacauuugcauuuga

SEQ ID NO: 40192 - RNA, 1701 nt, Artificial Sequence; identical to SEQ ID NO: 40191
  derived and/or modified CDS sequence (wt) from hemagglutinin__InfluenzaA__AEY70311

SEQ ID NO: 40193 - RNA, 1701 nt, Artificial Sequence; identical to SEQ ID NO: 40173
  derived and/or modified CDS sequence (wt) from hemagglutinin__InfluenzaA__AEY70333

SEQ ID NO: 40194 - RNA, 1701 nt, Artificial Sequence; identical to SEQ ID NO: 40184
  derived and/or modified CDS sequence (wt) from hemagglutinin__InfluenzaA__AEY70344

SEQ ID NO: 40195 - RNA, 1701 nt, Artificial Sequence; identical to SEQ ID NO: 39118
  derived and/or modified CDS sequence (wt) from hemagglutinin__InfluenzaA__AEY70355

SEQ ID NO: 40196 - RNA, 1701 nt, Artificial Sequence
  derived and/or modified CDS sequence (wt) from hemagglutinin__InfluenzaA__AEY70365
augaagacuaucauugcuuugagcuacauucuaugucugguuuucgcucaaaaacuuccuggaaaugacaacagcacggcaacgcugugccuugggcaccaugcaguaccaaacggaacgauagugaaaacaaucacgaaugaccaaauugaaguuacuaaugcuacugagcugguucagaguuccucaacaggugaaauaugcgacaguccucaucagauccuugauggagaaaacugcacgcuaauagaugcucuauugggagacccucagugugauggauuccaaaauaagaaaugggaccuuuuuguugaacgaagcaaagccuacagcaacuguuacccuuaugaugugccggauuaugccucccuuaggucacuaguugccucauccggcacacuggaguuuaacaaugaaagcuucaauuggacuggagucacucaaaacggaacaagcucugcuugcauaaggagaucuaauaauaguuucuuuaguagauugaauugguugacccacuuaaacuucaaauacccagcauugaacgugacuaugccaaacaaugaacaauuugacaaauuguacauuugggggguucaccacccggguacggacaaggaccaaaucuuccuguaugcucaagcaucaggaagaaucacaguaucuaccaaaagaagccaacaagcuguaaucccgaauaucggaucuagacccagaguaaggaauaucccuagcagaauaagcaucuauuggacaauaguaaaaccgggggacauacuuuugauuaacagcacagggaaucuaauugcuccuagggguuacuucaaaauacgaaguggaaaaagcucaauaaugagaucagaugcacccauuggcaaaugcaauucugaaugcaucacuccaaauggaagcauucccaaugacaaaccauuccaaaauguaaacaggaucacauacggggccugucccagauauguuaagcaaaacacucugaaauuggcaacaggaaugcgaaauguaccagagaaacaaacuagaggcauauuuggcgcaauagcagguuucauagaaaaugguugggagggaaugguggaugguugguacgguuucaggcaucaaaauucugagggaagaggacaagcagcagaucucaaaagcacucaagcagcaauugaucaaaucaaugggaagcugaauagauugaucgggaaaaccaacgagaaauuccaucagauugaaaaagaauucucagaagucgaagggagaauucaggaccuugagaaauauguugaggacacuaaaauagaucucuggucauacaacgcggagcuucuuguugcccuggagaaccaacauacaauugaucuaacugacucagaaaugaacaaacuguuugaaaaaacaaagaagcaacugagagaaaaugcugaggauaugggcaaugguuguuucaaaauauaccacaaaugugacaaugccugcauaggaucaaucagaaauggaacuuaugaccacgauguauacagagaugaagcauuaaacaaccgguuccagaucaagggaguugagcugaagucaggguacaaagauuggauccuauggauuuccuuugccauaucauguuuuuugcuuuguguugcuuuguugggguucaucaugugggccugccaaaaaggcaacauuaggugcaacauuugcauuuga

SEQ ID NO: 40197 - RNA, 1701 nt, Artificial Sequence; identical to SEQ ID NO: 40174
  derived and/or modified CDS sequence (wt) from hemagglutinin__InfluenzaA__AEY70376

SEQ ID NO: 40198 - RNA, 1701 nt, Artificial Sequence
  derived and/or modified CDS sequence (wt) from hemagglutinin__InfluenzaA__AFB18656
augaaggcaauacuaguaguucugcuauauacauuugcaaccgcaaaugcagacacauuauguauagguuaccaugcgaacaauucaacagacacuguagacacaguacuagaaaagaauguaacaguaacacacucuguuaaucuucuagaagacaagcauaacgggaaacuaugcaaacuaagagggguagccccauugcauuuggguaaauguaacauugcuggcuggauccugggaaauccagagugugaaacacucuccacagcaagcucaugguccuacauuguggaaacaucuaguucagacaauggaacguguuacccaggagauuucaucgauuaugaggagcuaagagagcaauugagcucagugucaucauuugaaagguuugagauauuccccaagacaaguucauggcccaaucaugacucgaacaaagguguaacggcagcauguccucaugcuggagcaaaaggcuucuacaaaaauuuaauauggcuaguuaaaaaaggaaauucauacccaaagcucagcaaauccuacauuaaugauaaagggaaagaaguccucgugcuauggggcauucaccauccaucuacuacugcugaccaacaaagucucuaucagaaugcagauacauauguuuuuguggggacaucaagauacagcaagaaguucaagccggaaauagcaauaagacccaaagugagggaucaagaagggagaaugaacuauuacuggacacuaguagagccgggagacaaaauaacauucgaagcaacuggaaaucuagugguaccgagauaugcauucgcaauggaaagagaugcuggaucugguauuaucauuucagauacaccaguccacgauugcaauacaacuugucagacacccaagggugcuauaaacaccagccucccauuucagaauauacauccgaucacaauuggaaaauguccaaaauauguaaaaagcacaaaauugagacuggccacaggauugaggaaugucccgucuauucaaucuagaggccuauuuggggccauugccggcuucauugaagggggguggacagggaugguagauggaugguacgguuaucaccaucaaaaugagcaggggucaggauaugcagccgaccugaagagcacacaaaaugccauugacaagauuacuaacaaaguaaauucuguuauugaaaaaaugaauacacaguucacagcaguagguaaagaguucaaccaccuggaaaaaagaauagagaauuuaaauaaaaaaguugaugauggguuccuggacauuuggacuuacaaugccgaacuguugguucuauuggaaaaugaaagaacuuuggacuaccacgauucaaaugugaagaacuuauaugaaaagguaagaaaccaguuaaaaaacaaugccaaggaaauuggaaauggcugcuuugaauuuuaccacaaaugcgauaacacguguauggaaagugucaaaaaugggacuuaugacuacccaaaauacucagaggaagcaaaauuaaacagagaagaaauagaugggguaaagcuggaaucaacaaggauuuaccagauuuuggcgaucuauucaacugccgccaguucauugguacugguagucucccugggggcaaucaguuuuuggaugugcucuaaugggucucuacaguguagaauauguauuuaa

SEQ ID NO: 40199 - RNA, 1701 nt, Artificial Sequence; identical to SEQ ID NO: 39062
  derived and/or modified CDS sequence (wt) from hemagglutinin__InfluenzaA__AFB40597

SEQ ID NO: 40200 - RNA, 1701 nt, Artificial Sequence; identical to SEQ ID NO: 39062
  derived and/or modified CDS sequence (wt) from hemagglutinin__InfluenzaA__AFB40598

SEQ ID NO: 40201 - RNA, 1701 nt, Artificial Sequence
  derived and/or modified CDS sequence (wt) from hemagglutinin__InfluenzaA__AFB40599
augaaggcaauacuaguaguucugcuauauacauuugcaaccgcaaaugcagacacauuauguauagguuaucaugcgaacaauucaacagacacuguagacacaguacuagaaaagaauguaacaguaacacacucuguuaaccuucuagaagacaagcauaacgggaaacuaugcaaacuaagagggguagccccauugcauuuggguaaauguaacauugcuggcuggauccugggaaauccagagugugaaucacucuccacagcaagcucaugguccuacauuguggaaacaucuaguucagacaauggaacguguuacccaggagauuucaucgauuaugaggagcuaagagagcaauugagcucagugucaucauuugaaagguuugagauauuccccaagacaaguucauggcccaaucaugacuugaacaaagguguaacggcagcauguccucaugcuggagcaaaaagcuucuacaaaaauuuaauauggcuaguuaaaaaaggaaauucauacccaaagcucagcaaauccuacauuaaugauaaagggaaagaaguccucgugcuauggggcauucaccauccaucuacuagugcugaccaacaaagucucuaucagaaugcagaugcauauguuuuuguggggacaucaagauacagcaagaaguucaagccggaaauagcaauaagacccaaagugagggaucaagaagggagaaugaacuauuacuggacacuaguagagccgggagacaaaauaacauucgaagcaacuggaaaucuagugguaccgagauaugcauucgcaauggaaagaaaugcuggaucugguauuaucauuucagauacaccaguccacgauugcaauacaacuugucagacacccaagggugcuauaaacaccagccucccauuucagaacauacauccgaucacaauuggaaaauguccaaaauauguaaaaagcacaaaauugagacuggccacaggauugaggaaugucccgucuauucaaucuagaggccuauuuggggccauugccgguuucauugaagggggguggacagggaugguagauggaugguacgguuaucaccaucaaaaugagcaggggucaggauaugcagccgaccugaagagcacacagaaugccauugacaagauuacuaacaaaguaaauucuguuauugaaaagaugaauacacaguucacagcaguagguaaagaguucaaccaccuggaaaaaagaauagagaauuuaaauaaaaaaguugaugaugguuuccuggacauuuggacuuacaaugccgaacuguugguucuauuggaaaaugaaagaacuuuggacuaccacgauucaaaugugaagaacuuauaugaaaagguaagaagccaguuaaaaaacaaugccaaggaaauuggaaacggcugcuuugaauuuuaccacaaaugcgauaacacgugcauggaaagugucaaaaaugggacuuaugacuacccaaaauacucagaggaagcaaaauuaaacagagaagaaauagaugggguaaagcuggaaucaacaaggauuuaccagauuuuggcgaucuauucaacugucgccaguucauugguacugguagucucccugggggcaaucaguuucuggaugugcucuaaugggucucuacaguguagaauauguauuuaa

SEQ ID NO: 40202 - RNA, 1701 nt, Artificial Sequence
  derived and/or modified CDS sequence (wt) from hemagglutinin__InfluenzaA__AFB40600
augaaggcaauacuaguaguucugcuauauacauuugcaaccgcaaaugcagacacauuauguauagguuaucaugcgaacaauucaacagacacuguagacacaguacuagaaaagaauguaacaguaacacacucuguuaaccuucuagaagacaagcauaacggaaaacuaugcaaacuaagagggguagccccauugcauuuggguaaauguaacauugcuggcuggauccugggaaauccagagugugaaucacucuccacagcaagcucaugguccuacauuguggaaacaucuaguucagacaauggaacguguuacccaggagauuucaucgauuaugaggagcuaagagagcaauugagcucagugucaucauuugaaagguuugagauauuccccaagacaaguucauggcccaaucaugacucgaacaaagguguaacggcagcauguccucaugcuggagcaaaaagcuucuacaaaaauuuaauauggcuaguuaaaaaaggaaauucauacccaaagcucagcaaauccuacauuaaugauaaagggaaagaaguccucgugcuauggggcauucaccauccaucuacuagugcugaccaacaaagucucuaucagaaugcagaugcauauguuuuuguggggacaucaagauacagcaagaaguucaagccggaaauagcaauaagacccaaagugagggaucaagaagggagaaugaacuauuacuggacacuaguagagccgggagacaaaauaacauucgaagcaacuggaaaucuagugguaccgagauaugcauucgcaauggaaagaaaugcuggaucugguauuaucauuucagauacaccaguccacgauugcaauacaacuugucagacacccaagggugcuauaaacaccagccucccauuucagaauauacauccgaucacaauuggaaaauguccaaaauauguaaaaagcacaaaauugagacuggccacaggauugaggaaugucccgucuauucaaucuagaggccuauuuggggccauugccgguuucauugaagggggguggacagggaugguagauggaugguacgguuaucaccaucaaaaugagcaggggucaggauaugcagccgaccugaagagcacacagaaugccauugacaagauuacuaacaaaguaaauucuguuauugaaaagaugaauacacaguucacagcaguagguaaagaguucaaccaccuggaaaaaagaauagagaauuuaaauaaaaaaguugaugaugguuuccuggacauuuggacuuacaaugccgaacuguugguucuauuggaaaaugaaagaacuuuggacuaccacgauucaaaugugaagaacuuauaugaaaagguaagaagccaguuaaaaaacaaugccaaggaaauuggaaacggcugcuuugaauuuuaccacaaaugcgauaacacgugcauggaaagugucaaaaaugggacuuaugacuacccaaaauacucagaggaagcaaaauuaaacagagaagaaauagaugggguaaagcuggaaucaacaaggauuuaccagauuuuggcgaucuauucaacugucgccaguucauugguacugguagucucccugggggcaaucaguuucuggaugugcucuaaugggucucuacaguguagaauauguauuuaa

SEQ ID NO: 40203 - RNA, 1701 nt, Artificial Sequence
  derived and/or modified CDS sequence (wt) from hemagglutinin__InfluenzaA__AFB40601
augaaggcaauacuaguaguucugcuauauacauuugcaaccgcaaaugcagacacauuauguauagguuaucaugcgaacaauucaacagacacuguagacacaguacuagaaaagaauguaacaguaacacacucuguuaaccuucuagaagacaagcauaacgggaaacuaugcaaacuaagagggguagccccauugcauuuggguaaauguaacauugcuggcuggauccugggaaauccagagugugaaucacucuccacagcaagcucaugguccuacauuguggaaacaucuaguucagacaauggaacguguuacccaggagauuucaucgauuaugaggagcuaagagagcaauugagcucagugucaucauuugaaagguuugagauauuccccgagacaaguucauggcccaaucaugacucgaacaaagguguaacggcagcauguccucaugcuggagcaaaaagcuucuacaaaaauuuaauauggcuaguuaaaaaaggaaauucauacccaaagcucagcaaauccuacauuaaugauaaagggaaagaaguccucgugcuauggggcauucaccauccaucuacuagugcugaccaacaaagucucuaucagaaugcagaugcauauguuuuuguggggacaucaagauacagcaagaaguucaagccggaaauagcaauaagacccaaagugaggggucaagaagggagaaugaacuauuacuggacacuaguagagccgggagacaaaauaacauucgaagcaacuggaaaucuagugguaccgagauaugcauucgcaauggaaagaaaugcuggaucugguauuaucauuucagauacaccaguccacgauugcaauacaacuugucagacacccaagggugcgauaaacaccagccuaccauuucagaauauacauccgaucacaauuggaaaauguccaaaauauguaaaaagcacaaaauugagacuggccacaggauugaggaaugucccgucuauucaaucuagaggccuauuuggggccauugccgguuucauugaagggggguggacagggaugguagauggaugguacgguuaucaccaucaaaaugagcaggggucaggauaugcagccgaccugaagagcacacagaaugccauugacgagauuacuaacaaaguaaauucuguuauugaaaagaugaauacacaguucacagcaguagguaaagaguucaaccaccuggaaaaaagaauagagaauuuaaauaaaaaaguugaugaugguuuccuggacauuuggacuuacaaugccgaacuguugguucuauuggaaaaugaaagaacuuuggacuaccacgauucaaaugugaagaacuuauaugaaaagguaagaagccaguuaaaaaacaaugccaaggaaauuggaaacggcugcuuugaauuuuaccacaaaugcgauaacacgugcauggaaagugucaaaaaugggacuuaugacuacccaaaauacucagaggaagcaaaauuaaacagagaagaaauagaugggguaaagcuggaaucaacaaggauuuaccagauuuuggcgaucuauucaacugucgccaguucauugguacugguagucucccugggggcaaucaguuucuggaugugcucuaaugggucucuacaguguagaauauguauuuaa

SEQ ID NO: 40204 - RNA, 1701 nt, Artificial Sequence; identical to SEQ ID NO: 35311
  derived and/or modified CDS sequence (wt) from hemagglutinin__InfluenzaA__AFB40602

SEQ ID NO: 40205 - RNA, 1701 nt, Artificial Sequence
  derived and/or modified CDS sequence (wt) from hemagglutinin__InfluenzaA__AFB40603
augaaggcaauacuaguaguucugcuauauacauuugcaaccgcaaaugcagacacauuauguauagguuaucaugcgaacaauucaacagacacuguagacacaguacuagaaaagaauguaacaguaacacacucuguuaaccuucuagaagacaagcauaacgggaaacuaugcaaacuaagagggguagccccauugcauuuggguaaauguaacauugcuggcuggauccugggaaauccagagugugaaucacucuccacagcaagcucaugguccuacauuguggaaacaucuaguucagacaauggaacguguuacccaggagauuucaucgauuaugaggagcuaagagagcaauugagcucagugucaucauuugaaagguuugagauauuccccaagacaaguucauggcccaaucaugacucgaacaaagguguaacggcagcauguccucaugcuggagcaaaaagcuucuacaaaaauuuaauauggcuaguuaaaaaaggaaauucauacccaaagcucagcaaauccuacauuaaugauaaagggaaagaaguccucgugcuauggggcauucaccauccaucuacuagugcugaccaacaaagucucuaucagaaugcagaugcauauguuuuuguggggacaucaagauacagcaagaaguucaagccggaaauagcaauaagacccaaagugagggaucaagaagggagaaugaacuauuacuggacacuaguagagccgggagacaaaauaacauucgaagcaacuggaaaucuagugguaccgagauaugcauucgcaauggaaagaaaugcuggaucugguauuaucauuucagacacaccaguccacgauugcaauacaacuugucagacacccaagggugcuauaaacaccagccucccauuucagaauauacauccgaucacaauuggaaaauguccaaaauauguaaaaagcacaaaauugagacuggccacaggauugaggaaugucccgucuauucaaucuagaggccuauuuggggccauugccgguuucauugaagggggguggacagggaugguagauggaugguacgguuaucaccaucaaaaugagcaggggucaggauaugcagccgaccugaagagcacacagaaugccauugacaagauuacuaacaaaguaaauucuguuauugaaaagaugaauacacaguucacagcaguagguaaagaguucaaccaccuggaaaaaagaauagagaauuuaaauaaaaaaguugaugaugguuuccuggacauuuggacuuacaaugccgaacuguugguucuauuggaaaaugaaagaacuuuggacuaccacgauucaaaugugaagaacuuauaugaaaagguaagaagccaguuaaaaaacaaugccaaggaaauuggaaacggcugcuuugaauuuuaccacaaaugcgauaacacgugcauggaaagugucaaaaaugggacuuaugacuacccaaaauacucagaggaggcaaaauuaaacagagaagaaauagauggggugaagcuggaaucaacaaggauuuaccagauuuuggcgaucuauucaacugucgccaguucauugguacugguagucucccugggggcaaucaguuucuggaugugcucuaaugggucucuacaguguagaauauguauuuaa

SEQ ID NO: 40206 - RNA, 1701 nt, Artificial Sequence
  derived and/or modified CDS sequence (wt) from hemagglutinin__InfluenzaA__AFB40604
augaaggcaauacuaguaguucugcuauauacauuugcaaccgcaaaugcagacacauuauguauagguuaucaugcgaacaauucaacagacacuguagacacaguacuagaaaagaauguaacaguaacacacucuguuaaccuucuagaagacaagcauaacgggaaacuaugcaaacuaagagggguagccccauugcauuuggguaaauguaacauugcuggcuggauccugggaaauccagagugugaaucacucuccacagcaagcucaugguccuacauuguggaaacaucuaguucagacaauggaacguguuacccaggagauuucaucgauuaugaggagcuaagagagcaauugagcucagugucaucauuugaaagguuugagauauuccccaagacaaguucauggcccaaucaugacucgaacaaagguguaacggcagcauguccucaugcuggagcaaaaagcuucuacaaaaauuuaauauggcuaguuaaagaaggaaauucauacccaaagcucagcaaauccuacauuaaugauaaagggaaagaaguccucgugcuauggggcauucaccauccaccuacuacugcugaccaacaaagucucuaucagaaugcagauacauauguuuuuguggggacaucaagauacagcaagaaguucaagccggaaauagcaauaagacccaaagugagggaucaagaagggagaaugaacuauuacuggacacuaguagagccgggagacaaaauaacauucgaagcaacuggaaaucuagugguaccgagauaugcauucgcaauggaaagaaaugcuggaucugguauuaucauuucagauacaccaguccacgauugcaauacaacuugucagacacccaagggugcuauaaacaccagccucccauuucagaauauacauccgaucacaauuggaaaauguccaaaauauguaaaaagcacaaaauugagacuggcaacaggauugaggaaugucccgucuauucaaucuagaggccuauuuggggccauugccggcuucauugaagggggguggacagggaugguagauggaugguacgguuaucaccaucaaaaugagcaggggucaggauaugcagccgaccugaagagcacacagaaugccauugacaagauuacuaacaaaguaaauucuguuauugaaaagaugaauacacaguucacagcaguagauaaagaguucaaccaccuggaaaaaagaauagggaauuuaaauaaaaaaguugaugaugguuuccuggacauuuggacuuacaaugccgaacuguugguucuauuggaaaaugaaagaacuuuggacuaccacgauucaaaugugaagaacuuauaugaaaagguaagaaaccaguuaaaaaacaaugccaaggaaauuggaaauggcugcuuugaauuuuaccacaaaugcgauaacacgugcauggaaagugucaaaaaugggacuuaugacuacccaaaauacucagaggaagcaaaauuaaacagagaagaaauagaugggguaaagcuggaaucaacaaggauuuaccagauuuuggcgaucuauucaacugucgccaguucauugguacugguagucucccugggggcaaucaguuuuuggaugugcucuaaugggucucuacaguguagaauauguauuuaa

SEQ ID NO: 40207 - RNA, 1701 nt, Artificial Sequence; identical to SEQ ID NO: 34681
  derived and/or modified CDS sequence (wt) from hemagglutinin__InfluenzaA__AFB70138

SEQ ID NO: 40208 - RNA, 1701 nt, Artificial Sequence
  derived and/or modified CDS sequence (wt) from hemagglutinin__InfluenzaA__AFB70145
augaaggcaauacuaguaguucugcuauauacauuugcaaccgcaaaugcagacacauuauguauagguuaucaugcgaacaauucaacagacacuguagacacaguacuagaaaagaauguaacaguaacacacucuguuaaccuucuagaagacaagcauaacgggaaacuaugcaaacuaagagggguagccccauugcauuuggguaaauguaacauugcuggcuggauccugggaaauccagagugugaaucacucuccacagcaagcucaugguccuacauuguggaaacaucuaguucagacaauggaacguguuacccaggagauuucaucgauuaugaggagcuaagagagcaauugagcucagugucaucauuugaaagguuugagauauuccccaagacaaguucauggcccaaucaugacucgaacaaagguauaacggcagcauguccucaugcuggagcaaaaagcuucuacaaaaauuuaauauggcuaguuaaaaaaggaaauucauacccaaagcucagcaaauccuacauuaaugauaaagggaaagaaguccucgugcuauggggcauucaccauccaucuacuagugcugaccaacaaagucucuaucagaaugcagaugcauauguuuuuguggggacaucaagauacagcaagaaguucaagccggaaauagcaauaagacccaaagugagggaucaagaagggagaaugaacuauuacuggacacuaguagaaccgggagacaaaauaacauucgaagcaacuggaaaucuagugguaccgagauaugcauucgcaauggaaagaaaugcuggaucugguauuaucauuucagauacaccaguccacgauugcaauacaacuugucagacacccaagggugcuauaaacaccagccucccauuucagaauauacauccgaucacaauuggaaaauguccaaaauauguaaaaagcacaaaauugagacuggccacaggauugaggaaugucccgucuauucaaucuagaggccuauuuggggccauugccgguuucauugaagggggguggacagggaugguagauggaugguacgguuaucaccaucaaaaugagcaggggucaggauaugcagccgaccugaagagcacacagaaugccauugacgagauuacuaacaaaguaaauucuguuauugaaaagaugaauacacaguucacagcaguagguaaagaguucaaccaccuggaaaaaagaauagagaauuuaaauaaaaaaguugaugaugguuuccuggacauuuggacuuacaaugccgaacuguugguucuauuggaaaaugaaagaacuuuggacuaccacgauucaaaugugaagaacuuauaugaaaagguaagaagccaguuaaaaaacaaugccaaggaaauuggaaacggcugcuuugaauuuuaccacaaaugcgauaacacgugcauggaaagugucaaaaaugggacuuaugacuacccaaaauacucagaggaagcaaaauuaaacagagaagaaauagaugggguaaagcuggaaucaacaaggauuuaccagauuuuggcgaucuauucaacugucgccaguucauugguacugguagucucccugggggcaaucaguuucuggaugugcucuaaugggucucuacaguguagaauauguauuuaa

SEQ ID NO: 40209 - RNA, 1701 nt, Artificial Sequence
  derived and/or modified CDS sequence (wt) from hemagglutinin__InfluenzaA__AFB70154
augaaggcaauacuaguaguucugcuauauacauuugcaaccgcaaaugcagacacauuauguauagguuaucaugcgaacaauucaacagacacuguagacacaguacuagaaaagaauguaacaguaacacacucuguuaaccuucuagaagacaagcauaacgagaaacuaugcaaacuaagagggguagccccauugcauuuggguaaauguaacauugcuggcuggauccugggaaauccagagugugaaucacucuccacagcaagcucaugguccuacauuguggaaacaucuaguucagacaauggaacguguuacccaggagauuucaucgauuaugaggagcuaagagagcaauugagcucagugucaucauuugaaagguuugagauauuccccaagacaaguucauggcccaaucaugacucgaacaaagguguaacggcagcauguccucaugcuggagcaaaaagcuucuacaaaaauuuaauauggcuaguuaaaaaaggaaauucauacccaaagcucagcaaauccuacauuaaugauaaagggaaagaaguccucgugcuauggggcauucaccauccaucuacuagugcugaccaacaaagucucuaucagaaugcagaugcauauguuuuuguggggacaucaagauacagcaagaaguucaagccggaaauagcaauaagacccaaagugagggaucaagaagggagaaugaacuauuacuggacacuaguagagccgggagacaaaauaacauucgaagcaacuggaaaucuagugguaccgagauaugcauucgcaauggaaagaaaugcuggaucugguauuaucauuucagauacaccaguccacgauugcaauacaacuugucagacacccaagggugcuauaaacaccagccucccauuucagaauauacauccgaucacaauuggaaaauguccaaaauauguaaaaagcacaaaauugagacuggccacaggauugaggaaugucccgucuauucaaucuagaggccuauuuggggccauugccgguuucauugaagggggguggacagggaugguagauggaugguacgguuaucaccaucaaaaugagcaggggucaggauaugcagccgaccugaagagcacacagaaugccauugacgagauuacuaacaaaguaaauucuguuauugaaaagaugaauacacaguucacagcaguagguaaagaguucaaccaccuggaaaaaagaauagagaauuuaaauaaaaaaguugaugaugguuuccuggacauuuggacuuacaaugccgaacuguugguucuauuggaaaaugaaagaacuuuggacuaccacgauucaaaugugaagaacuuauaugaaaagguaagaagccaguuaaaaaacaaugccaaggaaauuggaaacggcugcuuugaauuuuaccacaaaugcgauaacacgugcauggaaagugucaaaaaugggacuuaugacuacccaaaauacucagaggaagcaaaauuaaacagagaagaaauagaugggguaaagcuggaaucaacaaggauuuaccagauuuuggcgaucuauucaacugucgccaguucauugguacugguagucucccugggggcaaucaguuucuggaugugcucuaaugggucucuacaguguagaauauguauuuaa

SEQ ID NO: 40210 - RNA, 1701 nt, Artificial Sequence; identical to SEQ ID NO: 34681
  derived and/or modified CDS sequence (wt) from hemagglutinin__InfluenzaA__AFB70156

SEQ ID NO: 40211 - RNA, 1701 nt, Artificial Sequence
  derived and/or modified CDS sequence (wt) from hemagglutinin__InfluenzaA__AFB70158
augaaggcaauacuaguaguucugcuauauacauuugcaaccgcaaaugcagacacauuauguauagguuaucaugcgaacaauucaacagacacuguagacacaguacuagaaaagaauguaacaguaacacacucuguuaaccuucuagaagacaagcauaacgggaaacuaugcaaacuaagagggguagccccauugcauuuggguaaauguaacauugcuggcuggauccugggaaauccagagugugaaucacucuccacagcaagcucaugguccuacauuguggaaacaucuaguucagacaauggaacguguuacccaggagauuucaucgauuaugaggagcuaagagagcaauugagcucagugucaucauuugaaagguuugagauauuccccaagacaaguucauggcccaaucaugacucgaacaaagguguaacggcagcauguccucaugcuggagcaaaaagcuucuacaaaaauuuaauauggcuaguuaaaaaaggaaauucauacccaaagcucagcaaauccuacauuaaugauaaagggaaagaaguccucgugcuauggggcauucaccauccaucuacuagugcugaccaacaaagucucuaucagaaugcagaugcauauguuuuuguggggacaucaagauacagcaagaaguucaagccggaaauagcaauaagacccaaagugagggaucaagaagggagaaugaacuauuacuggacacuaguagagccgggagacaaaauaacauucgaagcaacuggaaaucuagugguaccgagauaugcauucgcaauggaaagaaaugcuggaucugguauuaucauuucagauacaccaguccacgauugcaauacaacuugucagacacccaagggugcuauaaacaccagccucccauuucagaauauacauccgaucacaauuggaaaauguccaaaauauguaaaaagcacaaaauugagacuggccacaggauugaggaaugucccgucuauucaaucuagaggccuauuuggggccauugccgguuucauugaagggggguggacagggaugguagauggaugguacgguuaucaccaccaaaaugagcaggggucaggauaugcagccgaccugaagagcacacagaaugccauugacgagauuacuaacaaaguaaauucuguuauugaaaagaugaauacacaguucacagcaguagguaaagaguucaaccaccuggaaaaaagaauagagaauuuaaauaaaaaaguugaugaugguuuccuggacauuuggacuuacaaugccgaacuguugguucuauuggaaaaugaaagaacuuuggacuaccacgauucaaaugugaagaacuuauaugaaaagguaagaagccaguuaaaaaacaaugccaaggaaauuggaaacggcugcuuugaauuuuaccacaaaugcgauaacacgugcauggaaagugucaaaaaugggacuuaugacuacccaaaauacucagaggaagcaaaauuaaacagagaagaaauagaugggguaaagcuggaaucaacaaggauuuaccagauuuuggcgaucuauucaacugucgccaguucauugguacugguagucucccugggggcaaucaguuucuggaugugcucuaaugggucucuacaguguagaauauguauuuaa

SEQ ID NO: 40212 - RNA, 1701 nt, Artificial Sequence
  derived and/or modified CDS sequence (wt) from hemagglutinin__InfluenzaA__AFB70160
augaaggcaauacuaguaguucugcuguauacauuugcaaccgcaaaugcagacacauuauguauagguuaucaugcgaacaauucaacagacacuguagacacaguacuagaaaagaauguaacaguaacacacucuguuaaccuucuagaagacaagcauaacgggaaacuaugcaaacuaagagggguagccccauugcauuuggguaaauguaacauugcuggcuggauccugggaaauccagagugugaaucacucuccacagcaagcucaugguccuacauuguggaaacaucuaguucagacaauggaacguguuacccaggagauuucaucgauuaugaggagcuaagagagcaauugagcucagugucaucauuugaaagguuugagauauuccccaagacaaguucauggcccaaucaugacucgaacaaagguauaacggcagcauguccucaugcuggagcaaaaagcuucuacaaaaauuuaauauggcuaguuaaaaaaggaaauucauacccaaagcucagcaaauccuacauuaaugauaaagggaaagaaguccucgugcuauggggcauucaccauccaucuacuagugcugaccaacaaagucucuaucagaaugcagaugcauauguuuuuguggggacaucaagauacagcaagaaguucaagccggaaauagcaauaagacccaaagugagggaucaagaagggagaaugaacuauuacuggacacuaguagagccgggagacaaaauaacauucgaagcaacuggaaaucuagugguaccgagauaugcauucgcaauggaaagaaaugcuggaucugguauuaucauuucagauacaccaguccacgauugcaauacaacuugucagacacccaagggugcuauaaacaccagccucccauuucagaauauacauccgaucacaauuggaaaauguccaaaauauguaaaaagcacaaaauugagacuggccacaggauugaggaaugucccgucuauucaaucuagaggccuauuuggggccauugccgguuucauugaagggggguggacagggaugguagauggaugguacgguuaucaccaucaaaaugagcaggggucaggauaugcagccgaccugaagagcacacagaaugccauugacgagauuacuaacaaaguaaauucuguuauugaaaagaugaauacacaguucacagcaguagguaaagaguucaaccaccuggaaaaaagaauagagaauuuaaauaaaaaaguugaugaugguuuccuggacauuuggacuuacaaugccgaacuguugguucuauuggaaaaugaaagaacuuuggacuaccacgauucaaaugugaagaacuuauaugaaaagguaagaagccaguuaaaaaacaaugccaaggaaauuggaaacggcugcuuugaauuuuaccacaaaugcgauaacacgugcauggaaagugucaaaaaugggacuuaugacuacccaaaauacucagaggaagcaaaauuaaacagagaagaaauagaugggguaaagcuggaaucaacaaggauuuaccagauuuuggcgaucuauucaacugucgccaguucauugguacugguagucucccugggggcaaucaguuucuggaugugcucuaaugggucucuacaguguagaauauguauuuaa

SEQ ID NO: 40213 - RNA, 1701 nt, Artificial Sequence; identical to SEQ ID NO: 37156
  derived and/or modified CDS sequence (wt) from hemagglutinin__InfluenzaA__AFB70162

SEQ ID NO: 40214 - RNA, 1701 nt, Artificial Sequence
  derived and/or modified CDS sequence (wt) from hemagglutinin__InfluenzaA__AFB70167
augaaggcaauacuaguaguucugcuauauacauuugcaaccgcaaaugcagacacauuauguauagguuaucaugcgaacaauucaacagacacuguagacacaguacuagaaaagaauguaacaguaacacacucuguuaaccuucuagaagacaagcauaacgggaaacuaugcaaacuaagagggguagccccauugcauuuggguaaauguaacauugcuggcuggauccugggaaauccagagugugaaucacucuccacagcaagcucaugguccuacauuguggaaacaucuaguucagacaauggaacguguuacccaggagauuucaucgauuaugaggagcuaagagagcaauugagcucagugucaucauuugaaagguuugagauauuccccaagacaaguucauggcccaaucaugacucgaacaaagguguaacggcagcauguccucaugcuggagcaaaaagcuucuacaaaaauuuaauauggcuaguuaaaaaaggaaauucauacccaaagcucagcaaauccuacauuaaugauaaagggaaagaaguccucgugcuauggggcauucaccauccaucuacuagugcugaccaacaaagucucuaucagaaugcagaugcauauguuuuuguggggacaucaagauacagcaagaaguucaagccggaaauagcaaugagacccaaagugagggaucaagaagggagaaugaacuauuacuggacacuaguagagccgggagacaaaauaacauucgaagcaacuggaaaucuagugguaccgagauaugcauucgcaauggaaagaaaugcuggaucugguauuaucauuucagauacaccaguccacgauugcaauacaacuugucagacacccaagggugcuauaaacaccagccucccauuucagaauauacauccgaucacaauuggaaaauguccaaaauauguaaaaagcacaaaauugagacuggccacaggauugaggaaugucccgucuauucaaucuagaggccuauuuggggccauugccgguuucauugaagggggguggacagggaugguagauggaugguacgguuaucaccaucaaaaugagcaggggucaggauaugcagccgaccugaagagcacacagaaugccauugacgagauuacuaacaaaguaaauucuguuauugaaaagaugaauacacaguucacagcaguagguaaagaguucaaccaccuggaaaaaagaauagagaauuuaaauaaaaaaguugaugaugguuuccuggacauuuggacuuacaaugccgaacuguugguucuauuggaaaaugaaagaacuuuggacuaccacgauucaaaugugaagaacuuauaugaaaagguaagaagccaguuaaaaaacaaugccaaggaaauuggaaacggcugcuuugaauuuuaccacaaaugcgacaacacgugcauggaaagugucaaaaaugggacuuaugacuacccaaaauacucagaggaagcaaaauuaaacagagaagaaauagaugggguaaagcuggaaucaacaaggauuuaccagauuuuggcgaucuauucaacugucgccaguucauugguacugguagucucccugggggcaaucaguuucuggaugugcucuaaugggucucuacaguguagaauauguauuuaa

SEQ ID NO: 40215 - RNA, 1701 nt, Artificial Sequence; identical to SEQ ID NO: 38294
  derived and/or modified CDS sequence (wt) from hemagglutinin__InfluenzaA__AFB70177

SEQ ID NO: 40216 - RNA, 1701 nt, Artificial Sequence; identical to SEQ ID NO: 35250
  derived and/or modified CDS sequence (wt) from hemagglutinin__InfluenzaA__AFB70187

SEQ ID NO: 40217 - RNA, 1701 nt, Artificial Sequence; identical to SEQ ID NO: 37156
  derived and/or modified CDS sequence (wt) from hemagglutinin__InfluenzaA__AFB70197

SEQ ID NO: 40218 - RNA, 1701 nt, Artificial Sequence; identical to SEQ ID NO: 35312
  derived and/or modified CDS sequence (wt) from hemagglutinin__InfluenzaA__AFB70207

SEQ ID NO: 40219 - RNA, 1701 nt, Artificial Sequence; identical to SEQ ID NO: 34681
  derived and/or modified CDS sequence (wt) from hemagglutinin__InfluenzaA__AFB70217

SEQ ID NO: 40220 - RNA, 1701 nt, Artificial Sequence; identical to SEQ ID NO: 34681
  derived and/or modified CDS sequence (wt) from hemagglutinin__InfluenzaA__AFB70227

SEQ ID NO: 40221 - RNA, 1701 nt, Artificial Sequence
  derived and/or modified CDS sequence (wt) from hemagglutinin__InfluenzaA__AFB70247
augaaggcaauacuaguaguucugcuauauacauuugcaaccgcaaaugcagacacauuauguauagguuaucaugcgaacaauucaacagacacuguagacacaguacuagaaaagaauguaacaguaacacacucuguuaaccuucuagaagacaagcauaacgggaaacuaugcaaacuaagagggguagccccauugcauuuggguaaauguaacauugcuggcuggauccugggaaauccagagugugaaucacucuccacagcaagcucaugguccuacauuguggaaacaucuaguucagacaauggaacguguuacccaggagauuucaucgauuaugaggagcuaagagagcaauugagcucagugucaucauuugaaagguuugagauauuccccaagacaaguucauggcccaaucaugacucgaacaaagguguaacggcagcauguccucaugcuggagcaaaaagcuucuacaaaaauuuaauauggcuaguuaaaaaaggaaauucauacccaaagcucagcaaauccuacauuaaugauaaagggaaagaaguccucgugcuauggggcauucaccauccaucuacuagugcugaccaacaaagucucuaucagaaugcagaugcauauguuuuuguggggacaucaagauacagcaaggaguucaagccggaaauagcaauaagacccaaagugagggaucaagaagggagaaugaacuauuacuggacacuaguagagccgggagacaaaauaacauucgaagcaacuggaaaucuagugguaccgagauaugcauucgcaauggaaagaaaugcuggaucugguauuaucauuucagauacaccaguccacgauugcaauacaacuugucagacacccaagggugcuauaaacaccagccucccauuucagaauauacauccgaucacaauuggaaaauguccaaaauauguaaaaagcacaaaauugagacuggccacaggauugaggaaugucccgucuauucaaucuagaggccuauuuggggccauugccgguuucauugaagggggguggacagggaugguagauggaugguacgguuaucaccaucaaaaugagcaagggucaggauaugcagccgaccugaagagcacacagaaugccauugacgagauuacuaacaaaguaaauucuguuauugaaaagaugaauacacaguucacagcaguagguaaagaguucaaccaccuggaaaaaagaauagagaauuuaaauaaaaagguugaugaugguuuccuggacauuuggacuuacaaugccgaacuguugguucuauuggaaaaugaaagaacuuuggacuaccacgauucaaaugugaagaacuuauaugaaaagguaagaagccaguuaaaaaacaaugccaaggaaauuggaaacggcugcuuugaauuuuaccacaaaugcgauaacacgugcauggaaagugucaaaaaugggacuuaugacuacccaaaauacucagaggaagcaaaauuaaacagagaagaaauagaugggguaaagcuggaaucaacaaggauuuaccagauuuuggcgaucuauucaacugucgccaguucauugguacugguagucucccugggggcaaucaguuucuggaugugcucuaaugggucucuacaguguagaauauguauuuaa

SEQ ID NO: 40222 - RNA, 1701 nt, Artificial Sequence
  derived and/or modified CDS sequence (wt) from hemagglutinin__InfluenzaA__AFB70257
augaaggcaauacuaguaguucugcuauauacauuugcaaccgcaaaugcagacacauuauguauagguuaucaugcgaacaauucaacagacacuguagacacaguacuagaaaagaauguaacaguaacacacucuguuaaccuucuagaagacaagcauaacgggaaacuaugcaaacuaagagggguagccccauugcauuuggguaaauguaacauugcuggcuggauccugggaaauccagagugugaaucacucuccacagcaagcucaugguccuacauuguggaaacaucuaguucagacaauggaacguguuacccaggagauuucgucgauuaugaggagcuaagagagcaauugagcucagugucaucauuugaaagguuugagauauuccccaagacaaguucauggcccaaucaugacucgaacaaagguguaacggcagcauguccucaugcuggagcaaaaagcuucuacaaaaauuuaauauggcuaguuaaaaaaggaaauucauacccaaagcucagcaaauccuacauuaaugauaaagggaaagaaguccucgugcuauggggcauucaccauccaucuacuagugcugaccaacaaagucucuaucagaaugcagaugcauauguuuuuguggggacaucaagauacagcaagaaguucaagccggaaauagcaauaagacccaaagugagggaucaagaagggagaaugaacuauuacuggacacuaguagagccgggagacaaaauaacauucgaagcaacuggaaaucuagugguaccgagauaugcauucgcaauggaaagaaaugcuggaucugguauuaucauuucagauacaccaguccacgauugcaauacaacuugucagacacccaagggugcuauaaacaccagccucccauuucagaauauacauccgaucacaauuggaaaauguccaaaauauguaaaaagcacaaaauugagacuggccacaggauugaggaaugucccgucuauucaaucuagaggccuauuuggggccauugccgguuucauugaagggggguggacagggaugguagauggaugguacgguuaucaccaucaaaaugagcaggggucaggauaugcagccgaccugaagagcacacagaaugccauugacgagauuacuaacaaaguaaauucuguuauugaaaagaugaauacacaguucacagcaguagguaaagaguucaaccaccuggaaaaaagaauagagaauuuaaauaaaaaaguugaugaugguuuccuggacauuuggacuuacaaugccgaacuguugguucuauuggaaaaugaaagaacuuuggacuaccacgauucaaaugugaagaacuuauaugaaaagguaagaagccaguuaaaaaacaaugccaaggaaauuggaaacggcugcuuugaauuuuaccacaaaugcgauaacacgugcauggaaagugucaaaaaugggacuuaugacuacccaaaauacucagaggaagcaaaauuaaacagagaagaaauagaugggguaaagcuggaaucaacaaggauuuaccagauuuuggcgaucuauucaacugucgccaguucauugguacugguagucucccugggggcaaucaguuucuggaugugcucuaaugggucucuacaguguagaauauguauuuaa

SEQ ID NO: 40223 - RNA, 1701 nt, Artificial Sequence
  derived and/or modified CDS sequence (wt) from hemagglutinin__InfluenzaA__AFB70267
augaaggcaauacuaguaguucugcuauauacauuugcaaccgcaaaugcagacacauuauguauagguuaucaugcgaacaauucaacagacacuguagacacaguacuagaaaagaauguaacaguaacacacucuguuaaccuucuagaagacaagcauaacgggaaacuaugcaaacuaagagggguagccccauuacauuuggguaaauguaacauugcuggcuggauccugggaaauccagagugugaaucacucuccacagcaagcucaugguccuacauuguggaaacaucuaguucagacaauggaacguguuacccaggagauuucaucgauuaugaggagcuaagagagcaauugagcucagugucaucauuugaaagguuugagauauuccccaagacaaguucauggcccaaucaugacucgaacaaagguguaacggcagcauguccucaugcuggagcaaaaagcuucuacaaaaauuuaauauggcuaguuaaaaaaggaaauucauacccaaagcucagcaaauccuacauuaaugauaaagggaaagaaguccucgugcuauggggcauucaccauccaucuacuagugcugaccaacaaagucucuaucagaaugcagaugcauauguuuuuguggggacaucaagauacagcaagaaguucaagccggaaauagcaauaagacccaaagugagggaucaagaagggagaaugaacuauuacuggacacuaguagagccgggagacaaaauaacauucgaagcaacuggaaaucuagugguaccgagauaugcauucgcaauggaaagaaaugcuggaucugguauuaucauuucagauacaccaguccacgauugcaauacaacuugucagacacccaagggugcuauaaacaccagccucccauuucagaauauacauccgaucacaauuggaaaauguccaaaauauguaaaaagcacaaaauugagacuggccacaggauugaggaaugucccgucuauucaaucuagaggccuauuuggggccauugccgguuucauugaagggggguggacagggaugguagauggaugguacgguuaucaccaucaaaaugagcaggggucaggauaugcagccgaccugaagagcacacagaaugccauugacgagauuacuaacaaaguaaauucuguuauugaaaagaugaauacacaguucacagcaguagguaaagaguucaaccaccuggaaaaaagaauagagaauuuaaauaaaaaaguugaugaugguuuccuggacauuuggacuuacaaugccgaacuguugguucuauuggaaaaugaaagaacuuuggacuaccacgauucaaaugugaagaacuuauaugaaaagguaagaagccaguuaaaaaacaaugccaaggaaauuggaaacggcugcuuugaauuuuaccacaaaugcgauaacaugugcauggaaagugucaaaaaugggacuuaugacuacccaaaauacucagaggaagcaaaauuaaacagagaagaaauagaugggguaaagcuggaaucaacaaggauuuaccagauuuuggcgaucuauucaacugucgccaguucauugguacugguagucucccugggggcaaucaguuucuggaugugcucuaaugggucucuacaguguagaauauguauuuaa

SEQ ID NO: 40224 - RNA, 1701 nt, Artificial Sequence
  derived and/or modified CDS sequence (wt) from hemagglutinin__InfluenzaA__AFB70277
augaaggcaauacuaguaguucugcuauauacauuugcaaccgcaaaugcagacacauuauguauagguuaucaugcgaacaauucaacagacacuguagacacaguacuagaaaagaauguaacaguaacacacucuguuaaccuucuagaagacaagcauaacgggaaacuaugcaaacuaagagggguagccccauugcauuuggguaaauguaacauugcuggcuggauccugggaaauccagagugugaaucacucuccacagcaagcucaugguccuacauuguggaaacaucuaguucagacaauggaacguguuacccaggagauuucaucgauuaugaggagcuaagagagcaauugagcucagugucaucauuugaaagguuugagauauuccccaagacaaguucauggcccaaucaugacucgaacaaagguguaacggcagcauguccucaugcuggagcaaaaagcuucuacaaaaauuuaauauggcuaguuaaaaaaggaaauucauacccaaagcucagcaaauccuacauuaaugauaaagggaaagaaguccucgugcuauggggcauucaccauccaucuacuagugcugaccaacaaagucucuaucagaaugcagaugcauauguuuuuguggggacaucaagauacagcaagaaguucaagccggaaauagcaauaagacccaaagugagggaucaagaagggagaaugaacuaucacuggacacuaguagagccgggagacaaaauaacauucgaagcaacuggaaaucuagugguaccgagauaugcauucgcaauggaaagaaaugcuggaucugguauuaucauuucagauacaccaguccacgauugcaauacaacuugucagacacccaagggugcuauaaacaccagccucccauuucagaauauacauccgaucacaauuggaaaauguccaaaauauguaaaaagcacaaaauugagacuggccacaggauugaggaaugucccgucuauucaaucuagaggccuauuuggggccauugccgguuucauugaagggggguggacagggaugguagauggaugguacgguuaucaccaucaaaaugagcaggggucaggauaugcagccgaccugaagagcacacagaaugccauugacgagauuacuaacaaaguaaauucuguuauugaaaagaugaauacacaguucacagcaguagguaaagaguucaaccaccuggaaaaaagaauagagaauuuaaauaaaaaaguugaugaugguuuccuggacauuuggacuuacaaugccgaacuguugguucuauuggaaaaugaaagaacuuuggacuaccacgauucaaaugugaagaacuuauaugaaaagguaagaagccaguuaaaaaacaaugccaaggaaauuggaaacggcugcuuugaauuuuaccacaaaugcgauaacacgugcauggaaagugucaaaaaugggacuuaugacuacccaaaauacucagaggaagcaaaauuaaacagagaagaaauagaugggguaaagcuggaaucaacaaggauuuaccagauuuuggcgaucuauucaacugucgccaguucauugguacugguagucucccugggggcaaucaguuucuggaugugcucuaaugggucucuacaguguagaauauguauuuaa

SEQ ID NO: 40225 - RNA, 1701 nt, Artificial Sequence; identical to SEQ ID NO: 34681
  derived and/or modified CDS sequence (wt) from hemagglutinin__InfluenzaA__AFB70287

SEQ ID NO: 40226 - RNA, 1701 nt, Artificial Sequence; identical to SEQ ID NO: 34681
  derived and/or modified CDS sequence (wt) from hemagglutinin__InfluenzaA__AFB70297

SEQ ID NO: 40227 - RNA, 1701 nt, Artificial Sequence; identical to SEQ ID NO: 34681
  derived and/or modified CDS sequence (wt) from hemagglutinin__InfluenzaA__AFB70307

SEQ ID NO: 40228 - RNA, 1701 nt, Artificial Sequence; identical to SEQ ID NO: 40208
  derived and/or modified CDS sequence (wt) from hemagglutinin__InfluenzaA__AFB70317

SEQ ID NO: 40229 - RNA, 1701 nt, Artificial Sequence
  derived and/or modified CDS sequence (wt) from hemagglutinin__InfluenzaA__AFB70327
augaaggcaauacuaguaguucugcuauauacauuugcaaccgcaaaugcagacacauuauguauagguuaucaugcgaacaauucaacagacacuguagacacaguacuagaaaagaauguaacaguaacacacucuguuaaccuucuagaagacaagcauaacgggaaacuaugcaaacuaagagggguagccccauugcauuuggguaaauguaacauugcuggcuggauccugggaaauccagagugugaaucacucuccacagcaagcucaugguccuacauuguggaaacaucuaguucagacaauggaacguguuacccaggagauuucaucgauuaugaggagcuaagagagcaauugagcucagugucaucauuugaaagguuugagauauuccccaagacaaguucauggcccaaucaugacucgaacaaagguguaacggcagcauguccucaugcuggagcaaaaagcuucuacaaaaauuuaauauggcuaguuaaaaaaggaaauucauacccaaagcucagcaaauccuacauuaaugauaaagggaaagaaguccucgugcuauggggcauucaccauccaucuacuagugcugaccaacaaagucucuaucagaaugcagaugcauauguuuuuguggggacaucaagauacagcaagaaguucaagccggaaauagcaauaagacccaaagugagggaucaagaagggagaaugaacuauuacuggacacuaguagagccgggagacaaaauaacauucgaagcaacuggaaaucuagugguaccgagauaugcauucgcaauggaaagaaaugcuggaucugguauuaucauuucagauacaccaguccacgauugcaauacaacuugucagacacccaagggugcuauaaacaccagccucccauuucagaauauacauccgaucacaauuggaaaauguccaaaauauguaaaaagcacaaaauugagacuggccacaggauugaggaaugucccgucuauucaaucuagaggccuauuuggggccauugccgguuucauugaagggggguggacagggaugguagauggaugguacgguuaucaccaucaaaaugagcaggggucaggauaugcagccgaccugaagagcacacagaaugccauugacgagauuacuaacaaaguaaauucuguuauugaaaagaugaauacacaguucacagcaguagguaaagaguucaaccaccugggaaaaagaauagagaauuuaaauaaaaaaguugaugaugguuuccuggacauuuggacuuacaaugccgaacuguugguucuauuggaaaaugaaagaacuuuggacuaccacgauucaaaugugaagaacuuauaugaaaagguaagaagccaguuaaaaaacaaugccaaggaaauuggaaacggcugcuuugaauuuuaccacaaaugcgauaacacgugcauggaaagugucaaaaaugggacuuaugacuacccaaaauacucagaggaagcaaaauuaaacagagaagaaauagaugggguaaagcuggaaucaacaaggauuuaccagauuuuggcgaucuauucaacugucgccaguucauugguacugguagucucccugggggcaaucaguuucuggaugugcucuaaugggucucuacaguguagaauauguauuuaa

SEQ ID NO: 40230 - RNA, 1701 nt, Artificial Sequence; identical to SEQ ID NO: 34681
  derived and/or modified CDS sequence (wt) from hemagglutinin__InfluenzaA__AFB70337

SEQ ID NO: 40231 - RNA, 1701 nt, Artificial Sequence
  derived and/or modified CDS sequence (wt) from hemagglutinin__InfluenzaA__AFB70347
augaaggcaauacuaguaguucugcuauauacauuugcaaccgcaaaugcagacacauuauguauagguuaucaugcgaacaauucaacagacacuguagacacaguacuagaaaagaauguaacaguaacacacucuguuaaccuucuagaagacaagcauaacgggaaacuaugcaaacuaagagggguagccccauugcauuuggguaaauguaacauugcuggcuggauccugggaaauccagagugugaaucacucuccacagcaagcucaugguccuacauuguggaaacaucuaguucagacaauggaacguguuacccaggagauuucaucgauuaugaggagcuaagagagcaauugagcucagugucaucauuugaaagguuugagauauuccccaagacaaguucauggcccaaucaugacucgaacaaagguguaacggcagcauguccucaugcuggagcaaaaagcuucuacaaaaauuuaauauggcuaguuaaaaaaggaaauucauacccaaagcucagcaaauccuacauuaaugauaaagggaaagaaguccucgugcuauggggcauucaccauccaucuacuaguacugaccaacaaagucucuaucagaaugcagaugcauauguuuuuguggggacaucaagauacagcaagaaguucaagccggaaauagcaauaagacccaaagugagggaucaagaagggagaaugaacuauuacuggacacuaguagagccgggagacaaaauaacauucgaagcaacuggaaaucuagugguaccgagauaugcauucgcaauggaaagaaaugcuggaucugguauuaucauuucagauacaccaguccacgauugcaauacaacuugucagacacccaagggugcuauaaacaccagccucccauuucagaauauacauccgaucacaauuggaaaauguccaaaauauguaaaaagcacaaaauugagacuggccacaggauugaggaaugucccgucuauucaaucuagaggccuauuuggggccauugccgguuucauugaagggggguggacagggaugguagauggaugguacgguuaucaccaucaaaaugagcaggggucaggauaugcagccgaccugaagagcacacagaaugccauugacgagauuacuaacaaaguaaauucuguuauugaaaagaugaauacacaguucacagcaguagguaaagaguucaaccaccuggaaaaaagaauagagaauuuaaauaaaaaaguugaugaugguuuccuggacauuuggacuuacaaugccgaacuguugguucuauuggaaaaugaaagaacuuuggacuaccacgauucaaaugugaagaacuuauaugaaaagguaagaagccaguuaaaaaacaaugccaaggaaauuggaaacggcugcuuugaauuuuaccacaaaugcgauaacacgugcauggaaagugucaaaaaugggacuuaugacuacccaaaauacucagaggaagcaaaauuaaacagagaagaaauagaugggguaaagcuggaaucaacaaggauuuaccagauuuuggcgaucuauucaacugucgccaguucauugguacugguagucucccugggggcaaucaguuucuggaugugcucuaaugggucucuacaguguagaauauguauuuaa

SEQ ID NO: 40232 - RNA, 1701 nt, Artificial Sequence; identical to SEQ ID NO: 34681
  derived and/or modified CDS sequence (wt) from hemagglutinin__InfluenzaA__AFB70367

SEQ ID NO: 40233 - RNA, 1701 nt, Artificial Sequence; identical to SEQ ID NO: 34681
  derived and/or modified CDS sequence (wt) from hemagglutinin__InfluenzaA__AFB70377

SEQ ID NO: 40234 - RNA, 1701 nt, Artificial Sequence
  derived and/or modified CDS sequence (wt) from hemagglutinin__InfluenzaA__AFB70387
augaaggcaauacuaguaguucugcuauauacauuugcaaccgcaaaugcagacacauuauguauagguuaucaugcgaacaauucaacagacacuguagacacaguacuagaaaagaauguaacaguaacacacucuguuaaccuucuagaagacaagcauaacgggaaacuaugcaaacuaagagggguagccccauugcauuuggguaaauguaacauugcuggcuggauccugggaaauccagagugugaaucacucuccacagcaagcucaugguccuacauuguggaaacaucuaguucagacaauggaacguguuacccaggagauuucaucgauuaugaggagcuaagagagcaauugagcucagugucaucauuugaaagguuugagauauuccccaagacaaguucauggcccaaucaugacucgaacaaagguguaacggcagcauguccucaugcuggagcaaaaagcuucuacaaaaauuuaauauggcuaguuaaaaaaggaaauucauacccuaagcucagcaaauccuacauuaaugauaaagggaaagaaguccucgugcuauggggcauucaccauccaucuacuagugcugaccaacaaagucucuaucagaaugcagaugcauauguuuuuguggggacaucaagauacagcaagaaguucaagccggaaauagcaauaagacccaaagugagggaucaagaagggagaaugaacuauuacuggacacuaguagagccgggagacaaaauaacauucgaagcaacuggaaaucuagugguaccgagauaugcauucgcaauggaaagaaaugcuggaucugguauuaucauuucagauacaccaguccacaauugcaauacaacuugucagacacccaagggugcuauaaacaccagccucccauuucagaauauacauccgaucacaauuggaaaauguccaaaauauguaaaaagcacaaaauugagacuggccacaggauugaggaaugucccgucuauucaaucuagaggccuauuuggggccauugccgguuucauugaagggggguggacagggaugguagauggaugguacgguuaucaccaucaaaaugagcaggggucaggauaugcagccgaccugaagagcacacagaaugccauugacgagauuacuaacaaaguaaauucuguuauugaaaagaugaauacacaguucacagcaguagguaaagaguucaaccaccuggaaaaaagaauagagaauuuaaauaaaaaaguugaugaugguuuccuggacauuuggacuuacaaugccgaacuguugguucuauuggaaaaugaaagaacuuuggacuaccacgauucaaaugugaagaacuuauaugaaaagguaagaagccaguuaaaaaacaaugccaaggaaauuggaaacggcugcuuugaauuuuaccacaaaugcgauaacacgugcauggaaagugucaaaaaugggacuuaugacuacccaaaauacucagaggaagcaaaauuaaacagagaagaaauagaugggguaaagcuggaaucaacaaggauuuaccagauuuuggcgaucuauucaacugucgccaguucauugguacugguagucucccugggggcaaucaguuucuggaugugcucuaaugggucucuacaguguagaauauguauuuaa

SEQ ID NO: 40235 - RNA, 1701 nt, Artificial Sequence; identical to SEQ ID NO: 34681
  derived and/or modified CDS sequence (wt) from hemagglutinin__InfluenzaA__AFB70397

SEQ ID NO: 40236 - RNA, 1701 nt, Artificial Sequence; identical to SEQ ID NO: 34681
  derived and/or modified CDS sequence (wt) from hemagglutinin__InfluenzaA__AFB70407

SEQ ID NO: 40237 - RNA, 1701 nt, Artificial Sequence
  derived and/or modified CDS sequence (wt) from hemagglutinin__InfluenzaA__AFB77618
augaaggcaauacuaguaguucugcuauauacauuugcaaccgcaaaugcagacacauuauguauagguuaucaugcgaacaauucaacagacacuguagacacaguacuagaaaagaauguaacaguaacacacuccguuaaccuucuagaagacaagcauaacgggaaacuaugcaaacuaagagggauagccccauugcauuuggguaaauguaacauugcuggcuggauccugggaaauccagagugugaaucacucuccacagcaagcucaugguccuacauuguggaaacaucuaguucagacaauggaacguguuacccaggagauuucaucaauuaugaggagcuaagagagcaauugagcucagugucaucauuugaaagguuugagauauuccccaagacaaguucauggcccaaucaugacucgaacaaagguguaacggcagcauguccucaugcuggagcaaaaagcuucuacaaaaauuuaauauggcuaguuaaaaaaggaaauucauacccaaagcucagcaaauccuacauuaaugauaaagggaaagaaguccucgugcuauggggcauucaccauccaacuaccacuggugaccaacaaagucucuaucagaaugcagauggauauguuuuuguggggacaacaagauacagcaagaaguucaaaccggaaauaggaauaagacccaaggugaaggaucaagaagggagaaugaacuauuacuggacacuaguagagccgggagacaaaauaacauucgaagcaacuggaaaucuagugguaccgagauaugcauucgcaauggaaagaaaugcuggaucugguauuaucauuucagauacaccaguccacgacugcaauacaacuugucagacacccaagggugcuauaaacaccagccucccauuucagaauauacauccgaucacaauuggaaaauguccaaaauauguaaaaagcacaaaauugagacuggccacaggauugaggaaugucccgucuauucaaucuagaggccuauuuggggccauugccggcuucauugaagggggguggacagggaugguagauggaugguacgguuaucaccaucaaaaugagcaggggucaggauaugcagccgaccugaagagcacacagaaugccauugacaagauuacuaacaaaguaaauucuguuauugaaaagaugaauacacaguucacagcaguagguaaagaguucaaccaccuggaaaaaagaauagagaauuuaaauaaaaaaguugaugaugguuuccuggacauuuggacuuacaaugccgaacuguugguucuauuggaaaaugaaagaacuuuggacuaccacgauucaaaugugaagaacuuauaugaaaagguaagaaaccaguuaaaaaacaaugccaaggaaauuggaaacggcugcuuugaauuuuaccacaaaugcgauaacacgugcauggaaagugucaaaaaugggacuuaugacuacccaaaauacucagaggaagcaaaauuaaacagagaagaaauagaugggguaaagcuggaaucaacaaggauuuaccagauuuuggcgaucuauucaacugucgccaguucauugguaaugguagucucccugggggcaaucagcuucuggaugugcucuaaugggucucuacaguguagaauauguauuuaa

SEQ ID NO: 40238 - RNA, 1701 nt, Artificial Sequence
  derived and/or modified CDS sequence (wt) from hemagglutinin__InfluenzaA__AFB77619
augaaggcaauacuaguaguucugcuauauacauuugcaaccgcaaaugcagacacauuguguauagguuaucaugcgaacaauucaacagacacuguagacacaguacuagaaaagaauguaacaguaacacacucuguuaaccuucuagaagacaagcauaacgggaaacuaugcaaacuaagagggguagccccauugcauuuggguaaauguaacauugcuggcuggauccugggaaauccagagugugaaucacucuccacagcaagcucaugguccuacauuguggaaacaucuaguucagacaauggaacguguuacccaggagauuucaucaauuaugaggagcuaagagagcaauugagcucagugucaucauuugaaagguuugaaauauuccccaagacaaguucauggcccaaucaugacucgaacaaagguguaacggcagcauguccucaugcuggagcaaaaagcuucuacaaaaauuuaauauggcuaguuaaaaaaggaaauucauacccaaagcucagcaaauccuacauuaaugauaaagggaaagaaguccucgugcuguggggcauucaccacccaucuacuacugcugaccaacaaagucucuaucagaaugcagaugcauauguuuuuguggggacaucaagauacagcaagaaguucaagccggaaauagcaauaagacccaaagugagggaucaagaagggagaaugaacuauuacuggacacuaguagagccgggagacaaaauaacauuugaagcaacuggaaaucuagugguaccgagauaugcauucgcaauggaaagaaaugcuggaucugguauuaucauuucagauacaccaguccacgauugcaauacaacuugucagacacccaagggugcuauaaacaccagccucccauuucagaauauacauccgaucacaauuggaaaauguccaaaauauguaaaaagcacaaaauugagacuggccacaggauugaggaaugucccgucuauucaaucuagaggccuauuuggggccauugccggcuucauugaagggggguggacagggaugguagauggaugguacgguuaucaccaucaaaaugagcaggggucaggauaugcagccgaccugaagagcacacagaaugccauugacaagauuacuaacaaaguaaauucuguuauugaaaagaugaauacacaguucacagcaguagguaaagaguucaaccaccuggaaaaaagaauagagaauuuaaauaaaaaaguugaugaugguuuccuggacauuuggacuuacaaugccgaauuguugguucuauuggaaaaugaaagaacuuuggacuaccacgauucaaaugugaagaacuuguaugaaaagguaagaaaccaguuaaaaaacaaugcuaaggaaauuggaaacggcugcuuugaauuuuaccacaaaugcgauaacacgugcauggaaagugucaaaaaugggacuuaugacuacccaaaauacucagaggaagcaaaauuaaacagagaagaaauagaugggguaaagcuggaaucaacaaggauuuaccagauuuuggcgaucuauucaacugucgccaguucauugguacugguagucucccugggggcaaucaguuucuggaugugcucuaaugggucucuacaguguagaauauguauuuaa

SEQ ID NO: 40239 - RNA, 1701 nt, Artificial Sequence; identical to SEQ ID NO: 40238
  derived and/or modified CDS sequence (wt) from hemagglutinin__InfluenzaA__AFB77620

SEQ ID NO: 40240 - RNA, 1701 nt, Artificial Sequence
  derived and/or modified CDS sequence (wt) from hemagglutinin__InfluenzaA__AFB77621
augaaggcaauacuaguaguucugcuauauacauuugcaaccgcaaaugcagacacauuguguauagguuaucaugcgaacaauucaacagacacuguagacacaguacuagagaagaauguaacaguaacacacucuguuaaccuucuagaagacaagcauaacgggaaacuaugcaaacuaagagggguaaccccauugcauuuggguaaauguaacauugcuggcuggauccugggaaauccagagugugaaucacucuccacagcaagcucaugguccuacauuguggaaacaucuaguucagacaauggaacguguuacccaggagauuucaucaauuaugaggagcuaagagagcaauugagcucagugucaucauuugaaagguuugagauauuccccaagacaaguucauggcccaaucaugacucgaacaaagguguaacggcagcauguccucaugcuggagcaaaaagcuucuacaaaaauuuaauauggcuaguuaaaaaaggaaauucauacccaaagcucagcaaauccuacauuaaugauaaagggaaagaaguccucgugcuguggggcauucaccauccaucuacuacugcagaccaacaaagucucuaucagaaugcagaugcauauguuuuuguggggacaucaagauacagcaagaaguucaagccggaaauagcaauaagacccaaagugagggaucaagaagggagaaugaacuauuacuggacauuaguagagccgggagacaaaauaacauucgaagcaacuggaaaucuagugguaccgagauaugcauucgcaauggaaagaaaugcuggaucugguauuaucauuucagauacaccaguccacgauugcaauacaacuugucagacacccaagggugcuauaaacaccagccucccauuucagaauauacauccgaucacaauuggaaaauguccaaaauauguaaaaagcacaaaauugagacuggccacgggauugaggaauaucccgucuauucaaucuagaggccuauuuggggccauugccggcuucauugaagggggguggacaggaaugguagauggaugguacgguuaucaccaucaaaaugagcaggggucaggauaugcagccgaccugaagagcacacagaaugccauugacaagauuacuaacaaaguaaauucuguuauugaaaagaugaauacacaguucacagcaguagguaaagaguucaaccaccuggaaaaaagaauagagaauuuaaauaaaaaaguugacgaugguuuccuggacauuuggacuuacaaugccgaacuguugguucuauuggaaaaugaaagaacuuuggacuaccacgauucaaaugugaagaacuuguaugaaaagguaagaaaccaguuaaaaaacaaugcuaaggaaauuggaaacggcugcuuugaauuuuaccacaaaugcgauaacacgugcauggaaagugucaaaaauggaacuuaugacuacccaaaauacucagaggaagcaaaauuaaacagagaagaaauagaugggguaaagcuggaaucaacaaggauuuaccagauuuuggcgaucuauucaacugucgccaguucauugguacugguagucucccugggggcaaucaguuucuggaugugcucuaaugggucucuacaguguagaauauguauuuaa

SEQ ID NO: 40241 - RNA, 1701 nt, Artificial Sequence
  derived and/or modified CDS sequence (wt) from hemagglutinin__InfluenzaA__AFB77622
augaaggcaauacuaguaguucugcuauauacauuugcaaccgcaaaugcagacacauuguguauagguuaucaugcgaacaauucaacagacacuguagacacaguacuagaaaagaauguaacaguaacacacucuguuaaccuucuagaagacaagcauaacgggaaacuaugcaaacuaagagggguagccccauugcauuuggguaaauguaacauugcuggcuggauccugggaaauccagagugugaaucacucuccacagcaagcucaugguccuacauuguggaaacaucuaguucagacaauggaacguguuacccaggagauuucaucaauuaugaggagcuaagagagcaauugagcucagugucaucauuugaaagguuugaaauauuccccaagacaaguucauggcccaaucaugacccgaacaaagguguaacggcagcauguccucaugcuggagcaaaaagcuucuacaaaaauuuaauauggcuaguuaaaaaaggaaauucauacccaaagcucagcaaauccuacauuaaugauaaaggaaaagaaguccucgugcuguggggcauucaccacccaucuacuacugcugaccaacaaagucucuaucagaaugcagaugcauauguuuuuguggggacaucaagauacagcaagaaguucaagccggaaauagcaauaagacccaaagugagggaucaagaagggagaaugaacuauuacuggacacuaguagagccgggagacaaaauaacauuugaagcaacuggaaaucuagugguaccgagauaugcauucgcaauggaaagaaaugcuggaucugguauuaucauuucagauacaccaguccacgauugcaauacaacuugucagacacccaagggugcuauaaacaccagccucccauuucagaauauacauccgaucacaauuggaaaauguccaaaauauguaaaaagcacaaaauugagacuggccacaggauugaggaaugucccgucuauucaaucuagaggccuauuuggggccauugccggcuucauugaagggggguggacagggaugguagauggaugguacgguuaucaccaucaaaaugagcaggggucaggauaugcagccgaccugaagagcacacagaaugccauugacaagauuacuaacaaaguaaauucuguuauugaaaagaugaauacacaguucacagcaguagguaaagaguucaaccaccuggaaaaaagaauagagaauuuaaauaaaaaaguugaugaugguuuccuggacauuuggacuuacaaugccgaauuguugguucuauuggaaaaugaaagaacuuuggacuaccacgauucaaaugugaagaacuuguaugaaaagguaagaaaccaguuaaaaaacaaugcuaaggaaauuggaaacggcugcuuugaauuuuaccacaaaugcgauaacacgugcauggaaagugucaaaaaugggacuuaugacuacccaaaauacucagaggaagcaaaauuaaacagagaagaaauagaugggguaaagcuggaaucaacaaggauuuaccagauuuuggcgaucuauucaacugucgccaguucauugguacugguagucucccugggggcaaucaguuuuuggaugugcucuaaugggucucuacaguguagaauauguauuuaa

SEQ ID NO: 40242 - RNA, 1701 nt, Artificial Sequence
  derived and/or modified CDS sequence (wt) from hemagglutinin__InfluenzaA__AFB77623
augaaggcaauacuaguaguucugcuauauacauuugcaaccgcaaaugcagacacauuguguauagguuaucaugcgaacaauucaacagacacuguagacacaguacuagagaagaauguaacaguaacacacucuguuaaccuucuagaagacaagcauaacgggaaacuaugcaaacuaagagggguagccccauugcauuuggguaaauguaacauugcuggcuggauccugggaaauccagagugugaaucacucuccacagcaagcucaugguccuacauuguggaaacaucuaguucagacaauggaacguguuacccaggagauuucaucaauuaugaggagcuaagagagcaauugagcucagugucaucauuugaaagguuugagauauuccccaagacaaguucauggcccaaucaugacucgaacaaagguguaacggcagcauguccucaugcuggagcaaaaagcuucuacaaaaauuuaauauggcuaguuaaaaaaggaaauucauacccaaagcucagcaaauccuacauuaaugauaaagggaaagaaguccucgugcuguggggcauucaccauccaucuacuacugcagaccaacagagucucuaucagaaugcagaugcauauguuuuuguggggacaucaagauacagcaagaaguucaagccggaaauagcaauaagacccaaagugagggaucaagaagggagaaugaacuauuacuggacacuaguagagccuggagacaaaauaacauucgaagcaacuggaaaucuagugguaccgagauaugcauucgcaauggaaagaaaugcuggaucugguauuaucauuucagauacaccaguccacgauugcaauacaacuugucagacacccaagggugcuauaaacaccagccucccauuucagaauauacauccgaucacaauuggaaaauguccaaaauauguaaaaagcacaaaauugagacuggccacaggauugaggaaugucccgucuauucaaucuagaggccuauuuggggccauugccggcuucauugaagggggguggacagggaugguagauggaugguacgguuaucaccaucaaaaugagcaggggucaggauaugcagccgaccugaagagcacacagaaugccauugacaagauuacuaacaaaguaaauucuguuauugaaaagaugaauacacaguucacagcaguagguaaagaguucaaccaccuggaaaaaagaauagagaauuuaaauaaaaaaguugaugaugguuuccuggacauuuggacuuacaaugccgaacuguugguucuauuggaaaaugaaagaacuuuggacuaccacgauucaaaugugaagaacuuguaugaaaagguaagaaaccaguuaaaaaacaaugcuaaggaaauuggaaacggcugcuuugaauuuuaccacaaaugcgauaacacgugcauggaaagugucaaaaaugggacuuaugacuacccaaaauacucagaggaagcaaaauuaaacagagaagaaauagaugggguaaagcuggaaucaacaagaauuuaccagauuuuggcgaucuauucaacugucgccaguucauugguacugguagucucccugggggcaaucaguuucuggaugugcucuaaugggucucuacaguguagaauauguauuuaa

SEQ ID NO: 40243 - RNA, 1701 nt, Artificial Sequence
  derived and/or modified CDS sequence (wt) from hemagglutinin__InfluenzaA__AFB77624
augaaggcaauacuaguaguucugcuauauacauuugcaaccgcaaaugcagacacauuguguauagguuaucaugcgaacaauucaacagacacuguagacacaguacuggagaagaauguaacaguaacacacucuguuaaccuucuagaagacaagcauaacgggaaacuaugcaaacuaagagggguagccccauugcauuuggguaaauguaacauugcuggcuggauccugggaaauccagagugugaaucacucuccacagcaagcucaugguccuacauuguggaaacaucuaguucagacaauggaacguguuacccaggagauuucaucaauuaugaggagcuaagagagcaauugagcucagugucaucauuugaaagguuugagauauuccccaagacaaguucauggcccaaucaugacucgaacaaagguguaacggcagcauguccucaugcuggagcaaaaagcuucuacaaaaauuuaauauggcuaguuaaaaaaggaaauucauacccaaagcucagcaaauccuacauuaaugauaaagggaaagaaguccucgugcuguggggcauucaccauccaucuacuacugcagaccaacaaagucucuaucagaaugcagaugcauauguuuuuguggggacaucaagauacagcaagaaguucaagccggaaauagcaauaagacccaaagugagggaucaagaagggagaaugaacuauuacuggacacuaguagagccuggagacaaaauaacauucgaagcaacuggaaaucuagugguaccgagauaugcauucgcaauggaaagaaaugcuggaucugguauuaucauuucagauacaccaguccacgauugcaauacaacuugucagacacccaagggugcuauaaacaccagccucccauuucagaauauacauccgaucacaauuggaaaauguccaaaauauguaaaaagcacaaaauugagacuggccacaggauugaggaaugucccgucuauucaaucuagaggccuauuuggggccauugccggcuucauugaagggggguggacagggaugguagauggaugguacgguuaucaccaucaaaaugagcaggggucaggauaugcagccgaccugaagagcacacagaaugccauugacaagauuacuaacaaaguaaauucuguuauugaaaagaugaauacacaguucacagcaguagguaaagaguucaaccaccuggaaaaaagaauagagaauuuaaauaaaaaaguugaugaugguuuccuggacauuuggacauacaaugccgaacuguugguucuauuggaaaaugaaagaacuuuggacuaccacgauucaaaugugaagaacuuguaugaaaagguaagaaaccaguuaaaaaacaaugccaaggaaauuggaaacggcugcuuugaauuuuaccacaaaugcgauaacacgugcauggaaagugucaaaaaugggacuuaugacuacccaaaauacucagaggaagcaaaauuaaacagagaagaaauagaugggguaaagcuggaaucaacaaggauuuaccagauuuuggcgaucuauucaacugucgccaguucauugguacugguagucucccugggggcaaucaguuucuggaugugcucuaaugggucucuacaguguagaauauguauuuaa

SEQ ID NO: 40244 - RNA, 1701 nt, Artificial Sequence
  derived and/or modified CDS sequence (wt) from hemagglutinin__InfluenzaA__AFB77625
augaaggcaauacuaguaguucugcuauauacauuuacaaccgcaaaugcagacacauuguguauagguuaucaugcgaacaauucaacagacacuguagacacaguacuagagaagaauguaacaguaacacacucuguuaaccuucuagaagacaagcauaacgggaaacuaugcaaacuaagagggguagccccauugcauuuggguaaauguaacauugcuggcuggauccugggaaauccagagugugaaucacucuccacagcaagcucaugguccuacauuguggaaacaucuaguucagacaauggaacguguuacccaggagauuucaucaauuaugaggagcuaagagagcaauugagcucagugucaucauuugaaagguuugagauauuccccaagacaaguucauggcccaaucaugacucgaacaaagguguaacggcagcauguccucaugcuggagcaaaaagcuucuacaaaaauuuaauauggcuaguuaaaaaaggaaauucauacccaaagcucagcaaauccuacauuaaugauaaagggaaagaaguccucgugcuguggggcauucaccauccaucuacuacugcagaccaacaaagucucuaucagaaugcagaugcauauguuuuuguggggacaucaagauacagcaagaaguucaagccggaaauagcaauaagacccaaagugagggaucaagaagggagaaugaacuauuacuggacacuaguagagccuggagacaaaauaacauucgaagcaacuggaaaucuagugguaccgagauaugcauucgcaauggaaagaaaugcuggaucugguauuaucauuucagauacaccaguccacgauugcaauacaacuugucagacacccaagggugcuauaaacaccagccucccauuucagaauauacauccgaucacaauuggaaaauguccaaaauauguaaaaagcacaaaauugagacuggccacaggauugaggaaugucccgucuauucaaucuagaggccuauuuggggccauugccggcuucauugaagggggguggacagggaugguagauggaugguacgguuaucaccaucaaaaugagcaggggucaggauaugcagccgaccugaagagcacacagaaugccauugacaagauuacuaacaaaguaaauucuguuauugaaaagaugaauacacaguucacagcaguagguaaagaguucaaccaccuggaaaaaagaauagagaauuuaaauaaaaaaguugaugaugguuuccuggacauuuggacuuacaaugccgaacuguugguucuauuggaaaaugaaagaacuuuggacuaccacgauucaaaugugaagaacuuguaugaaaagguaagaaaccaguuaaaaaacaaugcuaaggaaauuggaaacggcugcuuugaauuuuaccacaaaugcgauaacacgugcauggaaagugucaaaaaugggacuuaugacuacccaaaauacucagaggaagcaaaauuaaacagagaagaaauagaugggguaaagcuggaaucaacaagaauuuaccagauuuuggcgaucuauucaacugucgccaguucauugguacugguagucucccugggggcaaucaguuucuggaugugcucuaaugggucucuacaguguagaauauguauuuaa

SEQ ID NO: 40245 - RNA, 1701 nt, Artificial Sequence
  derived and/or modified CDS sequence (wt) from hemagglutinin__InfluenzaA__AFB77627
augaaggcaauacuaguaguucugcuauauacauuugcaaccgcaaaugcagacacauuguguauagguuaucaugcgaacaauucaacagacacuguagacacaguacuagaaaagaauguaacaguaacacacucuguuaaccuucuagaagacaagcauaacgggaaacuaugcaaacuaagagggguagccccauugcauuuggguaaauguaacauugcuggcuggauccugggaaauccagagugugaaucacucuccacagcaagcucaugguccuacauuguggaaacaucuaguucagacaauggaacguguuacccaggagauuucaucaauuaugaggagcuaagagagcaauugagcucagugucaucauuugaaagguuugagauauucuccaagacaaguucauggcccaaucaugacucgaacaaagguguaacggcagcauguccucaugcuggagcaaaaagcuucuacaaaaauuuaauauggcuaguuaaaaaaggaaauucauacccaaagcucagcaaauccuacauuaaugacaaagggaaagaaguccucgugcuguggggcauucaccauccaucuacuacugcugaccaacaaagucucuaucagaaugcagaugcauauguuuuuguggggacaucaagauacagcaagaaguucaagccggaaauagcaauaagacccaaagugagggaucaagaagggagaaugaacuauuacuggacacuaguagagccgggagacaaaauaacauucgaagcaacuggaaaucuagugguaccgagauaugcauucgcaauggaaagaaaugcuggaucugguauuauuauuucagauacaccaguccacgauugcaauacaacuugucagacacccaagggugcuauaaacaccagccucccauuucagaauauacauccgaucacaauuggaaaauguccaaaauauguaaaaagcacaaaauugagacuggccacaggauugaggaaugucccgucuauucaaucuagaggccuauuuggggccauugccggcuucauugaagggggguggacagggaugguagauggaugguacgguuaucaccaucaaaaugagcaggggucaggauaugcagccgaccugaagagcacacagaaugccauugacaagauuacuaacaaaguaaauucuguuauugaaaaaaugaauacacaguucacagcaguagguaaagaguucaaccaccuggaaaaaagaauagagaauuuaaauaaaaaaguugaugaugguuuccuggacauuuggacuuacaaugccgaacuguugguucuauuggaaaaugaaagaacuuuggacuaccacgauucaaaugugaagaacuuguaugaaaagguaagaaaccaguuaaaaaacaaugcuaaggaaauuggaaacggcugcuuugaauuuuaccacaaaugugauaacacgugcauggaaagugucaaaaaugggacuuaugacuacccaaaauacucagaggaagcaaaauuaaacagagaagaaauagaugggguaaagcuggaaucaacaaggauuuaccagauuuuggcgaucuauucaacugucgccaguucauugguacugguagucucccugggggcaaucaguuucuggaugugcucuaaugggucucuacaguguagaauauguauuuaa

SEQ ID NO: 40246 - RNA, 1701 nt, Artificial Sequence
  derived and/or modified CDS sequence (wt) from hemagglutinin__InfluenzaA__AFB77628
augaaggcaauacuaguaguucugcuauauacauuugcaaccgcaaaugcagacacauuguguauagguuaucaugcgaacaauucaacagacacuguagacacaguacuagagaagaauguaacaguaacacacucuguuaaccuucuagaagacaagcauaacgggaaacuaugcaaacuaagagggguagccccauugcauuuggguaaauguaacauugcuggcuggauccugggaaauccagagugugaaucacucuccacagcaagcucaugguccuacauuguggaaacaucuaguucagacaauggaacguguuacccaggagauuucaucaauuaugaggagcuaagagagcaauugagcucagugucaucauuugaaagguuugagauauuccccaagacaaguucauggcccaaucaugacucgaacaaagguguaacggcagcauguccucaugcuggagcaaaaagcuucuacaaaaauuuaauauggcuaguuaaaaaaggaaauucauacccaaagcucagcaaauccuacauuaaugauaaagggaaagaaguccucgugcuguggggcauucaccauccaucuacuacugcagaccaacaaagucucuaucagaaugcagaugcauauguuuuuguggggacaucaagauacagcaagaaguucaagccggaaauagcaauaagacccaaagugagggaucaagaagggagaaugaacuauuacuggacacuaguagagccuggagacaaaauaacauucgaagcaacuggaaaucuagugguaccgagauaugcauucgcaauggaaagaaaugcuggaucugguauuaucauuucagauacaccaguccacgauugcaauacaacuugucagacacccaagggugcuauaaacaccagccucccauuucagaauauacauccgaucacaauuggaaaauguccaaaauauguaaaaagcacaaaauugagacuggccacaggauugaggaaugucccgucuauucaaucuagaggccuauuuggggccauugccggcuucauugaagggggguggacagggaugguagauggaugguacgguuaucaccaucaaaaugagcaggggucaggauaugcagccgaccugaagagcacacagaaugccauugacaagauuacuaacaaaguaaauucuguuauugaaaagaugaauacacaguucacagcaguagguaaagaguucaaccaccuggaaaaaagaauagagaauuuaaauaaaaaaguugaugaugguuuccuggacauuuggacuuacaaugccgaacuguugguucuauuggaaaaugaaagaacuuuggacuaccacgauucaaaugugaagaacuuguaugaaaagguaagaaaccaguuaaaaaacaaugcuaaggaaauuggaaacggcugcuuugaauuuuaccacaaaugcgauaacacgugcauggaaagugucaaaaaugggacuuaugacuacccaaaauacucagaggaagcaaaauuaaacagagaagaaauagaugggguaaagcuggaaucaacaagaauuuaccagauuuuggcgaucuauucaacugucgccaguucauugguacugguagucucccugggggcaaucaguuucuggaugugcucuaaugggucucuacaguguagaauauguauuuaa

SEQ ID NO: 40247 - RNA, 1701 nt, Artificial Sequence
  derived and/or modified CDS sequence (wt) from hemagglutinin__InfluenzaA__AFB77629
augaaggcaauacuaguaguucugcuauauacauuuacaaccgcaaaugcagacacauuguguauagguuaucaugcgaacaauucaacagacacuguagacacaguacuagagaagaauguaacaguaacacacucuguuaaccuucuagaagacaagcauaacgggaaacuaugcaaacuaagagggguagccccauugcauuuggguaaauguaacauugcuggcuggauccugggaaauccagagugugaaucacucuccacagcaagcucaugguccuacauuguggaaacaucuaguucagacaauggaacguguuacccaggagauuucaucaauuaugaggagcuaagagagcaauugagcucagugucaucauuugaaagguuugagauauuccccaagacaaguucauggcccaaucaugacucgaacaaagguguaacggcagcauguccucaugcuggagcaaaaagcuucuacaaaaauuuaauauggcuaguuaaaaaaggaaauucauacccaaagcucagcaaauccuacauuaaugauaaagggaaagaaguccucgugcuguggggcauucaccauccaucuacuacugcagaccaacaaagucucuaucagaaugcagaugcauauguuuuuguggggacaucaagauacagcaagaaguucaagccggaaauagcaauaagacccaaagugagggaucaagaagggagaaugaacuauuacuggacacuaguagagccgggagacaaaauaacauucgaagcaacuggaaaucuagugguaccgagauaugcauucgcaauggaaagaaaugcuggaucugguauuaucauuucagauacaccaguccacgauugcaauacaacuugucagacacccaagggugcuauaaacaccagccucccauuucagaauauacauccgaucacaauuggaaaauguccaaaauauguaaaaagcacaaaauugagacuggccacgggauugaggaaugucccgucuauucaaucuagaggccuauuuggggccauugccggcuucauugaagggggguggacagggaugguagauggaugguacgguuaucaccaucaaaaugagcaggggucaggauaugcagccgaccugaagagcacacagaaugccauugacaagauuacuaacaaaguaaauucuguuauugaaaagaugaauacacaguucacagcaguagguaaagaguucaaccaccuggaaaaaagaauagagaauuuaaauaaaaaaguugaugaugguuuccuggacauuuggacauacaaugaagaacuguugguucuauuggaaaaugaaagaacuuuggacuaccacgauucaaaugugaagaacuuguaugaaaagguaagaaaccaguuaaaaaacaaugccaaggaaauuggaaacggcugcuuugaauuuuaccacaaaugcgauaacacgugcauggaaagugucaaaaaugggacuuaugacuacccaaaauacucagaggaagcaaaauuaaacagagaagaaauagaugggguaaagcuggaaucaacaaggauuuaccagauuuuggcgaucuauucaacugucgccaguucauugguacugguagucucccugggggcaaucaguuucuggaugugcucuaaugggucucuacaguguagaauauguauuuaa

SEQ ID NO: 40248 - RNA, 1701 nt, Artificial Sequence
  derived and/or modified CDS sequence (wt) from hemagglutinin__InfluenzaA__AFB77630
augaaggcaauacuaguaguucugcuauauacauuugcaaccgcaaaugcagacacauuguguauagguuaucaugcgaacaauucaacagacacuguagacacaguacuagagaagaauguaacaguaacacacucuguuaaccuucuagaagacaagcauaacgggaaacuaugcaaacuaagagggguagccccauugcauuuggguaaauguaacauugcuggcuggauccugggaaauccagagugugaaucacucuccacagcaagcucaugguccuacauuguggaaacaucuaguucagacaauggaacguguuacccaggagauuucaucaauuaugaggagcuaagagagcaauugagcucagugucaucauuugaaagguuugagauauuccccaagacaaguucauggcccaaucaugagucgaacaaagguguaacggcagcauguccucaugcuggagcaaaaagcuucuacaaaaauuuaauauggcuaguuaaaaaaggaaauucauacccaaagcucagcaaauccuacauuaaugauaaagggaaagaaguccucgugcuguggggcauucaccauccaucuacuacugcagaccaacaaagucucuaucagaaugcagaugcauauguuuuuguggggacaucaagauacagcaagaaguucaagccggaaauagcaauaagacccaaagugagggaucaagaagggagaaugaacuauuacuggacacuaguagagccgggagacaaaauaacauucgaagcaacuggaaaucuagugguaccgagauaugcauucgcaauggaaagaaaugcuggaucugguauuaucauuucagauacaccaguccacgauugcaauacaacuugucagacacccaagggugcuauaaacaccagccucccauuucagaauauacauccgaucacaauuggaaaauguccaaaauauguaaaaagcacaaaauugagacuggccacaggauugaggaaugucccgucuauucaaucuagaggccuauuuggggccauugccggcuucauugaagggggguggacagggaugguagauggaugguacgguuaucaccaucaaaaugagcaggggucaggauaugcagccgaccugaagagcacacagaaugccauugacaagauuacuaacaaaguaaauucuguuauugaaaagaugaauacacaguucacagcaguagguaaagaguucaaccaccuggaaaaaagaauagagaauuuaaauaaaaaaguugaugaugguuuccuggacauuuggacuuacaaugccgaacuguugguucuauuggaaaaugaaagaacuuuggacuaccacgauucaaaugugaagaacuuguaugaaaagguaagaaaccaguuaaaaaacaaugcuaaggaaauuggaaacggcugcuuugaauuuuaucacaaaugcgauaacacgugcauggaaagugucaaaaaugggacuuaugacuacccaaaauacucagaggaagcaaaauuaaacagagaagaaauagaugggguaaagcuggaaucaacaaggauuuaccagauuuuggcgaucuauucaacugucgccaguucauugguacugguagucucccugggggcaaucaguuucuggaugugcucuaaugggucucuacaguguagaauauguauuuaa

SEQ ID NO: 40249 - RNA, 1701 nt, Artificial Sequence
  derived and/or modified CDS sequence (wt) from hemagglutinin__InfluenzaA__AFB77631
augaaggcaauacuaguaguucugcuauauacauuuacaaccgcaaaugcagacacauuguguauagguuaucaugcgaacaauucaacagacacuguagacacaguacuagagaagaauguaacaguaacacacucuguuaaccuucuagaagacaagcauaacgggaaacuaugcaaacuaagagggguagccccauugcauuuggguaaauguaacauugcuggcuggauccugggaaauccagagugugaaucacucuccacagcaagcucaugguccuacauuguggaaacaucuaguucagacaauggaacguguuacccaggagauuucaucaauuaugaggagcuaagagagcaauugagcucagugucaucauuugaaagguuugagauauuccccaagacaaguucauggcccaaucaugacucgaacaaagguguaacggcagcauguccucaugcuggagcaaaaagcuucuacaaaaauuuaauauggcuaguuaaaaaaggaaauucauacccaaagcucagcaaauccuacauuaaugauaaagggaaagaaguccucgugcuguggggcauucaccauccaucuacuacugcagaccaacaaagucucuaucagaaugcagaugcauauguuuuuguggggacaucaagauacagcaagaaguucaagccggaaauagcaauaagacccaaagugagggaucaagaagggagaaugaacuauuacuggacacuaguagagccgggagacaaaauaacauucgaagcaacuggaaaucuagugguaccgagauaugcauucgcaauggaaagaaaugcuggaucugguauuaucauuucagauacaccaguccacgauugcaauacaacuugucagacacccaagggugcuauaaacaccagccucccauuucagaauauacauccgaucacaauuggaaaauguccaaaauauguaaaaagcacaaaauugagacuggccacgggauugaggaaugucccgucuauucaaucuagaggccuauuuggggccauugccggcuucauugaagggggguggacagggaugguagauggaugguacgguuaucaccaucaaaaugagcaggggucaggauaugcagccgaccugaagagcacacagaaugccauugacaagauuacuaacaaaguaaauucuguuauugaaaagaugaauacacaguucacagcaguagguaaagaguucaaccaccuggaaaaaagaauagagaauuuaaauaaaaaaguugaugaugguuuccuggacauuuggacuuacaaugccgaacuguugguucuauuggaaaaugaaagaacuuuggacuaccacgauucaaaugugaagaacuuguaugaaaagguaagaaaccaguuaaaaaccaaugcuaaggaaauuggaaacggcugcuuugaauucuaccacaaaugcgauaacacgugcauggaaagugucaaaaaugggacuuaugacuacccaaaauacucagaggaagcaaaauuaaacagagaagaaauagaugggguaaagcuggaaucaacaaggauuuaccagauuuuggcgaucuauucaacugucgccaguucauugguacugguagucucccugggggcaaucaguuucuggaugugcucuaaugggucucuacaguguagaauauguauuuaa

SEQ ID NO: 40250 - RNA, 1701 nt, Artificial Sequence
  derived and/or modified CDS sequence (wt) from hemagglutinin__InfluenzaA__AFB77632
augaaggcaauacuaguaguucugcuauauacauuugcaaccgcaaaugcagacacauuguguauagguuaucaugcgaacaauucaacagacacuguagacacaguacuagagaagaauguaacaguaacacacucuguuaaccuucuagaagacaagcauaacgggaaacuaugcaaacuaagagggguagccccauugcauuuggguaaauguaacauugcuggcuggauccugggaaauccagagugugaaucacucaccacagcaagcucaugguccuacauuguggaaacaucuaguucagacaauggaacguguuacccaggagauuucaucaauuaugaggagcuaagagagcaauugagcucagugucaucauuugaaagguuugagauauuccccaagacaaguucauggcccaaucaugacucgaacaaagguguaacggcagcauguccucaugcuggagcaaaaagcuucuacaaaaauuuaauauggcuaguuaaaaaaggaaauucauacccaaagcucagcaaauccuacauuaaugauaaagggaaagaaguccucgugcuguggggcauucaccauccaucuacuacugcagaccaacaaagucucuaucagaaugcagaugcauauguuuuuguggggacaucaagauacagcaagaaguucaagccggaaauagcaauaagacccaaagugagggaucaagaagggagaaugaacuauuacuggacacuaguagagccgggagacaaaauaacauucgaagcaacuggaaaucuagugguaccgagauaugcauucgcaauggaaagaaaugcuggaucugguauuaucauuucagauacaccaguccacgauugcaauacaacuugucagacacccaagggugcuauaaacaccagccucccauuucagaauauacauccgaucacaauuggaaaauguccaaaauauguaaaaagcacaaaauugagacuggccacaggauugaggaaugucccgucuauucaaucuagaggccuauuuggggccauugccggcuucauugaagggggguggacagggaugguagauggaugguacgguuaucaccaucaaaaugagcaggggucaggauaugcagccgaccugaagagcacacagaaugccauugacaagauuacuaacaaaguaaauucuguuauugaaaagaugaauacacaguucacagcaguagguaaagaguucaaccaccuggaaaaaagaauagagaauuuaaauaaaaaaguugaugaugguuuccuggacauuuggacuuacaaugccgaacuguugguucuauuggaaaaugaaagaacuuuggacuaccacgauucaaaugugaagaacuuguaugaaaagguaagaaaccaguuaaaaaacaaugcuaaggaaauuggaaacggcugcuuugaauuuuaucacaaaugcgauaacacgugcauggaaagugucaaaaaugggacuuaugacuacccaaaauacucagaggaagcaaaauuaaacagagaagaaauagaugggguaaagcuggaaucaacaaggauuuaccagauuuuggcgaucuauucaacugucgccaguucauugguacugguagucucccugggggcaaucaguuucuggaugugcucuaaugggucucuacaguguaaaauauguauuuaa

SEQ ID NO: 40251 - RNA, 1701 nt, Artificial Sequence
  derived and/or modified CDS sequence (wt) from hemagglutinin__InfluenzaA__AFB77633
augaaggcaauacuaguaguucugcuauauacauuugcaaccgcaaaugccgacacauuguguauagguuaccaugcgaacaauucaacagacacuguagacacaguacuagaaaagaauguaacaguaacacacucuguuaaccuucuagaagacaagcauaacgggaaacuaugcaaacuaagagggguagccccauugcauuuggguaaauguaacauugcuggcuggauccugggaaauccagagugugaaucacucuccacagcaagcucaugguccuacauuguggaaacaucuaguucagacaauggaacguguuacccaggagauuucaucaauuaugaggagcuaagagagcaauugagcucagugucaucauuugaaagguuugagauauuccccaagacaaguucauggcccaaucaugacucgaacaaagguguaacggcagcauguucucaugcuggagcaaaaagcuucuacaaaaauuuaauauggcuaguuaaaaaaggaaauucauacccaaaacucagcaaauccuacauuaaugauaaagggaaagaaguccucgugcuguggggcauucaccauccaucuacuacugcugaccaacaaagucucuaucagaaugcagaugcauauguuuuuguggggacaucaagauacagcaagaaguucaagccggaaauagcaauaagacccaaagugagggaucaagaagggagaaugaacuauuacuggacacuaguagagccgggagacaaaauaacauucgaagcaacuggaaaucuagugguaccgagauaugcauucgcaauggaaagaaaugcuggaucugguauuaucauuucagauacaccaguccacgauugcaauacaacuugucagacacccaagggugcuauaaacaccagccucccauuucagaauauacauccgaucacaauuggaaaauguccaaaauauguaaaaagcacaaaauugagacuggccacaggauugaggaaugucccgucuauucaaucuagaggccuauuuggggccauugccggcuucauugaagggggguggacagggaugguagauggaugguacgguuaucaccaucaaaaugagcaggggucaggauaugcagccgaccugaagagcacacagaaugccauugacaagauuacuaacaaaguaaauucuguuauugaaaagaugaauacacaguucacagcaguagguaaagaguucaaccaccuggaaaaaaggauagagaauuuaaauaaaaaaguugaugaugguuuccuggacauuuggacuuacaaugccgaacuguugguucuauuggaaaaugaaagaacuuuggacuaccacgauucaaaugugaagaacuuguaugaaaagguaaaaaaccaauuaaaaaacaaugcuaaggaaauuggaaacggcugcuuugaauuuuaccacaaaugcgauaacacgcccaucaaaaaugucaaaaaugggacuuaugacuacccaaaauacucagaggaagcaaaauuaaacagagaagaaauagaugggguaaagcuggaaucaacaaggauuuaccagauuuuggcgaucuauucaacugucgccaguucauugguacugguagucucccugggggcaaucaguuucuggaugugcucuaaugggucucuacaguguagaauauguauuuaa

SEQ ID NO: 40252 - RNA, 1701 nt, Artificial Sequence
  derived and/or modified CDS sequence (wt) from hemagglutinin__InfluenzaA__AFB77634
augaaggcaauacuaguaguucugcuauauacauuugcaaccgcaaaugcagacacauuguguauagguuaucaugcgaacaauucaacagacacuguagacacaguacuagaaaagaauguaacaguaacacacucuguuaaccuucuagaagacaagcauaacgggaaacuaugcaaacuaagagggguagccccauugcauuuggguaaauguaacauugcuggcuggauccugggaaauccagagugugaaucacucuccacagcaagcucaugguccuacauuguggaaacaucuaguucagacaauggaacguguuacccaggagauuucaucaauuaugaggagcuaagagagcaauugagcucagugucaucauuugaaagguuugagauauuccccaagacaaguucauggcccaaucaugacucgaacaaagguguaacggcagcauguccucaugcuggagcaaaaagcuucuacaaaaauuuaauauggcuaguuaaaaaaggaaauucauacccaaagcucagcaaauccuacauuaaugauaaagggaaagaaguccucgugcuguggggcauucaccauccaucuacuacugcugaccaacaaagucucuaucagaaugcagaugcauauguuuuuguggggacaucaagauacagcaagaaguucaagccggaaauagcaauaagacccaaagugagggaucaagaagggagaaugaacuauuacuggacacuaguagagccgggagaaaaaauaacauucgaagcaacuggaaaucuagugguaccgagauaugcauucgcaauggaaagaaaugcuggaucugguauuaucauuucagauacaccaguccacgauugcaauacaacuugucagacacccaagggggcuauaaacaccagccucccauuucagaauauacauccgaucacaauuggaaaauguccaaaauauguaaaaagcacaaaauugagacuggccacaggauugaggaaugucccgucuauucaaucuagaggccuauuuggggccauugccggcuucaucgaagggggguggacagggaugguagauggaugguacgguuaucaccaucaaaaugagcaggggucaggauaugcagccgaccugaagagcacacagaaugccauugacaagauuacuaacaaaguaaauucuguuauugaaaagaugaauacacaguucacagcaguagguaaagaguucaaccaccuggaaaaaagaauagagaauuuaaauaaaaagguugaugaugguuuccuggacauuuggacuuacaaugccgaacuguugguucuauuggaaaaugagagaacuuuggacuaccacgauucaaaugugaaaaacuuguaugaaaagguaagaaaccaguuaaaaaacaaugcuaaggaaauuggaaacggcugcuuugaauuuuaccacaaaugcgauaacacgugcauggaaagugucaaaaaugggacuuaugacuacccaaaauacucagaggaagcaaaauuaaacagagaagaaauagaugggguaaagcuggaaucaacaaggauuuaccagauuuuggcgaucuauucaacugucgccaguucauugguacugguagucucccugggggcaaucaguuucuggaugugcucuaaugggucucuacaguguagaauauguauuuaa

SEQ ID NO: 40253 - RNA, 1701 nt, Artificial Sequence
  derived and/or modified CDS sequence (wt) from hemagglutinin__InfluenzaA__AFB77635
augaaggcaauacuaguaguuuugcuauauacauuugcaaccgcaaaugcagacacauuauguauagguuaucaugcgaacaauucaacagacacuguagacacaguacuagaaaagaauguaacaguaacacacucuguuaaccuucuagaagacaagcauaacgggaaacuaugcaaacuaagagggguagccccauugcauuuggguaaauguaacauugcuggcuggauccugggaaauccagagugugaaucacucuccacagcaagcccaugguccuacauuguggaaacaucuaguucagacaauggaacguguuacccaggagauuucaucaauuaugaggagcuaagagagcaauugagcucagugucaucauuugaaagguuugagauauuccccaagacaaguucauggcccaaucaugacucgaacaaagguguaacggcagcauguccucaugcuggagcaaaaagcuucuacaaaaauuuaauauggcuaguuaaaaaaggaaauucauacccaaagcucagcaaauccuacauuaaugauaaagggaaagaaguccucgugcuguggggcauucaccauccaucuacuacugcugaccaacaaagucucuaucagaaugcagaugcauauguuuuuguggggacaucaagauacagcaagaaguucaagccggaaauagcaauaagacccaaagugagggaucaagaagggagaaugaacuauuacuggacacuaguagagccgggagacaaaauaacauucgaagcaacuggaaaucuagugguaccgagauaugcauucgcaauggaaagaaaugcuggaucugguauuaucauuucagauacaccaguccacgauugcaauacaacuugucagacacccaagggugcuauaaacaccagccucccauuucagaauauacauccgaucacaauuggaaaauguccaaaauauguaaaaagcacaaaauugagacuggccacaggauugaggaaugucccgucuauucaaucuagaggccuauuuggggccauugccggcuucauugaagggggguggacagggaugguagauggaugguacgguuaucaccaucaaaaugagcaggggucaggauaugcagccgaccugaagagcacacagaaugccauugacaagauuacuaacaaaguaaauucuguuauugaaaagaugaauacacaguucacagcaguagguaaagaguucaaccaccuggaaaaaagaauagagaauuuaaauaaaaaaguugaugaugguuuccuggacauuuggacuuacaaugccgaacuguugguucuauuggaaaaugaaagaacuuuggacuaccacgauucaaaugugaagaacuuguaugaaaagguaagaaaccaguuaaaaaacaaugccaaggaaauuggaaacggcugcuuugaauuuuaccacaaaugcgauaacacgugcauggaaagugucaaaaaugggacuuaugacuacccaaaauacucagaggaagcaaaauuaaacagagaagaaauagaugggguaaagcuggaaucaacaaggauuuaccagauuuuggcgaucuauucaacugucgccaguucauugguacugguagucucccugggggcaaucaguuucuggaugugcucuaaugggucucuacaguguagaauauguauuuaa

SEQ ID NO: 40254 - RNA, 1701 nt, Artificial Sequence
  derived and/or modified CDS sequence (wt) from hemagglutinin__InfluenzaA__AFB77636
augaaggcaauacuaguaguucugcuauauacauuugcaaccgcaaaugcagacacauuguguauagguuaucaugcgaacaauucaacagacacuguagacacaguacuagaaaagaauguaacaguaacacacucuguuaaccuucuagaagacaagcauaacgggaaacuaugcaaacuaagagggguagccccauugcauuuggguaaauguaacauugcuggcuggauccugggaaauccagagugugaaucacucuccacagcaagcucaugguccuacauuguggaaacaucuaguucagacaauggaacguguuacccaggagauuucaucaauuaugaggagcuaagagagcaauugagcucagugucaucauuugaaagguuugagauauuccccaagacaaguucauggcccaaucaugacucgaacaaagguguaacggcagcauguccucaugcuggagcaaaaagcuucuacaaaaauuuaauauggcuaguuaaaaaaggaaauucauacccaaagcucagcaaauccuacauuaaugauaaagggaaagaaguccucgugcuguggggcauucaccauccaucuacuacugcugaccaacaaagucucuaucagaaugcagaugcauauguuuuuguggggacaucaagauacagcaagaaguucaagccggaaauagcaauaagacccaaagugagggaucaagaagggagaaugaacuauuacuggacacuaguagagccgggagacaaaauaacauucgaagcaacuggaaaucuagugguaccgagauaugcauucgcaauggaaagaaaggcuggaucugguauuaucauuucagauacaccaguccacgauugcaauacaacuugucagacacccaagggugcuauaaacaccagccucccauuucagaauauacauccgaucacaauugggaaauguccaaaauauguaaaaagcacaaaauugagacuggccacaggauugaggaaugucccgucuauucaaucuagaggccuauuuggggccauugccggcuucauugaagggggguggacagggaugguagauggaugguacgguuaucaccaucaaaaugagcaggggucaggauaugcagccgaccugaagagcacacagaaugccauugacaagauuacuaacaaaguaaauucuguuauugaaaagaugaauacacaguucacagcaguagguaaagaguucaaccaccuggaaaaaagaauagagaauuuaaauaaaaaaguugaugaugguuuccuggacauuuggacuuacaaugccgaacuguugguucuauuggaaaaugaaagaacuuuggacuaccacgauucaaaugugaagaacuuguaugaaaagguaagaaaccaguuaaaaaacaaugcuaaggaaauuggaaacggcugcuuugaauuuuaccacaaaugcgauaacacgugcauggaaagugucaaaaaugggacuuaugacuacccaaaauacucagaggaagcaaaauuaaacagagaagaaauagaugggguaaagcuggaaucaacaaggauuuaccagauuuuggcgaucuauucaacugucgccaguucauugguaaugguagucucccugggggcaaucaguuucuggaugugcucuaaugggucucuacaguguagaauauguauuuaa

SEQ ID NO: 40255 - RNA, 1701 nt, Artificial Sequence
  derived and/or modified CDS sequence (wt) from hemagglutinin__InfluenzaA__AFB77637
augaaggcaauacuaguaguucugcuauauacauuugcaaccgcaaaugcagacacauuguguauagguuaucaugcgaacaauucaacagacacuguagacacaguacuagagaagaauguaacaguaacacacucuguuaaccuucuagaagacaagcauaacgggaaacuaugcaaacuaagagggguagccccauugcauuuggguaaauguaacauugcuggcuggauccugggaaauccagagugugaaucacucuccacagcaagcucaugguccuacauuguggaaacaucuaguucagacaauggaacguguuacccaggagauuucaucaauuaugaggagcuaagagagcaauugagcucagugucaucauuugaaagguuugagauauuccccaagacaaguucauggcccaaucaugacucgaacaaagguguaacggcagcauguccucaugcuggagcaaaaagcuucuacaaaaauuuaauauggcuaguuaaaaaaggaaauucauacccaaagcucagcaaauccuacauuaaugauaaagggaaagaaguccucgugcuguggggcauucaccauccaucuacuacugcagaccaacaaagucucuaucagaaugcagaugcauauguuuuuguggggacaucaagauacagcaagaaguucaagccggaaauagcaauaagacccaaagggagggaucaagaagggagaaugaacuauuacuggacacuaguagagccgggagacaaaauaacauucgaagcaacuggaaaucuagugguaccgagauaugcauucgcaauggaaagaaaugcuggaucugguauuaucauuucagauacaccaguccacgauugcaauacaacuugucagacacccaagggugcuauaaacaccagccucccauuucagaauauacauccgaucacaauuggaaaauguccaaaauauguaaaaagcacaaaauugagacuggccacgggauugaggaaugucccgucuauucaaucuagaggccuauuuggggccauugccggcuucauugaagggggguggacagggaugguagauggaugguacgguuaucaccaucaaaaugagcaggggucaggauaugcagccgaccugaagagcacacagaaugccauugacaagauuacuaacaaaguaaauucuguuauugaaaagaugaauacacaguucacagcaguagguaaagaguucaaccaccuggaaaaaagaauagagaauuuaaauaaaaaaguugaugaugguuuccuggacauuuggacuuacaaugccgaacuguugguucuauuggaaaaugaaagaacuuuggacuaccacgauucaaaugugaagaacuuguaugaaaagguaagaaaccaguuaaaaaacaaugcuaaggaaauuggaaacggcugcuuugaauuuuaccacaaaugcgauaacacgugcauggaaagugucaaaaaugggacuuaugacuacccaaaauacucagaggaagcaaaauuaaacagagaagaaauagaugggguaaagcuggaaucaacaaggauuuaccagauuuuggcgaucuauucaacugucgccaguucauugguacugguagucucccugggggcaaucaguuucuggaugugcucuaaugggucucuacaguguagaauauguauuuaa

SEQ ID NO: 40256 - RNA, 1701 nt, Artificial Sequence
  derived and/or modified CDS sequence (wt) from hemagglutinin__InfluenzaA__AFB77638
augaaggcaauacuaguaguucugcuauauacauuugcaaccgcaaaugcagacacauuguguauagguuaucaugcgaacaauucaacagacacuguagacacaguacuagagaagaauguaacaguaacacacucuguuaaccuucuagaagacaagcauaacgggaaacuaugcaaacuaagagggguagccccauugcauuuggguaaauguaacauugcuggcuggauccugggaaauccagagugugaaucacucuccacagcaagcucaugguccuacauuguggaaacaucuaguucagacaauggaacguguuacccaggagauuucaucaauuaugaggagcuaagagagcaauugagcucagugucaucauuugaaagguuugagauauuccccaagacaaguucauggcccaaucaugacucgaacaaagguguaacggcagcauguccucaugcuggagcaaaaagcuucuacaaaaauuuaauauggcuaguuaaaaaaggaaauucauacccaaagcucagcaaauucuacauuaaugauaaagggaaagaaguccucgugcuguggggcauucaccauccaucuacuacugcagaccaacaaagucucuaucagaaugcagaugcauauguuuuuguggggacaucaagauacagcaagaaguucaagccggaaauagcaauaagacccaaagugagggaucaagaagggagaaugaacuauuacuggacacuaguagagccgggagacaaaauaacauucgaagcaacuggaaaucuagugguaccgagauaugcauucgcaauggaaagaaaugcuggaucugguauuaucauuucagauacaccaguccacgauugcaauacaacuugucagacacccaagggugcuauaaacaccagccucccauuucagaauauacauccgaucacaauuggaaaauguccaaaauauguaaaaagcacaaaauugagacuggccacgggauugaggaaugucccgucuauucaaucuagaggccuauuuggggccauugccggcuucauugaagggggguggacagggaugguagauggaugguacgguuaucaccaucaaaaugagcaggggucaggauaugcagccgaccugaagagcacacagaaugccauugacaagauuacuaacaaaguaaauucuguuauugaaaagaugaauacacaguucacagcaguagguaaagaguucaaccaccuggaaaaaagaauagagaauuuaaauaaaaaaguugaugaugguuuccuggacauuuggacuuacaaugccgaacuguugguucuauuggaaaaugaaagaacuuuggacuaccacgauucaaaugugaagaacuuguaugaaaagguaagaaaccaguuaaaaaacaaugcuaaggaaauuggaaacggcugcuuugaauucuaccacaaaugcgauaacacgugcauggaaagugucaaaaaugggacuuaugacuacccaaaauacucagaggaagcaaaauuaaacagagaagaaauagaugggguaaagcuggaaucaacaaggauuuaccagauuuuggcgaucuauucaacugucgccaguucauugguacugguagucucccugggggcaaucaguuucuggaugugcucuaaugggucucuacaguguagaauauguauuuaa

SEQ ID NO: 40257 - RNA, 1701 nt, Artificial Sequence
  derived and/or modified CDS sequence (wt) from hemagglutinin__InfluenzaA__AFB77639
augaaggcaauacuaguaguucugcuauauacauuugcaaccgcaaaugcagacacauuguguauagguuaucaugcgaacaauucaacagacacuguagacacaguacuagagaagaauguaacaguaacacacucuguuaaccuucuagaagacaagcauaacgggaaacuaugcaaacuaagagggguagccccauugcauuuggguaaauguaacauugcuggcuggauccugggaaauccagagugugaaucacucuccacagcaagcucaugguccuacauuguggaaacaucuaguucagacaauggaacguguuacccaggagauuucaucaauuaugaggagcuaagagagcaauugagcucagugucaucauuugaaagguuugagauauuccccaagacaaguucauggcccaaucaugacucgaacaaagguguaacggcagcauguccucaugcuggagcaaaaagcuucuacaaaaauuuaauauggcuaguuaaaaaaggaaauucauacccaaagcucagcaaauccuacauuaaugauaaagggaaagaaguccucgugcuguggggcauucaccauccaucuacuacugcagaccaacaaagucucuaucagaaugcagaugcauauguuuuuguggggacaucaagauacagcaagaaguucaagccggaaauagcaauaagacccaaagugagggaucaagaagggagaaugaacuauuacuggacacuaguagaaccgggagacaaaauaacauucgaagcaacuggaaaucuagugguaccgagauaugcauucgcaauggaaagaaaugcuggaucugguauuaucauuucagauacaccaguccacgauugcaauacaacuugucagacacccaagggugcuauaaacaccagccucccauuucagaauauacauccgaucacaauuggaaaauguccaaaauauguaaaaagcacaaaauugagacuggccacaggauugaggaaugucccgucuauucaaucuagaggccuauuuggggccauugccggcuucauugaagggggguggacagggaugguagauggaugguacgguuaucaccaucaaaaugagcaggggucaggauaugcagccgaccugaagagcacacagaaugccauugacaagauuacuaacaaaguaaauucuguuauugaaaagaugaauacacaguucacagcaguagguaaagaguucaaccaccuggaaaaaagaauagagaauuuaaauaaaaaaguugaugaugguuuccuggacauuuggacuuacaaugccgaacuguugguucuauuggaaaaugaaagaacuuuggacuaccacgauucaaaugugaagaacuuguaugaaaagguaagaaaccaguuaaaaaacaaugcuaaggaaauuggaaacggcugcuuugaauuuuaccacaaaugcgauaacacgugcauggaaagugucaaaaaugggacuuaugacuacccaaaauacucagaggaagcaaaauuaaacagagaagaaauagaugggguaaagcuggaaucaacaaggauuuaccagauuuuggcgaucuauucaacugucgccaguucauuaguacugguagucucccugggggcaaucaguuucuggaugugcucuaaugggucucuacaguguagaauauguauuuaa

SEQ ID NO: 40258 - RNA, 1701 nt, Artificial Sequence
  derived and/or modified CDS sequence (wt) from hemagglutinin__InfluenzaA__AFB77640
augaaggcaauacuaguaguucugcuauauacauuugcaaccgcaaaugcagacacauuguguauagguuaucaugcgaacaauucaacagacacuguagacacaguacuagagaagaauguaacaguaacacacucuguuaaccuucuagaagacaagcauaacgggaaacuaugcaaacuaagagggguagccccauugcauuuggguaaauguaacauugcuggcuggauccugggaaauccagagugugaaucacucuccacagcaagcucaugguccuacauuguggaaacaucuaguucagacaauggaacguguuacccaggagauuucaucaauuaugaggagcuaagagagcaauugagcucagugucaucauuugaaagguuugagauauuccccaagacaaguucauggcccaaucaugacucgaacaaagguguaacggcagcauguccucaugcuggagcaaaaagcuucuacaaaaauuuaauauggcuaguuaaaaaaggaaauucauacccaaagcucagcaaauccuacauuaaugauaaagggaaagaaguccucgugcuguggggcauucaccauccaucuacuacugcagaccaacaaggucucuaucagaaugcagaugcauauguuuuuguggggacaucaagauacagcaagaaguucaagccggaaauagcaauaagacccaaagugagggaucaagaagggagaaugaacuauuacuggacacuaguagagccgggagacaaaauaacauucgaagcaacuggaaaccuagugguaccgagauaugcauucgcaauggaaagaaaugcuggaucuggcauuaucauuucagauacaccaguccacgauugcaauacaacuugucagacacccaagggugcuauaaacaccagccucccauuucagaauauacauccgaucacaauuggaaaauguccaaaauauguaaaaagcacaaaauugagacuggccacgggauugaggaaugucccgucuauucaaucuagaggccuauuuggggccauugccggcuucauugaagggggguggacagggaugguagauggaugguacgguuaucaccaucaaaaugagcaggggucaggauaugcagccgaccugaagagcacacagaaugccauugacaagauuacuaacaaaguaaauucuguuauugaaaagaugaauacacaguucacagcaguagguaaagaguucaaccaccuggaaaaaagaauagagaauuuaaauaaaaaaguugaugaugguuuccuggacauuuggacuuacaaugccgaacuguugguucuauuggaaaaugaaagaacuuuggacuaccacgauucaaaugugaagaacuuguaugaaaagguaagaaaccaguuaaaaaacaaugcuaaggaaauuggaaacggcugcuuugaauucuaccacaaaugcgauaacacgugcauggaaagugucaaaaaugggacuuaugacuacccaaaauacucagaggaagcaaaauuaaacagagaagaaauagaugggguaaagcuggaaucaacaaggauuuaccagauuuuggcgaucuauucaacugucgccaguucauugguacugguagucucccugggggcaaucaguuucuggaugugcucuaaugggucucuacaguguagaauauguauuuaa

SEQ ID NO: 40259 - RNA, 1701 nt, Artificial Sequence
  derived and/or modified CDS sequence (wt) from hemagglutinin__InfluenzaA__AFB77641
augaaggcaauacuaguaguucugcuauauacauuugcaaccgcaaaugcagacacauuguguauagguuaucaugcgaacaauucaacagacacuguagacacaguacuagaaaagaauguaacaguaacacacucuguuaaccuucuagaagacaagcauaacgggaaacuaugcaaacuaagagggguagccccauuacauuuggguaaauguaacauugcuggcuggauccugggaaauccagagugugaaucacucuccacagcaagcucaugguccuacauuguggaaacaucuaguucagacaauggaacguguuacccaggagauuucaucaauuaugaggagcuaagagagcaauugagcucagugucaucauuugaaagguuugagauauuccccaagacaaguucauggcccaaucaugacucgaacaaagguguaacggcagcauguccucaugcuggagcaaaaagcuucuacaaaaauuuaauauggcuaguuaaaaaaggaaauucauacccaaagcucagcaaauccuacauuaaugauaaagggaaagaaguccucgugcuguggggcauucaccauccaucuacuacugcugaccaacaaagucucuaucagaaugcagaugcauauguuuuuguggggacaucaagauacagcaagaaguucaagccggaaauagcaauaagacccaaagugagggaucaagaagggagaaugaacuauuacuggacacuaguagagccgggagacaaaauaacauucgaagcaacuggaaaucuagugguaccgagauaugcauucgcaauggaaagaaaugcuggaucugguauuaucauuucagauacaccaguccacgauugcaauacaacuugucagacacccaagggggcuauaaacaccagccucccauuucagaauauacauccgaucacaauuggaaaauguccaaaauauguaaaaagcacaaaauugagacuggccacaggauugaggaaugucccgucuauucaaucuagaggccuauuuggggccauugccggcuucauugaagggggguggacagggaugguagauggaugguacgguuaucaccaucaaaaugagcaggggucaggauaugcagccgaccugaagagcacacagaaugccauugacaagauuacuaacaaaguaaauucuguuauugaaaagaugaauacacaguucacagcaguagguaaagaguucaaccaccuggaaaaaagaauagagaauuuaaauaaaaaaguugaugaugguuuccuggacauuuggacuuacaaugccgaacuguugguucuauuggaaaaugaaagaacuuuggacuaccacgauucaaaugugaagaacuuguaugaaaagguaagaaaccaguuaaaaaacaaugcuaaggaaauuggaaacggcugcuuugaauuuuaccacaaaugcgauaacaugugcauggaaagugucaaaaaugggacuuaugacuacccaaaauacucagaggaagcaaaauuaaacagagaagaaauagaugggguaaagcuggaaucaacaaggauuuaccagauuuuggcgaucuauucaacuguugccaguucauugguacugguagucucccugggggcaaucaguuucuggaugugcucuaaugggucucuacaguguagaauauguauuuaa

SEQ ID NO: 40260 - RNA, 1701 nt, Artificial Sequence
  derived and/or modified CDS sequence (wt) from hemagglutinin__InfluenzaA__AFB77642
augaaggcaauacuaguaguucugcuauauacauuugcaaccgcaaaugcagacacauuguguauagguuaucaugcgaacaauucaacagacacuguagacacaguacuagaaaagaauguaacaguaacacacucuguuaaccuucuagaagacaagcauaacgggaaacuaugcaaacuaagagggguagccccauugcauuuggguaaauguaacauugcuggcuggauccugggaaauccagagugugaaucacucuccacagcaagcucaugguccuacauuguggaaacaucuaguucagacaauggaacguguuacccaggagauuucaucaauuaugaggagcuaagagagcaauugagcucagugucaucauuugaaagguuugagauauuccccaagacaaguucauggcccaaucaugacucgaacaaagguguaacggcagcauguccucaugcuggagcaaaaagcuucuacaaaaauuuaauauggcuaguuaaaaaaggaaauucauacccaaagcucagcaaauccuacauuaaugauaaagggaaagaaguccucgugcuguggggcauucaccauccaucuacuacugcugaccaacaaagucucuaucagaaugcagaugcauauguuuuuguggggacaucaagauacagcaagaaguucaagccggaaauagcaauaagacccaaagugagggaucaagaagggagaaugaacuauuacuggacacuaguagagccgggagacaaaauaacauucgaagcaacuggaaaucuagugguaccgagauaugcauucgcaauggaaagaaaugcuggaucugguauuaucauuucagauacaccaguccacgauugcaauacaacuugucagacacccaagggggcuauaaacaccagccucccauuucagaauauacauccgaucacaauuggaaaauguccaaaauauguaaaaagcacaaaauugagacuggccacaggauugaggaaugucccgucuauucaaucuagaggccuauuuggggccauugccggcuucauugaagggggguggacagggaugguagauggaugguacgguuaucaucaucaaaaugagcaggggucaggauaugcagccgaccugaagagcacacagaaugccauugacaagauuacuaacaaaguaaauucuguuauugaaaagaugaauacacaguucacagcaguagguaaagaguucaaccaccuggaaaaaagaauagagaauuuaaauaaaaaaguugaugaugguuuccuggacauuuggacuuacaaugccgaacuguugguucuauuggaaaaugagagaacuuuggacuaccacgauucaaaugugaagaacuuguacgaaaagguaagaaaccaguuaaaaaacaaugcuaaggaaauuggaaacggcugcuuugaauuuuaccacaaaugcgauaacacgugcauggaaagugucaaaaaugggacuuaugacuacccaaaauacucagaggaagcaaaauuaaacagagaagaaauagaugggguaaagcuggaaucaacaaggauuuaccagauuuuggcgaucuauucaacugucgccaguucauugguacugguagucucccugggggcaaucaguuucuggaugugcucuaaugggucucuacaguguagaauauguauuuaa

SEQ ID NO: 40261 - RNA, 1701 nt, Artificial Sequence
  derived and/or modified CDS sequence (wt) from hemagglutinin__InfluenzaA__AFB77643
augaaggcaauacuaguaguucugcuauauacauuugcaaccgcaaaugcagacacauuguguauagguuaucaugcgaacaauucaacagacacuguagacacagugcuagaaaagaauguaacaguaacacacucuguuaaccuucuagaagacaagcauaacgggaaacuaugcaaacuaagagggguagccccauugcauuuggguaaauguaacauugcuggcuggauccugggaaauccagagugugaaucacucuccacagcaagcucaugguccuacauuguggaaacaucuaguucagacaauggaacguguuacccaggagauuucaucaauuaugaggagcuaagagagcaauugagcucagugucaucauuugaaagguuugagauauuccccaagccaaguucauggcccaaucaugacucgaacaaagguguaacggcagcauguccucaugcuggagcaaaaagcuucuacaaaaauuuaauauggcuaguuaaaaaaggaaauucauacccaaagcucagcaaauccuacauuaaugauaaagggaaagaaguccucgugcuguggggcauucaccauccaucuacuacugcugaccaacaaagucucuaucagaaugcagaugcauauguuuuuguggggacaucaagauacagcaagaaguucaagccggaaauagcaauaagacccaaagugagggaucaagaagggagaaugaacuauuacuggacacuaguagagccgggagacaaaauaacauucgaagcaacuggaaaucuagugguaccgagauaugcauucgcaauggaaagaaaugcuggaucugguauuaucauuucagauacaccaguccacgauugcaauacaacuugucagacacccaagggggcuauaaacaccagccucccauuucagaauauacauccgaucacaauuggaaaauguccaaaauauguaaaaagcacaaaauugagacuggccacaggauugaggaaugucccgucuauucaaucuagaggccuauuuggggccauugccggcuucauugaagggggguggacagggaugguagauggaugguacgguuaucaccaucaaaaugagcaggggucaggauaugcagccgaccugaagagcacacagaaugccauugacaagauuacuaacaaaguaaauucuguuauugaaaagaugaauacacaguucacagcaguagguaaagaguucaaccaccuggaaaaaagaauagagaauuuaaauaaaaaaguugaugaugguuuccuggacauuuggacuuacaaugccgaacuguugguucuauuggaaaaugagagaacuuuggacuaccacgauucaaaugugaagaacuuguaugaaaagguaagaaaccaguuaaaaaacaaugcuaaggaaauuggaaacggcugcuuugaauuuuaccacaaaugcgauaacacgugcauggaaagugucaaaaauggaacuuaugacgacacaaaagacucagaggaagcaaaauuaaacagagaagaaauagaugggguaaagcuggaaucaacaaggauuuaccagauuuuggcgaucuauucaacugucgccaguucauugguacugguagucucccugggggcaaucaguuucuggaugugcucuaaugggucucuacaguguagaauauguauuuaa

SEQ ID NO: 40262 - RNA, 1701 nt, Artificial Sequence
  derived and/or modified CDS sequence (wt) from hemagglutinin__InfluenzaA__AFB77691
augaagacuaucauugcuuugagcuacauucuaugucugguuuucgcucaaaaacuuccuggaaaugacaacagcacggcaacgcugugccuugggcaccaugcaguaccaaacggaacgauagugaaaacaaucacgaaugaccaaauugaaguuacuaaugcuacugagcugguucagaauuccucaacaggugaaauaugcgacaguccucaucagauccuugauggagaaaacugcacacuaauagaugcucuauugggagacccucagugugauggcuuccaaaauaagaaaugggaccuuuuuguugaacgaagcaaagccuacagcaacuguuacccuuaugaugugccggauuaugccucccuuaggucacuaguugccucauccggcacacuggaguuuaacaaugaaagcuucaauuggacuggagucacucaaaacggaacaagcucugcuugcauaaggagaucuaauaauaguuucuuuaguagauugaauugguugacccacuuaaacuucaaauacccagcauugaacgugacuaugccaaacaaugaacaauuugaaaaauuguacauuugggggguucaccacccggguacggacaaggaccaaaucuuccuguaugcucaagcaucaggaagaaucacaguaucuaccaaaagaagccaacaagcuguaaucccgaauaucggaucuagacucagaguaaggaauaucccuagcagaauaagcaucuauuggacaauaguaaaaccgggagacauacuuuugauuaacagcacagggaaucuaaacgcgccuagggguuacuucaaaauacgaagugggaaaagcucaauaaugagaucagaugcacccauuggcaaaugcaauucugaaugcaucacuccaaauggaagcauucccaaugacaaaccauuccaaaauguaaacaggaucacauacggggccugucccagauauguuaagcaaaacacucugaaauuggcaacaggaaugcgaaauguaccagagaaacaaacuagaggcauauuuggcgcaauagcggguuucauagaaaaugguugggagggaaugguggaugguugguacgguuucaggcaucaaaauucugagggaagaggacaagcagcagaucucaaaagcacucaagcagcaaucgaucaaaucaaugggaagcugaauagauugaucgggaaaaccaacgagaaauuccaucagauugaaaaagaauucucagaagucgaagggaggauucaggaccuugagaaauauguugaggacacuaaaauagaucucuggucauauaacgcagagcugcuuguugcccuggagaaccaacauacaauugaucuaacugacucagaaaugaacaaacuguuugaaaaaacaaagaaccaacugagggaaaaugcugaggauaugggcaaugguuguuucaaaauauaccacaaaugugacaauaccugcauaggaucaaucagaaauggaacuuaugaccacgaugcauacagagaugaagcauuaaacaaccgguuccagaucaagggaguugagcugaagucaggguacaaagauuggauccuauggauuuccuuugccauaucauguuuuuugcuuuguguugcuuuguugggguucaucaugugggccugccaaaaaggcaacauuaggugcaacauuugcauuuga

SEQ ID NO: 40263 - RNA, 1701 nt, Artificial Sequence
  derived and/or modified CDS sequence (wt) from hemagglutinin__InfluenzaA__AFB77692
augaagacuaucauugcuuugagcuacauucuaugucugguuuucgcucaaaaacuuccuggaaaugacaacagcacggcaacgcugugccuugggcaccaugcaguaccaaacggaacgauagugaaaacaaucacgaaugaccaaauugaaguuacuaaugcuacugagcugguucagaauuccucaacaggugaaauaugcgacaguccucaucagauccuugauggagaaaacugcacacuaauagaugcucuauugggagacccucagugugauggcuuccaaaauaagaaaugggaccuuuuuguugaacgaagcaaagccuacagcaacuguuacccuuaugaugugccggauuaugccucccuuaggucacuaguugccucauccggcacacuggaguuuaacaaugaaagcuucaauuggacuggagucacucaaaacggaacaagcucugcuugcauaaggagaucuaauaauaguuucuuuaguagauugaauugguugacccacuuaaacuucaaauacccagcauugaacgugacuaugccaaacaaugaacaauuugacaaauuguacauuugggggguucaccacccggguacggacaaggaccaaaucuuccuguaugcucaagcaucaggaagaaucacaguaucuaccaaaagaagccaacaagcuguaaucccgaauaccggaucuagacccagaguaaggaauaucccuagcagaauaagcaucuauuggacaauaguaaaaccgggagacauacuuuugauuaacagcacagggaaucuaauugcuccuagggguuacuucaaaauacgaagugggaaaagcucaauaaugagaucagaugcacccauuggcaaaugcaauucugaaugcaucacuccaaauggaagcauucccaaugacaaaccauuccaaaauguaaacaggaucacauacggggccugucccagauauguuaagcaaaacacucugaaauuggcaacaggaaugcgaaauguaccagagaaacaaacuagaggcauauuuggcgcaauagcggguuucauagaaaaugguugggagggaaugguggaugguugguacgguuucaggcaucaaaauucugagggaagaggacaagcagcagaucucaaaagcacucaagcagcaaucgaucaaaucaaugggaagcugaauagauugaucgggaaaaccaacgagaaauuccaucagauugaaaaagaauucucagaagucgaagggagaauucaggaccuugagaaauauguugaggacacuaaaauagaucucuggucauacaacgcggagcuucuuguugcccuggagaaccaacauacaauugaucuaacugacucagaaaugaacaaacuguuugaaaaaacaaagaagcaacugagggaaaaugcugaggauaugggcaaugguuguuucaaaauauaccacaaaugugacaaugccugcauaggaucaaucagaaauggaacuuaugaccacgauguauacagagaugaagcauuaaacaaccgguuccagaucaagggaguugagcugaagucaggguacaaagauuggauccuauggauuuccuuugccauaucauguuuuuugcuuuguguugcuuuguugggguucaucaugugggccugccaaaaaggcaacauuaggugcaacauuugcauuuga

SEQ ID NO: 40264 - RNA, 1701 nt, Artificial Sequence
  derived and/or modified CDS sequence (wt) from hemagglutinin__InfluenzaA__AFB77693
augaagacuaucauugcuuugagcuacauucuaugucugguuuucgcucaaaaacuuccuggaaaugacaacagcacggcaacgcugugccuugggcaccaugcaguaccaaacggaacgauagugaaaacaaucacgaaugaccaaauugaaguuacuaaugcuacugagcugguucagaauuccucaacaggugaaauaugcgacaguccucaucagauccuugauggagaaaacugcacacuaauagaugcucuauugggagacccucagugugauggcuuccaaaauaagaaaugggaccuuuuuguugaacgaagcaaagccuacagcaacuguuacccuuaugaugugccggauuaugccucccuuaggucacuaguugccucauccggcacacuggaguuuaacaaugaaagcuucaauuggacuggagucacucaaaacggaacaagcucugcuugcauaaggagaucuaauaauaguuucuuuaguagauugaauugguugacccacuuaaacuucaaauacccagcauugaacgugacuaugccaaacaaugaacaauuugacaaauuguacauuugggggguucaccacccggguacggacaaggaccaaaucuuccuguaugcucaagcaucaggaagaaucacaguaucuaccaaaagaagccaacaagcuguaaucccgaauaucggaucuagacccagaguaaggaauaucccuagcagaauaagcaucuauuggacaauaguaaaaccgggagacauacuuuugauuaacagcacagggaaucuaauugcuccuagggguuacuucaaaauacgaagugggaaaagcucaauaaugagaucagaugcacccauuggcaaaugcaauucugaaugcaucacuccaaauggaagcauucccaaugacaaaccauuccaaaauguaaacaggaucacauacggggccugucccagauauguuaagcaaaacacucugaaauuggcaacaggaaugcgaaauguaccagagaaacaaacuagaggcauauuuggcgcaauagcggguuucauagaaaaugguugggagggaaugguggaugguugguacgguuucaggcaucaaaauucugagggaagaggacaagcagcagaucucaaaagcacucaagcagcaaucgaucaaaucaaugggaagcugaauagauugaucgggaaaaccaacgagaaauuccaucagauugaaaaagaauucucagaagucgaagggagaauucaggaccuugagaaauauguugaggacacuaaaauagaucucuggucauacaacgcggagcuucuuguugcccuggagaaccaacauacaauugaucuaacugacucagaaaugaacaaacuguuugaaaaaacaaagaagcaacugagggaaaaugcugaggauaugggcaaugguuguuucaaaauauaccacaaaugugacaaugccugcauaggaucaaucagaaauggaacuuaugaccacgauguauacagagaugaagcauuaaacaaccgguuccagaucaagggaguugagcugaagucaggguacaaagauuggauccuauggauuuccuuugccauaucauguuuuuugcuuuguguugcuuuguugggguucaucaugugggccugccaaaaaggcaacauuaggugcaacauuugcauuuga

SEQ ID NO: 40265 - RNA, 1701 nt, Artificial Sequence
  derived and/or modified CDS sequence (wt) from hemagglutinin__InfluenzaA__AFB77694
augaagacuaucauugcuuugagcuacauucuaugucugguuuucgcucaaaaacuuccuggaaaugacaacagcacggcaacgcugugccuugggcaccaugcaguaccaaacggaacgauagugaaaacaaucgcgaaugaccaaauugaaguuacuaaugcuacugagcugguucagaauuccucaacaggugaaauaugcgacaguccucaucagauccuugauggagaaaacugcacacuaauagaugcucuauugggagacccucagugugaugacuuccaaaauaagaaaugggaccuuuuuguugaacgaagcaaagccuacagcaacuguuacccuuaugaugugccggauuaugccucccuuaggucacuaguugccucauccggcacacuggaguuuaacaaugaaagcuucaauuggacuggagucacucaaaacggaacaagcucugcuugcauaaggagaucuaauaauaguuucuuuaguagauugaauugguugacccacuuaaacuucaaauacccagcauugaacgugacuaugccaaacaaugaacaauuugacaaauuguacauuugggggguucaccacccggguacggacaaggaccaaaucuuccuguaugcucaagcaucaggaaggaucacaguaucuaccaaaagaagccaacaagcuguaaucccgaauaucggaucuagacccagaguaaggaauaucccuagcagaauaagcaucuauuggacaauaguaaaaccgggagacauacuuuugauuaacagcacagggaaucuaauugcuccuagggguuacuucaaaauacgaagugggaaaagcucaauaaugagaucagaugcacccauuggcaaaugcaauucugaaugcaucacuccaaauggaagcauucccaaugacaaaccauuccaaaauguaaacaggaucacauacggggccugucccagauauguuaagcaaaacacucugaaauuggcaacaggaaugcgaaauguaccagagaaacaaacuagaggcauauuuggcgcaauagcggguuucauagaaaaugguugggagggaaugguggaugguugguacgguuucaggcaucaaaauucugagggaagaggacaagcagcagaucucaaaagcacucaagcagcaaucgaucaaaucaaugggaagcugaauagauugaucgggaaaaccaacgagaaauuccaucagauugaaaaagaauucucagaagucgaagggagaauucaggaccuugagaaauauguugaggacacuaaaauagaucucuggucauacaacgcggagcuucuuguugcccuggagaaccaacauacaauugaucuaacugacucagaaaugaacaaacuguuugaaaaaacaaagaaacaacugagggaaaaugcugaggauaugggcaaugguuguuucaaaauauaccacaaaugugacaauaccugcauaggaucaaucagaaauggaacuuaugaccacgauguauacagagaugaagcauuaaacaaccgguuccagaucaagggaguugagcugaagucaggguacaaagauuggauccuauggauuuccuuugccauaucauguuuuuugcuuuguguugcuuuguugggguucaucaugugggccugccaaaaaggcaacauuaggugcaacauuugcauuuga

SEQ ID NO: 40266 - RNA, 1701 nt, Artificial Sequence
  derived and/or modified CDS sequence (wt) from hemagglutinin__InfluenzaA__AFB77695
augaagacuaucauugcuuugagcuacauucuaugucugguuuucgcucaaaaacuuccuggaaaugacaacagcacggcaacgcugugccuugggcaccaugcaguaccaaacggaacgauagugaaaacaaucacgaaugaccaaauugaaguuacuaaugcuacugagcugguucagaauuccucaacaggugaaauaugcgacaguccucaucagauccuugauggagaaaacugcacacuaauagaugcucuauugggagacccucagugugaugacuuccaaaauaagaaaugggaccuuuuuguugaacgaagcaaagccuacagcaacuguuacccuuaugaugugccggauuaugccucccuuaggucacuaguugccucauccggcacacuggaguuuaacaaugaaagcuucaauuggacuggagucacucaaaacggaacaagcucugcuugcauaaggagaucuaauaauaguuucuuuaguagauugaauugguugacccacuuaaacuucaaauacccagcauugaacgugacuaugccaaacaaugaacaauuugacaaauuguacauuugggggguucaccacccggguacggacaaggaccaaaucuuccuguaugcucaagcaucaggaaggaucacaguaucuaccaaaagaagccaacaagcuguaaucccgaauaucggaucuagacccagaguaaggaauaucccuagcagaauaagcaucuauuggacaauaguaaaaccgggagacauacuuuugauuaacagcacagggaaucuaauugcuccuagggguuacuucaaaauacgaagugggaaaagcucaauaaugagaucagaugcacccauuggcaaaugcaauucugaaugcaucacuccaaauggaagcauucccaaugacaaaccauuccaaaauguaaacaggaucacauacggggccugucccagauauguuaagcaaaacacucugaaauuggcaacaggaaugcgaaauguaccagagaaacaaacuagaggcauauuuggcgcaauagcggguuucauagaaaaugguugggagggaaugguggaugguugguacgguuucaggcaucaaaauucugagggaagaggacaagcagcagaucucaaaagcacucaagcagcaaucgaucaaaucaaugggaagcugaauagauugaucgggaaaaccaacgagaaauuccaucagauugaaaaagaauucucagaagucgaagggagaauucaggaccuugagaaauauguugaggacacuaaaauagaucucuggucauacaacgcggagcuucuuguugcccuggagaaccaacauacaauugaucuaacugacucagaaaugaacaaacuguuugaaaaaacaaagaagcaacugagggaaaaugcugaggauaugggcaaugguuguuucaaaauauaccacaaaugugacaaugccugcauaggaucaaucagaaauggaacuuaugaccacgauguauacagagaugaagcauuaaacaaccgguuccagaucaagggaguugagcugaagucaggguacaaagauuggauccuauggauuuccuuugccauaucauguuuuuugcuuuguguugcuuuguugggguucaucaugugggccugccaaaaaggcaacauuaggugcaacauuugcauuuga

SEQ ID NO: 40267 - RNA, 1701 nt, Artificial Sequence
  derived and/or modified CDS sequence (wt) from hemagglutinin__InfluenzaA__AFB78126
augaagacuaucauugcuuugagcuacauuuuaugucugguuuucgcucaaaaacuucccggaaaugacaacagcacggcaacgcugugccuggggcaccaugcagugucaaacggaacgcuagugaaaacaaucacgaaugaccaaauugaagugacuaaugcuacugagcugguucagaguuccucaacagguagaauaugcgacaguccucaccaaauccuugauggagaaaacugcacacuaauagaugcucuauugggagacccucauugugauggcuuccaaaauaaggaaugggaccuuuuuguugaacgcagcaaagccuacagcaacuguuacccuuaugaugugccggauuaugccucccuuaggucacuaguugccucauccggcacacuggaguuuaacaaugaaagcuucaauuggacuggagucgcucaggauggaacaagcucugcuugcaaaaggagaucuaauaaaaguuucuuuaguagauugaauugguugcaccaauuaaaauacaaauauccagcacugaacgugacuaugccaaacaaugaaaaauuugacaaauuguacauuugggggguucaccacccgaguacggacagugaccaaaucagcauauaugcucaagcaucagggagagucacagucucuaccaaaagaagccaacaaacuguaaucccgaauaucggaucuagccccuggguaaggggugccuccagcagaauaagcaucuauuggacaauaguaaaaccgggagacauacuuuugauuaacagcacagggaaucuaauugcuccucgggguuacuucaaaauacgaagugggaaaagcucaauaaugaggucagaugcacccauuggcaaaugcaauucugaaugcaucacuccaaauggaagcauucccaaugacaaaccauuucaaaauguaaacaggaucacauauggggccugucccagauauguuaagcaaaacacucugaaauuggcaacagggaugcggaauguaccagagaaacaaacuagaggcauauucggcgcaaucgcggguuucauagaaaaugguugggagggaaugguggacgguugguacgguuucaggcaucaaaauucugagggcacaggacaagcagcagaucuuaaaagcacucaagcagcaaccaaccaaaucaacgggaaacugaauagguuaaucgagaaaacgaacgagaaauuccaucaaauugaaaaagaauucucagaaguagaagggagaauucaggaccucgagaaauauguugaggacacuaaaauagaucucuggucguacaacgcggagcuucuuguugcccuggagaaccaacauacaauugaucuaacugacucagaaaugaacaaacuguuugaaagaacaaagaagcaacugagggaaaaugcugaggauaugggcaaugguuguuucaaaauauaccacaaaugugacaaugccugcauagggucaaucagaaauggaacuuaugaccaugauguauacagagacgaagcauuaaacaaccgguuccagaucaaagguguugagcugaagucaggauacaaagauuggauccuauggauuuccuuugccauaucaugcuuuuugcuuuguguuguuuugcugggguucaucaugugggccugccaaaaaggcaacauuaggugcaacauuugcauuuga

SEQ ID NO: 40268 - RNA, 1701 nt, Artificial Sequence
  derived and/or modified CDS sequence (wt) from hemagglutinin__InfluenzaA__AFC34056
augaagacuaucauugcuuugagcuacauucuaugucugguuuucgcucaaaaacuuccuggaaaugacaacagcacugcaacgcugugccuugggcaccaugcaguaccaaacggaacgauagugaaaacaaucacgaaugaccaaauugaaguuacuaaugcuacugagcugguucagaguuccucaacaggugaaauaugcgacaguccucaucagauccuugauggagaaaacugcacacuaauagaugcucuauugggagacccucagugugauggcuuccaaaauaagaagugggaccuuuuuguugaacgaagcaaagccuacagcaacuguuacccuuaugaugugccggauuaugccucccuuaggucacuaguugccucauccggcacacuggaguuuaacaaugaaagcuucaauuggacuggagucacucaaaacggaacaagcucugcuugcauaaggagaucuaauaguaguuucuuuaguagauugaauugguugacccacuuaaacuucaaauacccagcauugaacgugacuaugccaaacaaugaacaauuugacaaauuguacauuugggggguucaccacccggguacggacaaggaccaaaucuuccuguaugcucaaucaucaggaagaaucacaguaucuaccaaaagaagccaacaagcuguaaucccgaauaucggaucuagacccagaauaaggaauaucccuagcagaauaagcaucuauuggacaauaguaaaaccgggagacauacuuuugauuaacagcacagggaaucuaauugcuccuagggguuacuucaaaauacgaagugggaaaagcucaauaaugagaucagaugcacccauuggcaaaugcaauucugaaugcaucacuccaaauggaagcauucccaaugacaaaccauuccaaaauguaaacaggaucacauacggggccugucccagauauguuaagcaaagaacucugaaauuggcaacaggaaugcgaaauguaccagagaaacaaacuagaggcauauuuggcgcaauagcggguuucauagaaaaugguugggagggaaugguggaugguugguacgguuucaggcaucaaaauucugagggaagaggacaagcagcagaucucaaaagcacucaagcagcaaucgaucaaaucaaugggaagcugaaucgauugaucgggaaaaccaacgagaaauuccaucagauugaaaaagaauucucagaagucgaagggagaauucaggaccuugagaaauauguugaggacacuaaaauagaucucuggucauacaacgcggagcuucuuguugcccuggagaaccagcauacaauugaucuaacugacucagaaaugaacaaacuguuugaaaaaacaaagaagcaacugagggaaaaugcugaggauaugggcaaugguuguuucaaaauauaccacaaaugugacaaugccugcauaggaucaaucagaaauggaacuuauaaccacgauguauacagagaugaagcauuaaacaaccgguuccagaucaagggaguugagcugaagucaggguacaaagauuggauccuauggauuuccuuugccauaucauguuuuuugcuuuguguugcuuuguugggguucaucaugugggccugccaaaagggcaacauuaggugcaacauuugcauuuga

SEQ ID NO: 40269 - RNA, 1701 nt, Artificial Sequence; identical to SEQ ID NO: 40268
  derived and/or modified CDS sequence (wt) from hemagglutinin__InfluenzaA__AFC34057

SEQ ID NO: 40270 - RNA, 1701 nt, Artificial Sequence
  derived and/or modified CDS sequence (wt) from hemagglutinin__InfluenzaA__AFD32426
augaaggcaaaccuacugguccuguuaagugcacuugcagcugcagaugcagacacaauauguauaggcuaccaugcgaacaauucaaccgacacuguugacacaguacucgagaagaaugugacagugacacacucuguuaaccugcucgaagacagccacaacggaaaacuauguaaacuaagagggguagccccauugcauuuggguaaauguaacauugcuggccggauccugggaaauccagagugugaaucacucuccacagcaagcucaugguccuacauuguggaaacaccuaguucagacaauggaacguguuacccaggagauuucaucgauuaugaggagcuaagagagcaauugagcucagugucaucauuugaaagguuugagauauuccccaagacaaguucauggcccaaucaugacucgaacaaagguguaacggcagcauguccucaugcuggagcaaaaagcuucuacaaaaauuuaauauggcuaguuaaaaaaggaaauucauacccaaagcucagcaaauccuacauuaaugauaaagggaaagaaguccucgugcuauggggcauucaccauccaucuacuagugcugaccaacaaagucucuaucagaaugcagauacauauguuuuuguggggucaucaagauacagcaagaaguucaagccggaaauagcaauaagacccaaagugagggaucaagaagggagaaugaacuauuacuggacacuaguagagccgggagacaaaauaacauucgaagcaacuggaaaucuagugguaccgagauaugcauucgcaauggaaagaaaugcuggaucugguauuaucauuucagauacaccaguccacgauuguaacacgaagugucaaacaccccugggagcuauaaacagcagucucccuuaccagaauauacacccagucacaauaggagagugcccaaaauacgucaggagugccaaauugaggaugguuacaggacuaaggaacacuccguccauucaauccagaggucuauuuggagccauugccgguuuuauugaagggggauggacuggaaugauagauggaugguaugguuaucaucaucagaaugaacagggaucaggcuaugcagcggaucaaaaaagcacacaaaaugccauuaacgggauuacaaacaaggugaacacuguuaucgagaaaaugaacauucaauucacagcuguggguaaagaauucaacaaauuagaaaaaaggauggaaaauuuaaauaaaaaaguugaugauggauuucuggacauuuggacauauaaugcagaauuguuaguucuacuggaaaaugaaaggacucuggauuuccaugacucaaaugugaagaaucuguaugagaaaguaaaaagccaauuaaagaauaaugccaaagaaaucggaaauggauguuuugaguucuaccacaagugugacaaugaaugcauggaaaguguaagaaaugggacuuaugauuaucccaaauauucagaagagucaaaguugaacagggaaaagguagauggagugaaauuggaaucaauggggaucuaucagauucuggcgaucuacucaacugucgccaguucacuggugcuuuuggucucccugggggcaaucaguuucuggauguguucuaauggaucuuugcagugcagaauaugcaucuga

SEQ ID NO: 40271 - RNA, 1698 nt, Artificial Sequence
  derived and/or modified CDS sequence (wt) from hemagglutinin__InfluenzaA__AFD32427
augaaggcaaaccuacugguccuguuaagugcacuugcagcugcagaugcagacacaauauguauaggcuaccaugcgaacaauucaaccgacacuguugacacaguacucgagaagaaugugacagugacacacucuguuaaccugcucgaagacagccacaacggaaaacuaugugaucuagauggagugaagccucuaauuuugagagauuguagcguagcuggauggcuccucggaaacccaaugugugacgaauucaucaaugugccggaauggucuuacauaguggagaaggccaauccagucaaugaccucuguuacccaggggauuucaaugacuaugaagaauugaaacaccuauugagcagaauaaaccauuuugagaaaauucagaucauccccaaaaguucuugguccagucaugaagccucauuaggggugagcucagcauguccauaccagggaaaguccuccuuuuucagaaaugugguauggcuuaucaaaaagaacaguacauacccaacaauaaagaggagcuacaauaauaccaaccaagaagaucuuuugguacugugggggauucaccauccuaaugaugcggcagagcagacaaagcucuaucaaaacccaaccaccuauauuuccguugggacaucaacacuaaaccagagauugguaccaagaauagcuacuagauccaaaguaaacgggcaaaguggaaggauggaguucuucuggacaauuuuaaagccgaaugaugcaaucaacuucgagaguaauggaaauuucauugcuccagaauaugcauacaaaauugucaagaaaggggacucaacaauuaugaaaagugaauuggaauaugguaacuguaacacgaagugucaaacaccccugggagcuauaaacagcagucucccuuaccagaauauacacccagucacaauaggagagugcccaaaauacgucaggagugccaaauugaggaugguuacaggacuaaggaacacuccguccauucaauccagaggucuauuuggagccauugccgguuuuauugaagggggauggacuggaaugauagauggaugguaugguuaucaucaucagaaugaacagggaucaggcuaugcagcggaucaaaaaagcacacaaaaugccauuaacgggauuacaaacaaggugaacacuguuaucgagaaaaugaacauucaauucacagcuguggguaaagaauucaacaaauuagaaaaaaggauggaaaauuuaaauaaaaaaguugaugauggauuucuggacauuuggacauauaaugcagaauuguuaguucuacuggaaaaugaaaggacucuggauuuccaugacucaaaugugaagaaucuguaugagaaaguaaaaagccaauuaaagaauaaugccaaagaaaucggaaauggauguuuugaguucuaccacaagugugacaaugaaugcauggaaaguguaagaaaugggacuuaugauuaucccaaauauucagaagagucaaaguugaacagggaaaagguagauggagugaaauuggaaucaauggggaucuaucagauucuggcgaucuacucaacugucgccaguucacuggugcuuuuggucucccugggggcaaucaguuucuggauguguucuaauggaucuuugcagugcagaauaugcaucuga

SEQ ID NO: 40272 - RNA, 1722 nt, Artificial Sequence
  derived and/or modified CDS sequence (wt) from hemagglutinin__InfluenzaA__AFD32428
augaagacuaucauugcuuugagcuacauucuaugucugguuuucgcucaaaaacuuccuggaaaugacaacagcacggcaacgcugugccuugggcaccaugcaguaccaaacggaacgauagugaaaacaaucacgaaugaccaaauugaaguuacuaaugcuacugagcugguucagaguuccucaacaggugaaauaugcgaucuagauggagugaagccucuaauuuugagagauuguagcguagcuggauggcuccucggaaacccaaugugugacgaauucaucaaugugccggaauggucuuacauaguggagaaggccaauccagucaaugaccucuguuacccaggggauuucaaugacuaugaagaauugaaacaccuauugagcagaauaaaccauuuugagaaaauucagaucauccccaaaaguucuugguccagucaugaagccucauuaggggugagcucagcauguccauaccagggaaaguccuccuuuuucagaaaugugguauggcuuaucaaaaagaacaguacauacccaacaauaaagaggagcuacaauaauaccaaccaagaagaucuuuugguacugugggggauucaccauccuaaugaugcggcagagcagacaaagcucuaucaaaacccaaccaccuauauuuccguugggacaucaacacuaaaccagagauugguaccaagaauagcuacuagauccaaaguaaacgggcaaaguggaaggauggaguucuucuggacaauuuuaaagccgaaugaugcaaucaacuucgagaguaauggaaauuucauugcuccagaauaugcauacaaaauugucaagaaaggggacucaacaauuaugaaaagugaauuggaauaugguaacugcaauucugaaugcaucacuccaaauggaagcauucccaaugacaaaccauuccaaaauguaaacaggaucacauacggggccugucccagauauguuaagcaaaacacucugaaauuggcaacagggaugcgaaauguaccagagaaacaaacuagaggcauauuuggcgcaaucgcggguuucauagaaaaugguugggagggaaugguggaugguugguacgguuucaggcaucaaaauucugagggaagaggacaagcagcagaucucaaaagcacucaagcagcaaucgaucaaaucaaugggaagcugaauagauugaucgggaaaaccaacgagaaauuccaucagauugaaaaagaauucucagaagucgaagggagaauucaggaccuugagaaauauguugaggacacuaaaauagaucucuggucauacaacgcggagcuucuuguugcccuggagaaccaacauacaauugaucuaacugacucagaaaugaacaaacuguuugaaaaaacaaagaagcaacugagggaaaaugcugaggauaugggcaaugguuguuucaaaauauaccacaaaugugacaaugccugcauaggaucaaucagaaauggaacuuaugaccacgauguauacagagaugaagcauuaaacaaccgguuucagaucaagggaguugagcugaagucaggguacaaagauuggauccuauggauuuccuuugccauaucauguuuuuugcuuuguguugcuuuguugggguucaucaugugggccugccaaaaaggcaacauuaggugcaacauuugcauuuga

SEQ ID NO: 40273 - RNA, 1704 nt, Artificial Sequence
  derived and/or modified CDS sequence (wt) from hemagglutinin__InfluenzaA__AFD32429
augaagacuaucauugcuuugagcuacauucuaugucugguuuucgcucaaaaacuuccuggaaaugacaacagcacggcaacgcugugccuugggcaccaugcaguaccaaacggaacgauagugaaaacaaucacgaaugaccaaauugaaguuacuaaugcuacugagcugguucagaguuccucaacaggugaaauaugcacucaagggaaaaggccaacagaucugggacaauguggacuucuaggaacccuaauaggaccuccccaaugcgaucaauuucuggaguuugacgcugauuugauaauugaacgaagagaaggaaccgaugugugcuaucccgggaaguucacaaaugaagaaucacugaggcagauccuucgagggucaggaggaauugauaaggagucaauggguuucaccuauaguggaauaagaaccaauggggcaacgagugccuguagaagaucagguucuucuuucuaugcggagaugaagugguuacugucgaauucagacaaugcggaauuuccccaaaugacuaagucguauagaaaucccaggaacaaaccagcucugauaauuuggggagugcaucacucuggaucggcuacugagcagaccaaacucuauggaaguggaaacaaguugauaacaguaggaagcucgaaauaccagcaaucauucacuccaaguccgggagcacggccacaggugaauggacaaucaggaaggauugauuuucacuggcuacuccuugaucccaaugacacagugaccuucacuuucaauggggcauucauagcuccugacagggcaaguuucuuuagaggagaaucgcuaggaguccagagugauguuccuuuggauucugguugcaauucugaaugcaucacuccaaauggaagcauucccaaugacaaaccauuccaaaauguaaacaggaucacauacggggccugucccagauauguuaagcaaaacacucugaaauuggcaacagggaugcgaaauguaccagagaaacaaacuagaggcauauuuggcgcaaucgcggguuucauagaaaaugguugggagggaaugguggaugguugguacgguuucaggcaucaaaauucugagggaagaggacaagcagcagaucucaaaagcacucaagcagcaaucgaucaaaucaaugggaagcugaauagauugaucgggaaaaccaacgagaaauuccaucagauugaaaaagaauucucagaagucgaagggagaauucaggaccuugagaaauauguugaggacacuaaaauagaucucuggucauacaacgcggagcuucuuguugcccuggagaaccaacauacaauugaucuaacugacucagaaaugaacaaacuguuugaaaaaacaaagaagcaacugagggaaaaugcugaggauaugggcaaugguuguuucaaaauauaccacaaaugugacaaugccugcauaggaucaaucagaaauggaacuuaugaccacgauguauacagagaugaagcauuaaacaaccgguuucagaucaagggaguugagcugaagucaggguacaaagauuggauccuauggauuuccuuugccauaucauguuuuuugcuuuguguugcuuuguugggguucaucaugugggccugccaaaaaggcaacauuaggugcaacauuugcauuuga

SEQ ID NO: 40274 - RNA, 1701 nt, Artificial Sequence; identical to SEQ ID NO: 33773
  derived and/or modified CDS sequence (wt) from hemagglutinin__InfluenzaA__AFD63527

SEQ ID NO: 40275 - RNA, 1701 nt, Artificial Sequence
  derived and/or modified CDS sequence (wt) from hemagglutinin__InfluenzaA__AFD63538
augaagacuaucauugcuuugagcuacauucuaugucugguuuucgcucaaaaacuucccggaaaugacaacagcacggcaacgcugugccuugggcaccaugcaguaccaaacggaacgauagugaaaacaaucacgaaugaccaaauugaaguuacuaaugcuacugagcugguucagaguuccucaacagguggaauaugcgacaguccucaucagauccuugauggagaaaacugcacacuaauagaugcucuauugggagacccucagugugauggcuuccaaaauaagaaaugggaccuuuuuguugaacgcagcaaagccuacagcaacuguuacccuuaugaugugccggauuaugccucccuuaggucaauaguugccucauccggcacacuggaguuuaacaaugaaagcuucaacuggacuggagucacucagaauggaacaagcucugcuugcaaaaggaaaucuaauaaaaguuucuuuaguagauugaauugguugacccacuuaaaauacaaauacccagcauugaacgugacuaugccaaacaaugaaaaauuugacaaauuguacauuugggggguucaccacccggguacggacaaugaccaaaucagccuguaugcucaagcaucaggaagaaucacagucucuaccaaaagaagccaacaaacuguaaucccgaauaucggaucuagacccaggguaagggacgucuccagcagaauaagcaucuauuggacaauaguaaaaccgggagacauacuuuugauuaacagcacagggaaucuaauugcuccucgggguuacuucaaaauacgaagugggaaaagcucaauaaugagaucagaugcacccauuggcaaaugcaauucugaaugcaucacuccaaauggaagcauucccaaugacaaaccauuucaaaauguaaacaggaucacauauggggccugucccagauauguuaagcaaaacacucugaaauuggcaacagggaugcgaaauguaccagagaaacaaacuagaggcauauuuggcgcaaucgcggguuucauagaaaaugguugggagggaaugguggacgguugguacgguuucaggcaucaaaauucugagggcacaggacaagcagcagaucucaaaagcacucaagcagcaaucaaccaaaucaaugggaaacugaauagguuaaucgggaaaacaaacgagaaauuccaucagauugaaaaagaauucucagaaguagaggggagaauucaggaccucgagaaauauguugaggacacuaaaauagaucucuggucauacaacgcggagcuucuuguugcccuggagaaccaacauacaauugaucuaacugacucagaaaugaacaaacuguuugaaagaacaaagaagcaacugagggaaaaugcugaggauaugggcaaugguuguuucaaaauauaccacaaaugugacaaugccugcauagggucaaucagaaauggaacuuaugaccaugauguauacagagaugaagcauuaaacaaccgguaccagaucaaagguguugagcugaagucaggauacaaagauuggauccuauggauuuccuuugccauaucauguuuuuugcuuuguguugcuuuguugggguucaucaugugggccugccaaaaaggcaacauuaggugcaacauuugcauuuga

SEQ ID NO: 40276 - RNA, 1701 nt, Artificial Sequence
  derived and/or modified CDS sequence (wt) from hemagglutinin__InfluenzaA__AFD63549
augaagacuaucauugcuuugagcuacauucuaugucugguuuucgcucaaaaacuucccggaaaugacaacagcacggcaacgcugugccuugggcaccaugcaguaccaaacggaacgauagugaaaacaaucacgaaugaccaaauugaaguuacuaaugcuacugagcugguucagauuuccucaacagguggaauaugcgacaguccucaucagauccuugauggagaaaacugcacacuaauagaugcucuauugggagacccucagugugauggcuuccaaaauaagaaaugggaccuuuuuguugaacgcagcaaagccuacagcaacuguuacccuuaugaugugccggauuaugccucccuuaggucacuaguugccucauccggcacacuggaguuuaacaaugaaagcuucgauuggacuggagucacucagaauggaacaagcucugcuugcaaaaggagaucuaauaaaaguuucuuuaguagauugaauugguugacccacuuaaaauacaaauacccagcauugaacgugacuaugccaaacaaugaaaaauuugacaaauuguacauuugggggguucaccacccggguacggacaaugaccaaaucagccuauaugcucaagcaucaggaagaaucacagucucuaccaaaagaagccaacaaacuguaaucccgaauaucggaucuagacccaggguaagggaugucuccagccgaauaagcaucuauuggacaauaguaaaaccgggagacauacuuuugauuaacagcacagggaaucuaauugcuccucgggguuacuucaaaauacgaagugggaaaagcucaauaaugagaucagaugcacccauuggcaaaugcaauucugaaugcaucacuccaaauggaagcauucccaaugacaaaccauuucaaaauguaaacaggaucacauauggggccugucccagauauguuaagcaaaacacucugaaauuggcaacagggaugcgaaauguaccagagaaacaaacuagaggcauauuuggcgcaaucgcggguuucauagaaaaugguugggagggaaugguggacgguugguacgguuucaggcaucaaaauucugagggcacaggacaagcagcagaucucaaaagcacucaagcagcaaucaaccaaaucaaugggaaacugaauagguuaaucgggaaaacaaacgagaaauuccaucagauugaaaaagaauucucggaaguagaaggaagaauucaggaccucgagaaauauguugaggacacuaaaauagaucucuggucauacaacgcggagcuucuuguugcccuggagaaccaacauacaauugaucuaacugacucagaaaugaacaaacuguuugaaagaacaaagaagcaacugagggaaaaugcugaggauaugggcaaugguuguuucaaaauauaccacaaaugugacaaugccugcauagggucaaucagaaauggaacuuaugaccaugauguguacagagaugaagcauuaaacaaccgguuccagaucaaagguguugagcugaagucaggauacaaagauuggauccuauggauuuccuuugccauaucauguuuuuugcuuuguguugcuuuguugggguucaucaugugggccugccaaaaaggcaacauuaggugcaacauuugcauuuga

SEQ ID NO: 40277 - RNA, 1701 nt, Artificial Sequence
  derived and/or modified CDS sequence (wt) from hemagglutinin__InfluenzaA__AFD63571
augaagacuaucauugcuuugagcuacauucuaugucugguuuucgcucaaaaacuucccggaaaugacaacagcacggcaacgcugugccuugggcaccaugcaguaccaaacggaacgauagugaaaacaaucacgaaugaccaaauugaaguuacuaaugcuacugagcugguucagauuuccucaacagguggaauaugcgacaguccucaucagauccuugauggagaaaacugcacacuaauagaugcucuauugggagacccucagugugauggcuuccaaaauaagaaaugggaccuuuuuguugaacgcagcaaagccuacagcaacuguuacccuuaugaugugccggauuaugccucccuuaggucacuaguugccucauccggcacacuggaguuuaacaaugaaagcuucgauuggacuggagucacucagaauggaacaagcucugcuugcaaaaggagaucuaauaaaaguuucuuuaguagauugaauugguugacccacuuaaaauacaaauacccagcauugaacgugacuaugccaaacaaugaaaaauuugacaaauuguacauuugggggguucaccacccggguacggacagugaccaaaucagccuauaugcucaagcaucaggaagaaucacagucucuaccaaaagaagccaacaaacuguaaucccgaauaucggaucuagacccaggguaagggaugucuccagccgaauaagcaucuauuggacaauaguaaaaccgggagacauacuuuugauuaacagcacagggaaucuaauugcuccucgggguuacuucaaaauacgaagugggaaaagcucaauaaugagaucagaugcacccauuggcaaaugcaauucugaaugcaucacuccaaauggaagcauucccaaugacaaaccauuucaaaauguaaacaggaucacauauggggccugucccagauauguuaagcaaaacacucugaaauuggcaacagggaugcgaaauguaccagagaaacaaacuagaggcauauuuggcgcaaucgcggguuucauagaaaaugguugggagggaaugguggacgguugguacgguuucaggcaucaaaauucugagggcacaggacaagcagcagaucucaaaagcacucaagcagcaaucaaccaaaucaaugggaaacugaauagguuaaucgggaaaacaaacgagaaauuccaucagauugaaaaagaauucucggaaguagaagggagaauucaggaccucgagaaauauguugaggacacuaaaauagaucucuggucauacaacgcggagcuucuuguugcccuggagaaccaacauacaauugaucuaacugacucagaaaugaacaaacuguuugaaagaacaaagaagcaacugagggaaaaugcugaggauaugggcaaugguuguuucaaaauauaccacaaaugugacaaugccugcauagggucaaucagaaauggaacuuaugaccaugauguguacagagaugaagcauuaaacaaccgguuccagaucaaagguguugagcugaagucaggauacaaagauuggauccuauggauuuccuuugccauaucauguuuuuugcuuuguguugcuuuguugggguucaucaugugggccugccaaaaaggcaacauuaggugcaacauuugcauuuga

SEQ ID NO: 40278 - RNA, 1701 nt, Artificial Sequence
  derived and/or modified CDS sequence (wt) from hemagglutinin__InfluenzaA__AFD63615
augaagacuaucauugcuuugagcuacauucuaugucugguuuucgcucaaaaacuucccggaaaugacaacagcacggcaacgcugugccuugggcaccaugcaguaccaaacggaacgauagugaaaacaaucacgaaugaccaaauugaaguuacuaaugcuacugagcugguucagaguuccucaacagguggaauaugcgacaguccucaucagauccuugauggagaaaacugcacacuaauagaugcucuauugggagacccucagugugauggcuuccaaaauaagaaaugggaccuuuuuguugaacgcagcaaagccuacagcaacuguuacccuuaugaugugccggauuaugccucccuuaggucacuaguugccucauccggcacacuggaguuuaacaaugaaagcuucaacuggacuggagucacucagaauggaacaagcucugcuugcaaaaggaaaucuaauaaaaguuucuuuaguagauugaauugguugacccacuuaaaauacaaauacccagcauugaacgugacuaugccaaacaaugaaaaauuugacaaauuguacauuugggggguucaccacccggguacggacaaugaccaaaucagccuauaugcucaagcaucaggaagaaucacagucucuaccaaaagaagccaacaaacuguaaucccgaauaucggaucuagacccaggguaagggacgucuccagcagaauaagcaucuauuggacaauaguaaaaccgggagacauacuuuugauuaacagcacagggaaucuaauugcuccucgggguuacuucaaaauacgaagugggaaaagcucaauaaugagaucagaugcacccauuggcaaaugcaauucugaaugcaucacuccaaauggaagcauucccaaugacaaaccauuucaaaauguaaacaggaucacauauggggccugucccagauauguuaagcaaaacacucugaaauuggcaacagggaugcgaaauguaccagagaaacaaacuagaggcauauuuggcgcaaucgcggguuucauagaaaaugguugggagggaaugguggacgguugguacgguuucaggcaucaaaauucugagggcacaggacaagcagcagaucucaaaagcacucaagcagcaaucaaccaaaucaaugggaaacugaauagguuaaucgggaaaacaaacgagaaauuccaucagauugaaaaagaauucucagaaguagaggagagaauucaggaccucgagaaauauguugaggacacuaaaauagaucucuggucauacaacgcggagcuucuuguugcccuggagaaccaacauacaauugaucuaacugacucagaaaugaacaaacuguuugaaagaacaaagaagcaacugagggaaaaugcugaggauaugggcaaugguuguuucaaaauauaccacaaaugugacaaugccugcauagggucaaucagaaauggaacuuaugaccaugauguauacagagaugaagcauuaaacaaccgguuccagaucaaagguguugagcugaagucaggauacaaagauuggauccuauggauuuccuuugccauaucauguuuuuugcuuuguguugcuuuguugggguucaucaugugggccugccaaaaaggcaacauuaggugcaacauuugcauuuga

SEQ ID NO: 40279 - RNA, 1701 nt, Artificial Sequence
  derived and/or modified CDS sequence (wt) from hemagglutinin__InfluenzaA__AFD63626
augaagacuaucauugcuuugagcuacauucuaugucugguuuucgcucaaaaacuucccggaaaugacaacagcacggcaacgcugugccuugggcaccaugcaguaccaaacggaacgauagugaaaacaaucacgaaugaccaaauugaaguuacuaaugcuacugagcugguucagauuuccucaacagguggaauaugcgacaguccucaucagauccuugauggagaaaacugcacacuaauagaugcucuauugggagacccucagugugauggcuuccaaaauaagaaaugggaccuuuuuguugaacgcagcaaagccuacagcaacuguuacccuuaugaugugccggauuaugccucccuuaggucacuaguugccucauccggcacacuggaguuuaacaaugaaagcuucgauuggacuggagucacucagaauggaacaagcucugcuugcaaaaggagaucuaauaaaaguuucuuuaguagauugaauugguugacccacuuaaaauacaaauacccagcauugaacgugacuaugccaaacaaugaaaaauuugacaaauuguacauuugggggguucaccacccggguacggacagugaccaaaucagccuauaugcucaagcaucaggaagaaucacagucucuaccaaaagaagccaacaaacuguaaucccgaauaucggaucuagacccaggguaagggauaucuccagccgaauaagcaucuauuggacaauaguaaaaccgggagacauacuuuugauuaacagcacagggaaucuaauugcuccucgggguuacuucaaaauacgaagugggaaaagcucaauaaugagaucagaugcacccauuggcaaaugcaauucugaaugcaucacuccaaauggaagcauucccaaugacaaaccauuucaaaauguaaacaggaucacauauggggccugucccagauauguuaagcaaaacacucugaaauuggcaacagggaugcgaaauguaccagagaaacaaacuagaggcauauuuggcgcaaucgcggguuucauagaaaaugguugggagggaaugguggacgguugguacgguuucaggcaucaaaauucugagggcacaggacaagcagcagaucucaaaagcacucaagcagcaaucaaccaaaucaaugggaaacugaauagguuaaucgggaaaacaaacgagaaauuccaucagauugaaaaagaauucucggaaguagaagggagaauucaggaccucgagaaauauguugaggacacuaaaauagaucucuggucauacaacgcggagcuucuuguugcccuggagaaccaacauacaauugaucuaacugacucagaaaugaacaaacuguuugaaagaacaaagaagcaacugagggaaaaugcugaggauaugggcaaugguuguuucaaaauauaccacaaaugugacaaugccugcauagggucaaucagaaauggaacuuaugaccaugauguguacagagaugaagcauuaaacaaccgguuccagaucaaagguguugagcugaagucaggauacaaagauuggauccuauggauuuccuuugccauaucauguuuuuugcuuuguguugcuuuguugggguucaucaugugggccugccaaaaaggcaacauuaggugcaacauuugcauuuga

SEQ ID NO: 40280 - RNA, 1701 nt, Artificial Sequence
  derived and/or modified CDS sequence (wt) from hemagglutinin__InfluenzaA__AFD63637
augaagacuaucauugcuuugagcuacauucuaugucugguuuucgcucaaaaacuucccggaaaugacaacagcacggcaacgcugugccuugggcaccaugcaguaccaaacggaacgauagugaaaacaaucacgaaugaccaaauugaaguuacuaaugcuacugagcugguucagauuuccucaacagguggaauaugcgacaguccucaucagauccuugauggagaaaacugcacacuaauagaugcucuauugggagacccucagugugauggcuuccaaaauaagaaaugggaccuuuuuguugaacgcagcaaagccuacagcaacuguuacccuuaugaugugccggauuaugccucccuuaggucacuaguugccucauccggcacacuggaguuuaacaaugaaagcuucgauuggacuggagucacucagaauggaacaagcucuacuugcaaaaggagaucuaauaaaaguuucuuuaguagauugaauugguugacccacuuaaaauacaaauacccagcauugaacgugacuaugccaaacaaugaaaaauuugacaaauuguacauuugggggguucaccacccggguacggacagugaccaaaucagccuauaugcucaagcaucaggaagaaucacagucucuaccaaaagaagccaacaaacuguaaucccgaauaucggaucuagacccaggguaagggaugucuccagccgaauaagcaucuauuggacaauaguaaaaccgggagacauacuuuugauuaacagcacagggaaucuaauugcuccucgggguuacuucaaaauacgaagugggaaaagcucaauaaugagaucagaugcacccauuggcaaaugcaauucugaaugcaucacuccaaauggaagcauucccaaugacaaaccauuucaaaauguaaacaggaucacauauggagccugucccagauauguuaagcaaaacacucugaaauuggcaacagggaugcgaaauguaccagagaaacaaacuagaggcauauuuggcgcaaucgcggguuucauagaaaaugguugggagggaaugguggacgguugguacgguuucaggcaucaaaauucugagggcacaggacaagcagcagaucucaagagcacucaagcagcaaucaaccaaaucaaugggaaacugaauagguuaaucgggaaaacaaacgagaaauuccaucagauugaaaaagaauucucggaaguagaaggaagaauucaggaccucgagaaauauguugaggacacuaaaauagaucucuggucauacaacgcggagcuucuuguugcccuggagaaccaacauacaauugaucuaacugacucagaaaugaacaaacuguuugaaagaacaaagaagcaacugagggaaaaugcugaggauaugggcaaugguuguuucaaaauauaccacaaaugugacaaugccugcauagggucaaucagaaauggaacuuaugaccaugauguguacagagaugaagcauuaaacaaccgguuccagaucaaagguguugagcugaagucaggauacaaagauuggauccuauggauuuccuuugccauaucauguuuuuugcuuuguguugcuuuguugggguucaucaugugggccugccaaaaaggcaacauuaggugcaacauuugcauuuga

SEQ ID NO: 40281 - RNA, 1701 nt, Artificial Sequence
  derived and/or modified CDS sequence (wt) from hemagglutinin__InfluenzaA__AFD63648
augaagacuaucauugcuuugagcuacauucuaugucugguuuucgcucaaaaacuucccggaaaugacaacagcauggcaacgcugugccuugggcaccaugcaguaccaaacggaacgauagugaaaacaaucacgaaugaccaaauugaaguuacuaaugcuacugagcugguucagauuuccucaacagguggaauaugcgacaguccucaucagauccuugauggagaaaacugcacacuaauagaugcucuauugggagacccucagugugauggcuuccaaaauaagaaaugggaccuuuuuguugaacgcagcaaagccuacagcaacuguuacccuuaugaugugccggauuaugccucccuuaggucacuaguugccucauccggcacacuggaguuuaacaaugaaagcuucgauuggacuggagucacucagaauggaacaagcucugcuugcaaaaggagaucuaauaaaaguuucuuuaguagauugaauugguugacccacuuaaaauacaaauacccagcauugaacgugacuaugccaaacaaugaaaaauuugacaaauuguacauuugggggguucaccacccggguacggacagugaccaaaucagccuauaugcucaagcaucaggaagaaucacagucucuaccaaaagaagccaacaaacuguaaucccgaauaucggaucuagacccaggguaagggaugucuccagccgaauaagcaucuauuggacaauaguaaaaccgggagacauacuuuugauuaacagcacagggaaucuaauugcuccucgggguuacuucaaaauacgaagugggaaaagcucaauaaugagaucagaugcacccauuggcaaaugcaauucugaaugcaucacuccaaauggaagcauucccaaugacaaaccauuucaaaauguaaacaggaucacauauggggccugucccagauauguuaagcaaaacacucugaaauuggcaacagggaugcgaaauguaccagagaaacaaacuagaggcauauuuggcgcaaucgcggguuucauagaaaaugguugggagggaaugguggacgguugguacgguuucaggcaucaaaauucugagggcacaggacaagcagcagaucucaaaagcacucaagcagcaaucaaccaaaucaaugggaaacugaauagguuaaucgggaaaacaaacgagaaauuccaucagauugaaaaagaauucucggaaguagaaggaagaauucaggaccucgagaaauauguugaggacacuaaaauagaucucuggucauacaacgcggagcuucuuguugcccuggagaaccaacauacaauugaucuaacugacucagaaaugaacaaacuguuugaaagaacaaagaagcaacugagggaaaaugcugaggauaugggcaaugguuguuucaaaauauaccacaaaugugacaaugccugcauagggucaaucagaaauggaacuuaugaccaugauguguacagagaugaagcauuaaacaaccgguuccagaucaaagguguugagcugaagucaggauacaaagauuggauccuauggauuuccuuugccauaucauguuuuuugcuuuguguugcuuuguugggguucaucaugugggccugccaaaaaggcaacauuaggugcaacauuugcauuuga

SEQ ID NO: 40282 - RNA, 1701 nt, Artificial Sequence
  derived and/or modified CDS sequence (wt) from hemagglutinin__InfluenzaA__AFD63659
augaagacuaucauugcuuugagcuacauucuaugucugguuuucgcucaaaaacuucccggaaaugacaacagcacggcaacgcugugccuugggcaccaugcaguaccaaacggaacgauagugaaaacaaucacgaaugaccaaauugaaguuacuaaugcuacugagcugguucagauuuccucaacagguggaauaugcgacaguccucaucagauccuugauggagaaaacugcacacuaauagaugcucuauugggagacccucagugugauggcuuccaaaauaagaaaugggaccuuuuuguugaacgcagcaaagccuacagcaacuguuacccuuaugaugugccggauuaugccucccuuaggucacuaguugccucauccggcacacuggaguuuaacaaugaaagcuucgauuggacuggagucacucagaauggaacaagcucugcuugcaaaaggagaucuaauaaaaguuucuuuaguagauugaauugguugacccacuuaaaauacaaauacccagcauugaacgugacuaugccaaacaaugaaaaauuugacaaauuguacauuugggggguucaccacccggguacggacagugaccaaaucagccuauaugcucaagcaucaggaagaaucacagucucuaccaaaagaagccaacaaacuguaaucccgaauaucggaucuagacccaggguaagggaugucuccagccgaauaaguaucuauuggacaauaguaaaaccgggagacauacuuuugauuaacagcacagggaaucuaauugcuccucgggguuacuucaaaauacgaagugggaaaagcucaauaaugagaucagaugcacccauuggcaaaugcaauucugaaugcaucacuccaaauggaagcauucccaaugacaaaccauuucaaaauguaaacaggaucacauauggggccugucccagauauguuaagcaaaacacucugaaauuggcaacagggaugcgaaauguaccagagaaacaaacuagaggcauauuuggcgcaaucgcggguuucauagaaaaugguugggagggaaugguggacgguugguacgguuucaggcaucaaaauucugagggcacaggacaagcagcagaucucaaaagcacucaagcagcaaucaaccaaaucaaugggaaacugaauagguuaaucgggaaaacaaacgagaaauuccaucagauugaaaaagaauucucggaaguagaaggaagaauucaggaccucgagaaauauguugaggacacuaaaauagaucucuggucauacaacgcggagcuucuuguugcccuggagaaccaacauacaauugaucuaacugacucagaaaugaacaaacuguuugaaagaacaaagaagcaacugagggaaaaugcugaggauaugggcaaugguuguuucaaaauauaccacaaaugugacaaugccugcauagggucaaucagaaauggaacuuaugaccaugauguguacagagaugaagcauuaaacaaccgguuccagaucaaagguguugagcugaagucaggauacaaagauuggauccuauggauuuccuuugccauaucauguuuuuugcuuuguguugcuuuguugggguucaucaugugggccugccaaaaaggcaacauuaggugcaacauuugcauuuga

SEQ ID NO: 40283 - RNA, 1701 nt, Artificial Sequence
  derived and/or modified CDS sequence (wt) from hemagglutinin__InfluenzaA__AFD63681
augaagacuaucauugcuuugagcuacauucuaugucugguuuucgcucaaaaacuucccggaaaugacaacagcacggcaacacugugccuugggcaccaugcaguaccaaacggaacgauagugaaaacaaucacgaaugaccaaauugaaguuacuaaugcuacugagcugguucagaguuccucaacagguggaauaugcgacaguccucaucagauccuugauggagaaaacugcacacuaauagaugcucuauugggagacccccagugugauggcuuccaaaauaagaaaugggaccuuuuuguugaacgcagcaaagccuacagcaacuguuacccuuaugaugugccggauuaugccucccuuaggucacuaguugccucauccggcacacuggaguuuaacaaugaaagcuucaacuggacuggagucacucagaauggaacaagcucugcuugcaaaaggaaaucuaauaaaaguuucuuuaguagauugaauugguugacccacuuaaaauacaaauacccagcauugaacgugacuaugccaaacaaugaaaaauuugacaaauuguacauuugggggguucaccacccggguacggacaaugaccaaaucagccuauaugcucaagcaucaggaagaaucacagucucuaccaaaagaagccaacaaacuguaaucccgaauaucggaucuagacccaggguaagggacgucuccagcagaauaagcaucuauuggacaauaguaaaaccgggagacauacuuuugauuaacagcacagggaaucuaauugcuccucgggguuacuucaaaguacgaagugggaaaagcucaauaaugagaucagaugcacccauuggcaaaugcaauucugaaugcaucacuccaaauggaagcauucccaaugacaaaccauuucaaaauguaaacaggaucacauauggggccugucccagauauguuaagcaaaacacucugaaauuggcaacagggaugcgaaauguaccagagaaacaaacuagaggcauauuuggcgcaaucgcggguuucauagaaaaugguugggagggaaugguggacgguugguacgguuucaggcaucaaaauucugagggcacaggacaagcagcagaucucaaaagcacucaagcagcaaucaaccaaaucaaugggaaacugaauagguuaaucgggaaaacaaacgagaaauuccaucagauugaaaaagaauucucagaaguagaggggagaauucaggaccucgagaaauauguugaggacacuaaaauagaucucuggucauacaacgcggagcuucuuguugcccuggagaaccaacauacaauugaucuaacugacucagaaaugaacaaacuguuugaaagaacaaagaagcaacugagggaaaaugcugaggauaugggcaaugguuguuucaaaauauaccacaaaugugacaaugccugcauagggucaaucagaaauggaacuuaugaccaugauguauacagagaugaagcauuaaacaaccgguuccagaucaaagguguugagcugaagucaggauacaaagauuggauccuauggauuuccuuugccauaucauguuuuuugcuuuguguugcuuuguugggguucaucaugugggccugccaaaaaggcaacauuaggugcaacauuugcauuuga

SEQ ID NO: 40284 - RNA, 1701 nt, Artificial Sequence
  derived and/or modified CDS sequence (wt) from hemagglutinin__InfluenzaA__AFD63692
augaagacuaucauugcuuugagcuacauucuaugucugguuuucgcucaaaaacuucccggaaaugacaacagcacggcaacgcugugccuugggcaccaugcaguaccaaacggaacgauagugaaaacaaucacgaaugaccaaauugaaguuacuaaugcuacugagcugguucagaguuccucaacagguggaauaugcgacaguccucaucagauccuugauggagaaaacugcacacuaauagaugcucuauugggggacccucagugugauggcuuccaaaauaagaaaugggaccuuuuuguugaacgcagcaaagccuacagcaacuguuacccuuaugaugucccggauuaugccucccuuaggucacuaguugccucauccggcacacuggaguuuaacaaugaaagcuucgauuggacuggagucacucagaauggaacaagcucugcuugcaaaaggagaucuaauaaaaguuucuuuaguagauugaauugguugacccacuuaaaauacaaauacccagcauugaacgugacuaugccaaacaaugaaaaauuugacaaauuguacauuugggggguucuccacccggguacggacagugaccaaaucagccuauaugcucaagcaucaggaagaaucacagucucuaccaaaagaagccaacaaacuguaauaccgaauaucggaucuagacccaggguaagggaugucuccagccgaauaagcaucuauuggacaauaguaaaaccgggagacauacuuuugauuaacagcacagggaaucuaauugcuccucgggguuacuucaaaauacgaagugggaaaagcucaauaaugagaucagaugcacccauuggcaaaugcaauucugaaugcaucacuccaaauggaagcauucccaaugacaaaccauuucaaaauguaaacaggaucacauauggggccugucccagauauguuaagcaaaacacucugaaauuggcaacagggaugcgaaauguaccagagaaacagacuagaggcauauuuggcgcaaucgcggguuucauagaaaaugguugggagggaaugguggacgguugguacgguuucaggcaucaaaauucugagggcacaggacaagcagcagaucucaaaagcacucaagcagcaaucaaccaaaucaaugggaaacugaauagguuaaucgggaaaacaaacgagaaauuccaucagauugaaaaagaauucucggaaguagaagggagaauucaggaccucgagaaauauguugaggacacuaaaauagaucucuggucauacaacgcggagcuucuuguugcccuggagaaccaacauacaauugaucuaacugacucagaaaugaacaaacuguuugaaagaacaaagaagcaacugagggaaaaugcugaggauaugggcaaugguuguuucaaaauauaccacaaaugugacaaugccugcauagggucaaucagaaauggaacuuaugaccaugauguguacagagaugaagcauuaaacaaccgguuccagaucaaagguguugagcugaaaucaggauacaaagauuggauccuauggauuuccuuugccauaucauguuuuuugcuuuguguugcuuuguugggguucaucaugugggccugccaaaaaggcaacauuaggugcaacauuugcauuuga

SEQ ID NO: 40285 - RNA, 1701 nt, Artificial Sequence
  derived and/or modified CDS sequence (wt) from hemagglutinin__InfluenzaA__AFD63703
augaagacuaucauugcuuugagcuacauucuaugucugguuuucgcucaaaaacuucccggaaaugacaacagcacggcaacgcugugccuugggcaccaugcaguaccaaacggaacgauagugaaaacaaucacgaaugaccaaauugaaguuacuaaugcuacugagcugguucagauuuccucaacaaguggaauaugcgacaguccuuaucagauccuugauggagaaaacugcacacuaauagaugcucuauugggagacccucagugugauggcuuccaaaauaagaaaugggaccuuuuuguugaacgcagcaaagccuacagcaacuguuacccuuaugaugugccggauuaugccucccuuaggucacuaguugccucauccggcacacuggaguuuaacaaugaaagcuucgauuggacuggagucacucagaauggaacaagcucugcuugcaaaaggagaucuaauaaaaguuucuuuaguagauugaauugguugacccacuuaaaauacaaauacccagcauugaacgugacuaugccaaacaaugaaaaauuugacaaauuguacauuugggggguucaccacccggguacagacagugaccaaaucagccuauaugcucaagcaucaggaagaaucacagucucuaccaaaagaagccaacaaacuguaaucccgaauaucggaucuagacccaggguaagggaugucuccagccaaauaagcaucuauuggacaauaguaaaaccgggagacauacuuuugauuaacagcacagggaaucuaauugcuccucgggguuacuucaaaauacgaagugggaaaagcucaauaaugagaucagaugcacccauuggcaaaugcaauucugaaugcaucacuccaaauggaagcauucccaaugacaaaccauuucaaaauguaaacaggaucacauauggggccugucccagauauguuaagcaaaacacucugaaauuggcaacagggaugcgaaauguaccagagaaacaaacuagaggcauauuuggcgcaaucgcggguuucauagaaaaugguugggagggaaugguggacgguugguacgguuucaggcaucaaaauucugagggcacaggacaagcagcagaucucaaaagcacucaagcagcaaucaaccaaaucaaugggaaacugaauagguuaaucgggaaaacaaacgagaaauuccaucagauugaaaaagaauucucggaaguagaaggaagaauucaggaccucgagaaauauguugaggacacuaaaauagaucucuggucauacaacgcggagcuucuuguugcccuggagaaccaacauacaauugaucuaacugacucagaaaugaacaaacuguuugaaagaacaaagaagcaacugagggaaaaugcugaggauaugggcaaugguuguuucaaaauauaccacaaaugugacaaugccugcauagggucaaucagaaauggaacuuaugaccaugauguguacagagaugaagcauuaaacaaccgguuucagaucaaagguguugagcugaagucaggauacaaagauuggauccuauggauuuccuuugccauaucauguuuuuugcuuuguguugcuuuguugggguucaucaugugggccugccaaaaaggcaacauuaggugcaacauuugcauuuga

SEQ ID NO: 40286 - RNA, 1701 nt, Artificial Sequence
  derived and/or modified CDS sequence (wt) from hemagglutinin__InfluenzaA__AFD63714
augaagacuaucauugcuuugagcuacauucuaugucugguuuucgcucaaaaacuucccggaaaugacaacagcacggcaacgcugugccuugggcaccaugcaguaccaaacggaacgauagugaaaacaaucacgaaugaccaaauugaaguuacuaaugcuacugagcugguucagauuuccucaacagguggaauaugcgacaguccucaucagauccuugauggagaaaacugcacacuaauagaugcucuauugggagacccucagugugauggcuuccaaaauaagaaaugggaccuuuuuguugaacgcagcaaagccuacagcaacuguuacccuuaugaugugccggauuaugccucccuuaggucacuaguugccucauccggcacacuggaguuuaacaaugaaagcuucgauuggacuggagucacucagaauggaacaagcucuacuugcaaaaggagaucuaauaaaaguuucuuuaguagauugaauugguugacccacuuaaaauacaaauacccagcauugaacgugacuaugccaaacaaugaaaaauuugacaaauuguacauuugggggguucaccacccggguacggacaaugaccaaaucagccuauaugcucaagcaucaggaagaaucacagucucuaccaaaagaagccaacaaacuguaaucccgaauaucggaucuagacccaggguaagggaugucuccagccgaauaagcaucuauuggacaauaguaaaaccgggagacauacuuuugauuaacagcacagggaaucuaauugcuccucgggguuacuucaaaauacgaagugggaaaagcucaauaaugagaucagaugcacccauuggcaaaugcaauucugaaugcaucacuccaaauggaagcauucccaaugacaaaccauuucaaaauguaaacaggaucacauauggggccugucccagauauguuaagcaaaacacucugaaauuggcaacagggaugcgaaauguaccagagaaacaaacuagaggcauauuuggcgcaaucgcggguuucauagaaaaugguugggagggaaugguggacgguugguacgguuucaggcaucaaaauucugagggcacaggacaagcagcagaucucaaaagcacucaagcagcaaucaaccaaaucaaugggaaacugaauagguuaaucgggaaaacaaacgagaaauuccaucagauugaaaaagaauucucggaaguagaaggaagaauucaggaccucgagaaauauguugaggacacuaaaauagaucucuggucauacaacgcggagcuucuuguugcccuggagaaccaacaaacaauugaucuaacugacucagaaaugaacaaacuguuugaaagaacaaagaagcaacugagggaaaaugcugaggauaugggcaaugguuguuucaaaauauaccacaaaugugacaaugccugcauagggucaaucagaaauggaacuuaugaccaugauguguacagagaugaagcauuaaacaaccgguuccauaucaaagguguugagcugaagucaggauacaaagauuggauccuauggauuuccuuugccauaucauguuuuuugcuuuguguugcuuuguugggguucaucaugugggccugccaaaaaggcaacauuaggugcaacauuugcauuuga

SEQ ID NO: 40287 - RNA, 1701 nt, Artificial Sequence
  derived and/or modified CDS sequence (wt) from hemagglutinin__InfluenzaA__AFD63736
augaagacuaucauugcuuugagcuacauucuaugucugguuuucgcucaaaaacuucccggaaaugacaacagcacggcaacgcugugccuugggcaccaugcaguaccaaacggaacgauagugaaaacaaucacgaaugaccaaauugaaguuacuaaugcuacugagcugguucagauuuccucaacagguggaauaugcgacaguccucaucagauccuugauggagaaaacugcacacuaauagaugcucuauugggagacccucagugugauggcuuccaaaauaagaaaugggaccuuuuuguugaacgcagcaaagccuacagcaacuguuacccuuaugaugugccggauuaugccucccuuaggucacuaguugccucauccggcacacuggaguuuaacaaugaaagcuucgauuggacuggagucacucagaauggaacaagcucuacuugcaaaaggagaucuaauaaaaguuucuuuaguagauugaauugguugacccacuuaaaauacaaauacccagcauugaacgugacuaugccaaacaaugaaaaauuugacaaauuguacauuugggggguucaccacccggguacggacaaugaccaaaucagccuauaugcucaagcaucaggaagaaucacagucucuaccaaaagaagccaacaaacuguaaucccgaauaucggaucuagacccaggguaagggaugucuccagccgaauaagcaucuauuggacaauaguaaaaccgggagacauacuuuugauuaacagcacagggaaucuaauugcuccucgggguuacuucaaaauacgaagugggaaaagcucaauaaugagaucagaugcacccauuggcaaaugcaauucugaaugcaucacuccaaauggaagcauucccaaugacaaaccauuucaaaauguaaacaggaucacauauggggccugucccagauauguuaagcaaaacacucugaaauuggcaacagggaugcgaaauguaccagagaaacaaacuagaggcauauuuggcgcaaucgcggguuucauagaaaaugguugggagggaaugguggacgguugguacgguuucaggcaucaaaauucugagggcacaggacaagcagcagaucucaaaagcacucaagcagcaaucaaccaaaucaaugggaaacugaauagguuaaucgggaaaacaaacgagaaauuccaucagauugaaaaagaauucucggaaguagaaggaagaauucaggaccucgagaaauauguugaggacacuaaaauagaucucuggucauacaacgcggagcuucuuguugcccuggagaaccaacauacaauugaucuaacugacucagaaaugaacaaacuguuugaaagaacaaagaagcaacugagggaaaaugcugaggauaugggcaaugguuguuucaaaauauaccacaaaugugacaaugccugcauagggucaaucagaaauggaacuuaugaccaugauguguacagagaugaagcauuaaacaaccgguuccauaucaaagguguugagcugaagucaggauacaaagauuggauccuauggauuuccuuugccauaucauguuuuuugcuuuguguugcuuuguugggguucaucaugugggccugccaaaaaggcaacauuaggugcaacauuugcauuuga

SEQ ID NO: 40288 - RNA, 1701 nt, Artificial Sequence
  derived and/or modified CDS sequence (wt) from hemagglutinin__InfluenzaA__AFD63747
augaagacuaucauugcuuugagcuacauucuaugucugguuuucgcucaaaaacuucccggaaaugacaacagcacggcaacgcugugccuugggcaccaugcaguaccaaacggaacgauagugaaaacaaucacgaaugaccaaauugaaguuacuaaugcuacugagcugguucagaguuccucaacagguggaauaugcgacaguccucaucagauccuugauggagaaaacugcacacuaauagaugcucuauugggggacccucagugugauggcuuccaaaauaagaaaugggaccuuuuuguugaacgcagcaaagccuacagcaacuguuacccuuaugaugucccggauuaugccucccuuaggucacuaguugccucauccggcacacuggaguuuaacaaugaaagcuucgauuggacuggagucacucagaauggaacaagcucugcuugcaaaaggagaucuaauaaaaguuucuuuaguagauugaauugguugacccacuuaaaauacaaauacccagcauugaacgugacuaugccaaacaaugaaaaauuugacaaauuguacauuugggggguucaccacccggguacggacagugaccaaaucagccuauaugcucaagcaucaggaagaaucacagucucuaccaaaagaagccaacaaacuguaaucccgaauaucggaucuagacccaggguaagggaugucuccagccgaauaagcaucuauuggacaauaguaaaaccgggagacauacuuuugauuaacagcacagggaaucuaauugcuccucgggguuacuucaaaauacgaagugggaaaagcucaauaaugagaucagaugcacccauuggcaaaugcaauucugaaugcaucacuccaaauggaagcauucccaaugacaaaccauuucaaaauguaaacaggaucacauauggggccugucccagauauguuaagcaaaacacucugaaauuggcaacagggaugcgaaauguaccagagaaacagacuagaggcauauuuggcgcaaucgcggguuucauagaaaaugguugggagggaaugguggacgguugguacgguuucaggcaucaaaauucugagggcacaggacaagcagcagaucucaaaagcacucaagcagcaaucaaccaaaucaaugggaaacugaauagguuaaucgggaaaacaaacgagaaauuccaucggauugaaaaagaauucucggaaguagaagggagaauucaggaccucgagaaauauguugaggacacuaaaauagaucucuggucauacaacgcggagcuucuuguugcccuggagaaccaacauacaauugaucuaacugacucagaaaugaacaaacuguuugaaagaacaaagaagcaacugagggaaaaugcugaggauaugggcaaugguuguuucaaaauauaccacaaaugugacaaugccugcauagggucaaucagaaauggaacuuaugaccaugauguguacagagaugaagcauuaaacaaccgguuccagaucaaagguguugagcugaaaucaggauacaaagauuggauccuauggauuuccuuugccauaucauguuuuuugcuuuguguugcuuuguugggguucaucaugugggccugccaaaaaggcaacauuaggugcaacauuugcauuuga

SEQ ID NO: 40289 - RNA, 1701 nt, Artificial Sequence
  derived and/or modified CDS sequence (wt) from hemagglutinin__InfluenzaA__AFD63758
augaagacuaucauugcuuugagcuacauucuaugucugguuuucgcucaaaaacuucccggaaaugacaacagcacggcaacgcugugccuugggcaccaugcaguaccaaacggaacgauagugaaaacaaucacgaaugaccaaauugaaguuacuaaugcuacugagcugguucagaguuccucaacagguggaauaugcgacaguccucaucagauccuugauggagaaaacugcacacuaauagaugcucuauugggagacccucagugugauggcuuccaaaauaagaaaugggaccuuuuuguugaacgcagcaaagccuacagcaacuguuacccuuaugaugugccggauuaugccucccuuaggucacuaguugccucauccggcacacuggaguuuaacaaugaaagcuucaacuggacuggagucacucagaauggaacaagcucugcuugcaaaaggaaaucuaauaaaaguuucuuuaguagauugaauugguugacccacuuaaaauacaaauacccagcauugaacgugacuaugccaaacaaugaaaaauuugacaaauuguacauuugggggguucaccacccggguacggacaaugaccaaaucagccuauaugcucaagcaucaggaagaaucacagucucuaccaaaagaagccaacaaacuguaaucccgaauaucggaucuagacccaggguaagggacgucuccagcagaauaagcaucuauuggacaauaguaaaaccgggagacauacuuuugauuaacagcacagggaaucuaauugcuccucgggguuacuucaaaauacgaagugggaaaagcucaauaaugagaucagaugcacccauuggcaaaugcaauucugaaugcaucacuccaaauggaagcauucccaaugacaaaccauuucaaaauguaaacaggaucacauauggggccugucccagauauguuaagcaaaacacucugaaauuggcaacagggaugcgaaauguaccagagaaacaaacuagaggcauauuuggcgcaaucgcggguuucauagaaaaugguugggagggaaugguggacgguugguacgguuucaggcaucaaaauucugagggcacaggacaagcagcagaucucaaaagcacucaagcagcaaucaaccaaaucaaugggaaacugaauagguuaaucgggaaaacaaacgagaaauuccaucagauugaaaaagaauucucagaaguagaggggagaauucaggaccucgagaaauauguugaggacacuaaaauagaucucuggucauacaacgcggagcuucuuguugcccuggagaaccaacauacaauugaucuaacugacucagaaaugaacaaacuguuugaaagaacaaagaagcaacugagggaaaaugcugaggauaugggcaaugguuguuucaaaauauaccacaaaugugacaaugccugcauagggucaaucagaaauggaacuuaugaccaugauguauacagagaugaagcauuaaacaaccgguuccagaucaaagguguugagcugaagucaggauacaaagauuggauccuauggauuuccuuugccauaucauguuuuuugcuuuguguugcuuuguugggguucaucaugugggccugccaaaaaggcaacauuaggugcaacauuugcauuuga

SEQ ID NO: 40290 - RNA, 1701 nt, Artificial Sequence
  derived and/or modified CDS sequence (wt) from hemagglutinin__InfluenzaA__AFD63769
augaagacuaucauugcuuugagcuacauucuaugucugguuuucgcucaaaaacuucccggaaaugacaacagcacggcaacgcugugccuugggcaccaugcaguaccaaacggaacgauagugaaaacaaucacgaaugaccaaauugaaguuacuaaugcuacugagcugguucagauuuccucaacagguggaauaugcgacaguccucaucagauccuugauggagaaaacugcacacuaauagaugcucuauugggagacccucagugugauggcuuccaaaauaagaaaugggaccuuuuuguugaacgcagcaaagccuacagcaacuguuacccuuaugaugugccggauuaugccucccuuaggucacuaguugccucauccggcacacuggaguuuaacaaugaaagcuucgauuggacuggagucacucagaauggaacaagcucugcuugcaaaaggagaucuaauaaaaguuucuuuaguagauugaauugguugacccacuuaaaauacaaauacccagcauugaacgugacuaugccaaacaaugaaaaauuugacaaauuguacauuugggggguucaccacccggguacggacaaugaccaaaucagccuauaugcucaagcaucaggaagaaucacagucucuaccaaaagaagccaacaaacuguaaucccgaauaucggaucuagacccaggguaagggaugucuccagccgaauaagcaucuauuggacaauaguaaaaccgggagacauacuuuugauuaacagcacagggaaucuaauugcuccucgggguuacuucaaaauacgaagugggaaaagcucaauaaugagaucagaugcacccauuggcaaaugcaauucugaaugcaucacuccaaauggaagcauucccaaugacaaaccauuucaaaauguaaacaggaucacauauggggccugucccagauauguuaagcaaaacacucugaaauuggcaacagggaugcgaaauguaccagagaaacaaacuagaggcauauuuggcgcaaucgcggguuucauagaaaaugguugggagggaaugguggacgguugguacgguuucaggcaucaaaauucugagggcacaggacaagcagcagaucucaaaagcacucaagcagcaaucaaccaaaucaaugggaaacugaauagguuaaucgggaaaacaaacgagaaauuccaucagauugaaaaagaauucucggaaguagaaggaagaauucaggaccucgagaaauauguugaggacacuaaaauagaucucuggucauacaacgcggagcuucuuguugcccuggagaaccaacauacaauugaucuaacugacucagaaaugaacaaacuguuugaaagaacaaagaagcaacugagggaaaaugcugaggauaugggcaaugguuguuucaaaauauaccacaaaugugacaaugccugcauagggucaaucagaaauggaacuuaugaccaugauguguacagagaugaagcauuaaacaaccgguuccauaucaaaaguguugagcugaagucaggauacaaagauuggauccuauggauuuccuuugccauaucauguuuuuugcuuuguguugcuuuguugggguucaucaugugggccugccaaaaaggcaacauuaggugcaacauuugcauuuga

SEQ ID NO: 40291 - RNA, 1701 nt, Artificial Sequence; identical to SEQ ID NO: 32088
  derived and/or modified CDS sequence (wt) from hemagglutinin__InfluenzaA__AFD63780

SEQ ID NO: 40292 - RNA, 1701 nt, Artificial Sequence; identical to SEQ ID NO: 40289
  derived and/or modified CDS sequence (wt) from hemagglutinin__InfluenzaA__AFD63791

SEQ ID NO: 40293 - RNA, 1701 nt, Artificial Sequence
  derived and/or modified CDS sequence (wt) from hemagglutinin__InfluenzaA__AFD63802
augaagacuaucauugcuuugagcuacauucuaugucugguuuucgcucaaaaacuucccggaaaugacaacagcacggcaacgcugugccuugggcaccaugcaguaccaaacggaacgauagugaaaacaaucacgaaugaccaaauugaaguuacuaaugcuacugagcugguucagauuuccucaacugguggaauaugcgacaguccucaucagauccuugauggagaaaacugcacacuaauagaugcucuauugggagacccucagugugauggcuuccaaaauaagaaaugggaccuuuuuguugaacgcaguaaagccuacagcaacuguuacccuuaugaugugccggauuaugccucccuuaggucacuaguugccucauccggcacacuggaguuuaacaaugaaagcuucgauuggacuggagucacucagaauggaacaagcucugcuugcaaaaggagaucuaauaaaaguuucuucaguagauugaauugguugacccacuuaaaauacaaauacccagcauugaacgugacuaugccaaacaaugaaaaauuugacaaauuguacauuugggggguucaccacccggguacggacagugaccaaaucagccuauaugcucaagcaucaggaagaaucacagucucuaccaaaagaagccaacaaacuguaaucccgaauaucggaucuagacccaggguaagggaugucuccagccgaauaagcaucuauuggacaauaguaaaaccgggagacauacuuuugauuaacagcacagggaaucuaauugcuccucgggguuacuucaaaauacgaagugggaaaagcucaauaaugagaucagaugcacccauuggcaaaugcaauucugaaugcaucacuccaaauggaagcauucccaaugacaaaccauuucaaaauguaaacaggaucacauauggggccugucccagauauguuaagcaaaacacucugaaauuggcaacagggaugcgaaauguaccagagaaacaaacuagaggcauauuuggcgcaaucgcggguuucauagaaaaugguugggagggaaugguggacgguugguacgguuucaggcaucaaaauucugagggcacaggacaagcagcagaucucaaaagcacucaagcagcaaucaaccaaaucaaugggaaacugaauagguuaaucgggaaaacaaacgagaaauuccaucagauugaaaaagaauucucggaaguagaaggaagaauucaggaccucgagaaauauguugaggacacuaaaauagaucucuggucauacaacgcggagcuucuuguugcccuggagaaccaacauacaauugaucuaacugacucagaaaugaacaaacuguuugaaagaacaaagaagcaacugagggaaaaugcugaggauaugggcaaugguuguuucaaaauauaccacaaaugugacaaugccugcauagggucaaucagaaauggaacuuaugaccaugauguguacagagaugaagcauuaaacaaccgguuccagaucaaagguguugagcugaagucaggauacaaagauuggauccuauggauuuccuuugccauaucauguuuuuugcuuuguguugcuuuguugggauucaucaugugggccugccaaaaaggcaacauuaggugcaacauuugcauuuga

SEQ ID NO: 40294 - RNA, 1701 nt, Artificial Sequence
  derived and/or modified CDS sequence (wt) from hemagglutinin__InfluenzaA__AFD63813
augaagacuaucauugcuuugagcuacauucuaagucugguuuucgcucaaaaauuucccggaaaugacaacagcacggcaacgcugugccuugggcaccaugcaguaccaaacggaacgauagugaaaacaaucacgaaugaccaaauugaaguuacuaaugcuacugagcugguucagauuuccucaacagguggaauaugcgacaguccucaucagauccuugauggagaaaacugcacacuaauagaugcucuauugggagacccucagugugauggcuuccaaaauaagaaaugggaccuuuuuguugaacgcagcaaagccuacagcaacuguuacccuuaugaugugccggauuaugccucccuuaggucacuaguugccucauccggcucacuggaguuuaacaaugaaagcuucgauuggacuggagucacucagaauggaacaagcucugcuugcaaaaggagaucuaauaaaaguuucuuuaguagauugaauugguugacccacuuaaaauacaaauacccagcauugaacgugacuaugccaaacaaugaaaaauuugacaaauuguacauuugggggguucaccacccggguacggacagugaccaaaucagccuauaugcucaagcaucaggaagaaucacagucucuaccaaaagaagccaacaaacuguaaucccgaauaucggaucuagacccaggguaagggauaucuccagccgaauaagcaucuauuggacaauaguaaaaccgggagacauacuuuugauuaacagcacagggaaucuaauugcuccucgggguuacuucaaaauacgaagugggaaaagcucaauaaugagaucagaugcacccauuggcaaaugcaauucugaaugcaucacuccaaauggaagcauucccaaugacaaaccauuucaaaauguaaacaggaucacauauggggccugucccagauauguuaagcaaaacacucugaaauuggcaacagggaugcgaaauguaccagagaaacaaacuagaggcauauuuggcgcaaucgcggguuucauagaaaaugguugggagggaaugguggacgguugguacgguuucaggcaucaaaauucugagggcacaggacaagcagcagaucucaaaagcacucaagcagcaaucaaccaaaucaaugggaaacugaauagguuaaucgggaaaacaaacgagaaauuccaucagauugaaaaagaauucucggaaguagaaggaagaauucaggaccucgagaaauauguugaggacacuaaaauagaucucuggucauacaacgcggagcuucuuguugcccuggagaaccaacauacaauugaucuaacugacucagaaaugaacaaacuguuugaaagaacaaagaagcaacugagggaaaaugcugaggauaugggcaaugguuguuucaaaauauaccacaaaugugacaaugccugcauagggucaaucagaaauggaacuuaugaccaugauguguauagagaugaagcauuaaacaaccgguuccagaucaaagguguugagcugaagucaggauacaaagauuggauccuauggauuuccuuugccacaucauguuuuuugcuuuguguugcuuuguugggguucaucaugugggccugccaaaaaggcaacauuaggugcaacauuugcauuuga

SEQ ID NO: 40295 - RNA, 1701 nt, Artificial Sequence
  derived and/or modified CDS sequence (wt) from hemagglutinin__InfluenzaA__AFD63824
augaagacuaucauugcuuugagcuacauucuaugucugguuuucgcucaaaaacuucccggaaaugacaacagcacggcaacgcugugccuugggcaccaugcaguaccaaacggaacgauagugaaaacaaucacgaaugaccaaauugaaguuacuaaugcuacugagcugguucagauuuccucaacagguggaauaugcgacaguccucaucagauccuugauggagaaaacugcacacuaauagaugcucuauugggagacccucagugugauggcuuccaaaauaagaaaugggaccuuuuuguugaacgcagcaaagccuacagcaacuguuacccuuaugaugugccggauuaugccucccuuaggucacuaguugccucauccggcacacuggaguuuaacaaugaaagcuucgauuggacuggagucacucagaauggaacaagcucugcuugcaaaaggagaucuaauaaaaguuucuuuaguagauugaauugguugacccacuuaaaauacaaauacccagcauugaacgugacuaugccaaacaaugaaaaauuugacaaauuguacauuugggggguucaccacccggguacggacagugaccaaaucagccuauaugcucaagcaucaggaagaaucacagucucuaccaaaagaagccaacaaacuguaaucccgaauaucggaucuagacccaggguaagggauaucuccagccgaauaagcaucuauuggacaauaguaaaaccgggagacauacuuuugauuaacagcacagggaaucuaauugcuccucggggcuacuucaaaauacgaagugggaaaagcucaauaaugagaucagaugcacccauuggcaaaugcaauucugaaugcaucacuccaaauggaagcauucccaaugacaaaccauuucaaaauguaaacaggaucacauauggggccugucccagauauguuaagcaaaacacucugaaauuggcaacagggaugcgaaauguaccagagaaacaaacuagaggcauauuuggcgcaaucgcggguuucauagaaaaugguugggagggaaugguggacgguugguacgguuucaggcaucaaaauucugagggcacaggacaagcagcagaucucaaaagcacucaagcagcaaucaaccaaaucaaugggaaacugaauagguuaaucgggaaaacaaacgagaaauuccaucagauugaaaaagaauucucggaaguagaaggaagaauucaggaccucgagaaauauguugaggacacuaaaauagaucucuggucauacaacgcggagcuucuuguugcccuggagaaccaacauacaauugaucuaacugacucagaaaugaacaaacuguuugaaagaacaaagaagcaacugagggaaaaugcugaggauaugggcaaugguuguuucaaaauauaccacaaaugugacaaugccugcauagggucaaucagaaauggaacuuaugaccaugauguguacagagaugaagcauuaaacaaccgguuccagaucaaagguguugagcugaagucaggauacaaagauuggauccuauggauuuccuuugccauaucauguuuuuugcuuuguguugcuuuguugggguucaucaugugggccugccagaaaggcaacauuaggugcaacauuugcauuuga

SEQ ID NO: 40296 - RNA, 1701 nt, Artificial Sequence
  derived and/or modified CDS sequence (wt) from hemagglutinin__InfluenzaA__AFD63846
augaagacuaucauugcuuugagcuacauucuaugucugguuuucgcucaaaaacuucccggaaaugacaacagcacggcaacgcugugccuugggcaccaugcaguaccaaacggaacgauagugaaaacaaucacgaaugaccaaauugaaguuacuaaugcuacugagcugguucagauuuccucaacagguggaauaugcgacaguccucaucagauccuugauggagaaaacugcacacuaauagaugcucuauugggagacccucagugugauggauuccaaaauaagaaaugggaccuuuuuguugaacgcagcaaagccuacagcaacuguuacccuuaugaugugccggauuaugccucccuuaggucacuaguugccucauccggcacacuggaguuuaacaaugaaagcuucgauuggacuggagucacucagaauggaacaagcucugcuugcaaaaggagaucuaauaaaaguuucuuuaguagauugaauugguugacccacuuaaaauacaaauacccagcauugaacgugacuaugccaaacaaugaaaaauuugacaaauuguacauuugggggguucaccacccggguacggacagugaccaaaucagccuauaugcucaagcaucaggaagaaucacagucucuaccaaaagaagccaacaaacuguaaucccgaauaucggaucuagacccaggguaagggaugucuccagccgaauaagcaucuauuggacaauaguaaaaccgggagacauacuuuugauuaacagcacagggaaucuaauugcuccucgggguuacuucaaaauacgaagugggaaaagcucaauaaugagaucagaugcacccauuggcaaaugcaauucugaaugcaucacuccaaauggaagcauucccaaugacaaaccauuucaaaauguaaacaggaucacauauggggccugucccagauauguuaagcaaaacacucugaaauuggcaacagggaugcgaaauguaccagagaaacaaacuagaggcauauuuggcgcaaucgcggguuucauagaaaaugguugggagggaaugguggacgguugguacgguuucaggcaucaaaauucugagggcacaggacaagcagcagaucucaaaagcacucaagcagcaaucaaccaaaucaaugggaaacugaauagguuaaucgggaaaacaaacgagaaauuccaucagauugaaaaagaauucucggaaguagaaggaagaauucaggaccucgagaaauauguugaggacacuaaaauagaucucuggucauacaacgcggagcuucuuguugcccuggagaaccaacauacaauugaucuaacugacucagaaaugaacaaacuguuugaaagaacaaagaagcaacugagggaaaaugcugaggauaugggcaaugguuguuucaaaauauaccacaaaugugacaaugccugcauagggucaaucagaaauggaacuuaugaccaugauguguacagagaugaagcauuaaacaaccgguuccagaucaaagguguugagcugaagucaggauacaaagauuggauccuauggauuuccuuugccauaucauguuuuuugcuuuguguugcuuuguugggguucaucaugugggccugccaaaaaggcaacauuaggugcaacauuugcauuuga

SEQ ID NO: 40297 - RNA, 1701 nt, Artificial Sequence
  derived and/or modified CDS sequence (wt) from hemagglutinin__InfluenzaA__AFD63857
augaagacuaucauugcuuugagcuacauuuuaugucugguuuucgcucaaaaacuucccggaaaugacaacagcacggcaacgcugugccuugggcaccaugcaguaccaaacggaacgauagugaaaacaaucacgaaugaccaaauugaaguuacuaaugcuacugagcugguacagaguuccucaacagguggaauaugcgacaguccucaucagauccuugauggagaaaacugcacacuaauagaugcucuauugggagacccucagugugauggcuuccaaaauaagaaaugggaccuuuuuguugaacgcagcaaagccuacagcaacuguuacccuuaugaugugccggauuaugccucccuuaggucacuaguugccucauccggcacacuggaguuuaacaaugaaagcuucgauuggacuggagucacucagaauggaacaagcucugcuugcaaaaggggaucuaauaaaaguuucuuuaguagauugaauugguugacccacuuaaaauacaaauacccagcauugaacgugacuaugccaaacaaugaaaaauuugacaaauuguacauuugggggguucaccacccggguacggacagugaccaaaucagccuauaugcucaagcaucaggaagaaucacagucucuaccaaaagaagccaacaaacuguaaucccgaauaucggaucuagaccaaggguaagggaugucuccagccgaauaagcaucuauuggacaauaguaaaaccgggagacauacuuuugauuaacagcacagggaaucuaauugcuccucgggguuacuucaaaauacgaagugggaaaagcucaauaaugagaucagaugcacccauuggcaaaugcaauucugaaugcaucacuccaaauggaagcauucccaaugacaaaccauuucaaaauguaaacaggaucacauauggggccugucccagauauguuaagcaaaacacucugaaauuggcaacaggaaugcgaaauguaccagagaaacaaacuagaggcauauuuggcgcaaucgcggguuucauagaaaaugguugggagggaaugguggacgguugguacgguuucaggcaucaaaauucugagggcacaggacaagcagcagaucucaaaagcacucaagcagcaaucaaccaaaucaaugggaaacugaauagguuaaucgggaaaacaaacgagaaauuccaucagauugaaaaagaauucucagaaguagaagggagaauucaggaccucgagaaauauguugaggacacuaaaauagaucucuggucauacaacgcggagcuucuuguugcccuggagaaccaacauacaauugaucuaacugacucagaaaugaacaaacuguuugaaagaacaaagaggcaacugagggaaaaugcugaggauaugggcaaugguuguuucaaaauauaccacaaaugugacaaugccugcauagggucaaucagaaauggaacuuaugaccaugauguguacagagaugaagcauuaaacaaccgguuccagaucaaagguguugagcugaagucaggauacaaagauuggaucuuauggauuuccuuugccauaucauguuuuuugcuuuguguugcuuuguugggguucaucaugugggccugccaaaaaggcaacauuaggugcaacauuugcauuuga

SEQ ID NO: 40298 - RNA, 1701 nt, Artificial Sequence
  derived and/or modified CDS sequence (wt) from hemagglutinin__InfluenzaA__AFD63868
augaagacuaucauugcuuugagcuacauucuaugucugguuuucgcucaaaaacuucccggaaaugacaacagcacggcaacgcugugccuugggcaccaugcaguaccaaacggaacgauagugaaaacaaucacgaaugaccaaauugaaguuacuaaugcuacugagcugguucagauuuccucaacagguggaauaugcgacaguccucaucagauccuugauggagaaaacugcacacuaauagaugcucuauugggagacccucagugugauggcuuccaaaauaagaaaugggaccuuuuuguugaacgcagcaaagccuacagcaacuguuacccuuaugaugugccggauuaugccucccuuaggucacuaguugccucauccggcacacuggaguuuaacaaugaaagcuucgauuggacuggagucacucagaauggaacaagcucugcuugcaaaaggagaucuaauaaaaguuucuuuaguagauugaauugguugacccacuuaaaauacaaauacccagcauugaacgugacuaugccaaacaaugaaaaauuugacaaauuguacauuugggggguucaccacccggguacggacagugaccaaaucagccuauaugcucaggcaucaggaagaaucacagucucuaccaaaagaagccaacaaacuguaaucccgaauaucggaucuagacccaggguaagggaugucuccagccgaauaagcaucuauuggacaauaguaaaaccgggagacauacuuuugaucaacagcacagggaaucuaauugcuccucgggguuacuucaaaauacgaagugggaaaagcucaauaaugagaucagaugcacccauuggcaaaugcaauucugaaugcaucacuccaaauggaagcauucccaaugacaaaccauuucaaaauguaaacaggaucacauauggggccugucccagauauguuaagcaaaacacucugaaauuggcaacagggaugcgaaauguaccagagaaacaaacuagaggcauauuuggcgcaaucgcggguuucauagaaaaugguugggagggaaugguggacgguugguacgguuucaggcaucaaaauucugagggcacaggacaagcagcagaucucaaaagcacucaagcagcaaucaaccaaaucaaugggaaacugaauagguuaaucgggaaaacaaacgagaaauuccaucagauugagaaagaauucucggaaguagaaggaagaauucaggaccucgagaaauauguugaggacacuaaaauagaucucuggucauacaacgcggagcuucuuguugcccuggagaaccaacauacaauugaucuaacugacucagaaaugaacaaacuguuugaaagaacaaagaagcaacugagggaaaaugcugaggauaugggcaaugguuguuucaaaauauaccacaaaugugacaaugccugcauagggucaaucagaaauggaacuuaugaccaugauguguacagagaugaagcauuaaacaaccgguuccagaucaaagguguugagcugaagucaggauacaaagauuggauccuauggauuuccuuugccauaucauguuuuuugcuuuguguugcuuuguugggguucaucaugugggccugccaaaaaggcaacauuaggugcaacauuugcauuuga

SEQ ID NO: 40299 - RNA, 1701 nt, Artificial Sequence; identical to SEQ ID NO: 32088
  derived and/or modified CDS sequence (wt) from hemagglutinin__InfluenzaA__AFD63890

SEQ ID NO: 40300 - RNA, 1701 nt, Artificial Sequence
  derived and/or modified CDS sequence (wt) from hemagglutinin__InfluenzaA__AFD63901
augaagacuaucauugcuuugagcuacauucuaugucugguuuucgcucaaaaacuucccggaaaugacaacagcacggcaacgcugugccuugggcaccaugcaguaccaaacggaacgauagugaaaacaaucacgaaugaccaaauugaaguuacuaaugcuacugagcugguucagauuuccucaacagguggaauaugcgacaguccucaucagauccuugauggagaaaacugcacacuaauagaugcucuauugggagacccucagugugauggcuuccaaaauaagaaaugggaccuuuuuguugaacgcagcaaagccuacagcaacuguuacccuuaugaugugccggauuaugccucccuuaggucacuaguugccucauccggcacacuggaguuuaacaaugaaagcuucgauuggacuggagucacucagaauggaacaagcucugcuugcaaaaggagaucuaauaaaaguuucuuuaguagauugaauugguugacccacuuaaaauacaaauacccagcauugaacgugacuaugccaaacaaugaaaaauuugacaaauuguacauuugggggguucaccacccggguacggacagugaccaaaucagccuauaugcucaagcaucaggaagaaucacagucucuaccaaaagaagccaacaaacuguaaucccgaauaucggaucuagacccagaguaagggaugucuccagccgaauaagcaucuauuggacaauaguaaaaccgggagacauacuuuugauuaacagcacagggaaucuaauugcuccucgggguuacuucaaaauacgaagugggaaaagcucaauaaugagaucagaugcacccauuggcaaaugcaauucugaaugcaucacuccaaauggaagcauucccaaugacaaaccauuucaaaauguaaacaggaucacauauggggccugucccagauauguuaagcaaaacacucugaaauuggcaacagggaugcgaaauguaccagagaaacaaacuagaggcauauuuggcgcaaucgcggguuucauagaaaaugguugggagggaaugguggacgguugguacgguuucaggcaucaaaauucugagggcacaggacaagcagcagaucucaaaagcacucaagcagcaaucaaccaaaucaaugggaaacugaauagguuaaucgggaaaacaaacgagaaauuccaucagauugaaaaagaauucucggaaguagaaggaagaauucaggaccucgagaaauauguugaggacacuaaaauagaucucuggucauacaacgcggagcuucuuguugcccuggagaaccaacauacaauugaucuaacugacucagaaaugaacaaacuguuugaaagaacaaagaagcaacugagggaaaaugcugaggauaugggcaaugguuguuucaaaauauaccacaaaugugacaaugccugcauagggucaaucagaaauggaacuuaugaccaugauguguacagagaugaagcauuaaacaaccgguuccagaucaaagguguugagcugaagucaggauacaaagauuggauccuauggauuuccuuugccauaucauguuuuuugcuuuguguugcuuuguugggguucaucaugugggccugccaaaaaggcaacauuaggugcaacauuugcauuuga

SEQ ID NO: 40301 - RNA, 1701 nt, Artificial Sequence
  derived and/or modified CDS sequence (wt) from hemagglutinin__InfluenzaA__AFD63912
augaagacuaucauugcuuugagcuacauucuaugucugguuuucgcucaaaaacuucccggaaaugacaacagcacggcaacgcugugccuugggcaccaugcaguaccaaacggaacgauagugaaaacaaucacgaaugaccaaauugaaguuacuaaugcuacugagcugguucagauuuccucaacagguggaauaugcgacaguccucaucagauccuugauggagaaaacugcacacuaauagaugcucuauugggagacccucagugugauggcuuccaaaauaagaaaugggaccuuuuuguugaacgcagcaaagccuacagcaacuguuacccuuaugaugugccggauuaugccucccuuaggucacuaguugccucauccggcacacuggaguuuaacaaugaaagcuucgauuggacuggagucacucagaauggaacaagcucugcuugcaaaaggagaucuaauaaaaguuucuuuaguagauugaauugguugacccacuuaaaauacaaauacccagcauugaacgugacuaugccaaacaaugaaaaauuugacaaauuguacauuugggggguucaccacccggguacggacagugaccaaaucagccuauaugcucaagcaucaggaagaaucacagucucuaccaaaagaagccaacaaacuguaaucccgaauaucggaucuagacccaggguaagggaugucuccagccgaauaagcaucuauuggacaauaguaaaaccgggagacauacuuuugauuaacagcacagggaaucuaauugcuccucgggguuacuucaaaauacgaagugggaaaagcucaauaaugagaucagaugcacccauuggcaaaugcaauucugaaugcaucacuccaaauggaagcauucccaaugacaaaccauuucaaaauguaaacaggaucacauauggggccugucccagauauguuaagcaaaacacucugaaauuggcaacagguaugcgaaauguaccagagaaacaaacuagaggcauauuuggcgcaaucgcggguuucauagaaaaugguugggagggaaugguggacgguugguacgguuucaggcaucaaaauucugagggcacaggacaagcagcagaucucaaaagcacucaagcagcaaucaaccaaaucaaugggaaacugaauagguuaaucgggaaaacaaacgagaaauuccaucagauugaaaaagaauucucggaaguagaaggaagaauucaggaccucgagaaauauguugaggacacuaaaauagaucucuggucauacaacgcggagcuucuuguugcccuggagaaccaacauacaauugaucuaacugacucagaaaugaacaaacuguuugaaagaacaaagaagcaacugagggaaaaugcugaggauaugggcaaugguuguuucaaaauauaccacaaaugugacaaugccugcauagggucaaucagaaauggaacuuaugaccaugauguguacagagaugaagcauuaaacaaccgguuccagaucaaagguguugagcugaagucaggauacaaagauuggauccuauggauuuccuuugccauaucauguuuuuugcuuuguguugcuuuguugggguucaucaugugggccugccaaaaaggcaacauuaggugcaacauuugcauuuga

SEQ ID NO: 40302 - RNA, 1701 nt, Artificial Sequence
  derived and/or modified CDS sequence (wt) from hemagglutinin__InfluenzaA__AFD63923
augaagacuaucauugcuuugagcuacauucuaugucugguuuucgcucaaaaacuucccggaaaugacaacagcacggcaacgcugugccuugggcaccaugcaguaccaaacggaacgauagugaaaacaaucacgaaugaccaaauugaaguuacuaaugcuacugagcugguucagaguuccucaacagguggaauaugcgacaguccucaucagauccuugauggagaaaacugcacacuaauagaugcucuauugggagacccucagugugauggcuuccaaaauaagaaaugggaccuuuuuguugaacgcagcaaagccuacagcaacuguuacccuuaugaugugccggauuaugccucccuuaggucacuaguugccucauccggcacacuggaguuuaacaaugaaagcuucaacuggacuggagucacucagaauggaacaagcucugcuugcaaaaggaaaucuaauaaaaguuucuuuaguagauugaauugguugacccacuuaaaauacaaauacccagcauugaacgugacuaugccaaacaaugaaaaauuugacaaauuguacauuugggggguucaccacccggguacggacaaugaccaaaucagccuauaugcucaagcaucaggaagaaucacagucucuaccaaaagaagccaacaaacuguaaucccgaauaucggaucuagacccaggguaagggacaucuccagcagaauaagcaucuauuggacaauaguaaaaccgggagacauacuuuugauuaacagcacagggaaucuaauugcuccucgggguuacuucaaaauacgaagugggaaaagcucaauaaugagaucagaugcacccauuggcaaaugcaauucugaaugcaucacuccaaauggaagcauucccaaugacaaaccauuucaaaauguaaacaggaucacauauggggccugucccagauauguuaagcaaaacacucugaaauuggcaacagggaugcgaaauguaccagagaaacaaacuagaggcauauuuggcgcaaucgcggguuucauagaaaaugguugggagggaaugguggacgguugguacgguuucaggcaucaaaauucugagggcacaggacaagcagcagaucucaaaagcacucaagcagcaaucaaccaaaucaaugggaaacugaauagguuaaucgggaaaacaaacgagaaauuccaucagauugaaaaagaauucucagaaguagaggggagaauucaggaccucgagaaauauguugaggacacuaaaauagaucucuggucauacaacgcggagcuucuuguugcccuggagaaccaacauacaauugaucuaacugacucagaaaugaacaaacuguuugaaagaacaaagaagcaacugagggaaaaugcugaggauaugggcaaugguuguuucaaaauauaccacaaaugugacaaugccugcauagggucaaucagaaauggaacuuaugaccaugauguguacagagaugaagcauuaaacaaccgguuccagaucaaagguguugagcugaagucaggauacaaagauuggauccuauggauuuccuuugccauaucauguuuuuugcuuuguguugcuuuguugggguucaucaugugggccugccaaaaaggcaacauuaggugcaacauuugcauuuga

SEQ ID NO: 40303 - RNA, 1701 nt, Artificial Sequence
  derived and/or modified CDS sequence (wt) from hemagglutinin__InfluenzaA__AFD63934
augaagacuaucauugcuuugagcuacauucuaugucugguuuucgcucaaaaacuucccggaaaugacaacagcacggcaacgcugugccuugggcaccaugcaguaccaaacggaacgauagugaaaacaaucacgaaugaccaaauugaaguuacuaaugcuacugaacugguucagaguuccucaacagguggaauaugcgacaguccucaucagauccuugauggagaaaacugcacacuaauagaugcucuauugggagacccucaaugugauggcuuccaaaauaagaaaugggaccuuuuuguugaacgcagcaaagccuacagcaacuguuacccuuaugaugugccggauuaugccucccuuaggucacuaguugccucauccggcacacuggaguuuaacaaugaaagcuucgauuggacuggagucacucagaauggaacaagcucugcuugcaaaaggagaucuaauaaaaguuucuuuaguagauugaauugguugacccacuuaaaauacaaauacccagcauuaaacgugacuaugccaaacaaugaaaaauuugacaaauuguacauuugggggguucaccacccggguacggaaagugaccaaaucagccuauaugcucaagcaucaggaagaaucacagucucuaccaaaagaagccaacaaacuguaaucccgaauaucggaucuagacccaggguaagggaugucuccagccgaauaagcaucuauuggacaguaguaaaaccgggagacauacuuuugauuaacagcacagggaaucuaauugcuccucgggguuacuucaaaauacgaagugggaaaagcucaauaaugagaucagaugcacccauuggcaaaugcaauucugaaugcaucacuccaaauggaagcauucccaaugacaaaccauuucaaaauguaaacaggaucacauauggggccugucccagauauguuaagcaaaacacucugaaauuggcaacagggaugcgaaauguaccagagaaacaaacuagaggcauauuuggcgcaaucgcagguuucauagaaaaugguugggagggaaugguggacgguugguacgguuucaggcaucaaaacucugagggcacaggacaagcagcagaucucaaaagcacucaagcagcaaucaaccaaaucaaugggaaacugaauagguuaaucgggaaaacaaacgagaaauuccaucagauugaaaaagaauucucagaaguagaagggagaauucaggaccucgagaaauauguugaggacacuaaaauagaucucuggucauacaacgcggagcuucuuguugcccuggagaaccaacauacaauugaucuaacugacucagaaaugaacaaacuguuugaaagaacaaagaagcaacugagggaaaaugcugaggauaugggcaaugguuguuucaaaauauaccacaaaugugacaaugccugcauagggucaaucagaaauggaacuuaugaucaugauguguacagagaugaagcauuaaacaaccgguuccagaucaaagguguugagcugaagucaggauacaaagauuggauccuauggauuuccuuugccauaucauguuuuuugcuuuguguugcuuuguugggguucaucaugugggccugccaaaaaggcaacauuaggugcaacauuugcauuuga

SEQ ID NO: 40304 - RNA, 1701 nt, Artificial Sequence
  derived and/or modified CDS sequence (wt) from hemagglutinin__InfluenzaA__AFD63945
augaagacuaucauugcuuugagcuacauucuaugucugguuuucgcucaaaaacuucccggaaaugacaacagcacggcaacgcugugccuugggcaccaugcaguaccaaacggaacgauagugaaaacaaucacgaaugaccaaauugaaguuacuaaugcuacugagcugguucagauuuccucaacagguggaauaugcgacaguccucaucagauccuugauggagaaaacugcacacuaauagaugcucuauugggagacccucagugugauggcuuccaaaauaagaaaugggaccuuuuuguugaacgcagcaaagccuacagcaacuguuacccuuaugaugugccggauuaugccucccuuaggucacuaguugccucauccggcacacuggaguuuaacaaugaaagcuucgauuggacuggagucacucagaauggaacaagcucugcuugcaaaaggagaucuaauaaaaguuucuuuaguagauugaauugguugacccacuuaaaauacaaauacccagcauugaacgugacuaugccaaacaaugaaaaauuugacaaauuguacauuugggggguucaccacccggguacggacagugaccaaaucagccuauaugcucaagcaucaggaagaaucacagucucuaccaaaagaagccaacaaacuguaaucccgaauaucggaucuagacccaggguaagggauaucuccagccgaauaagcaucuauuggacaauaguaaaaccgggagacauacuuuugauuaacagcacagggaaucuaauugcuccucggggcuacuucaaaauacgaagugggaaaagcucaauaaugagaucagaugcacccauuggcaaaugcaauucugaaugcaucacuccaaauggaagcauucccaaugacaaaccauuucaaaauguaaacaggaucacauauggggccugucccagauauguuaagcaaaacacucugaaauuggcaacagggaugcgaaauguaccagagaaacaaacuagaggcauauuuggcgcaaucgcggguuucauagaaaaugguugggagggaaugguggacgguugguacgguuucaggcaucaaaauucugagggcacaggacaagcagcagaucuaaaaagcacucaagcagcaaucaaccaaaucaaugggaaacugaauagguugaucgggaaaacaaacgagaaauuccaucagauugaaaaagaauucucggaaguagaaggaagaauucaggaccucgagaaauauguugaggacacuaaaauagaucucuggucauacaacgcggagcuucuuguugcccuggagaaccaacauacaauugaucuaacugacucagaaaugaacaaacuguuugaaagaacaaagaagcaacugagggaaaaugcugaggauaugggcaaugguuguuucaaaauauaccacaaaugugacaaugccugcauagggucaaucagaaauggaacuuaugaccaugauguguacagagaugaagcauuaaacaaccgguuccagaucaaagguguugagcugaagucaggauacaaagauuggauccuauggauuuccuuugccauaucauguuuuuugcuuuguguugcuuuguugggguucaucaugugggccugccagaaaggcaacauuaggugcaacauuugcauuuga

SEQ ID NO: 40305 - RNA, 1701 nt, Artificial Sequence
  derived and/or modified CDS sequence (wt) from hemagglutinin__InfluenzaA__AFD63956
augaagacuaucauugcuuugagcuacauucuaugucugguuuucgcucaaaaacuucccggaaaugacaacagcacggcaacgcugugccuugggcaccaugcaguaccaaacggaacgauagugaaaacaaucacgaaugaccaaauugaaguuacuaaugcuacugagcugguucagauuuccucaacagguggaauaugcgacaguccucaucagauccuugauggagaaaacugcacacuaauagaugcucuauugggagacccucagugugauggcuuccaaaauaagaaaugggaccuuuuuguugaacgcagcaaagccuacagcaacuguuacccuuaugaugugccggauuaugccucccuuaggucacuaguugccucauccggcacacuggaguuuaacaaugaaagcuucgauuggacuggagucacucagaauggaacaagcucugcuugcaaaaggagaucuaauaaaaguuucuuuaguagauugaauugguugacccacuuaaaauacaaauacccagcauugaacgugacuaugccaaacaaugaaaaauuugacaaauuguacauuugggggguucaccacccggguacggacagugaccaaaucagccuauaugcucaagcaucaggaagaaucacagucucuaccaaaagaagccaacaaacuguaaucccgaauaucggaucuagacccaggguaagggauaucuccagccgaauaagcaucuauuggacaauaguaaaaccgggagacauacuuuugauuaacagcacagggaaucuaauugcuccucgggguuacuucaaaauacgaagugggaaaagcucaauaaugagaucagaugcacccauuggcaaaugcaauucugaaugcaucacuccaaauggaagcauucccaaugacaaaccauuucaaaauguaaacaggaucacauauggggccugucccagauauguuaagcaaaacacucugaaauuggcaacagggaugcgaaauguaccagagaaacaaacuagaggcauauuuggcgcaaucgcggguuucauagaaaaugguugggagggaaugguggacgguugguacgguuucaggcaucaaaauucugagggcacaggacaagcagcagaucucaaaagcacucaagcagcaaucaaccaaaucaaugggaaacugaauagguuaaucgggaaaacaaacgagaaauuccaucagauugaaaaagaauucucggaaguagaaggaagaauucaggaccucgagaaauauguugaggacacuaaaauagaucucuggucauacaacgcggagcuucuuguugcccuggagaaccaacauacaauugaucuaacugacucagaaaugaacaaacuguuugaaagaacaaagaagcaacugagggaaaaugcugaggauaugggcaaugguuguuucaaaauauaccacaaaugugacaaugccugcauagggucaaucagaaauggaacuuaugaccaugauguguacagagaugaagcauuaaacaaccgguuccagaucaaagguguugagcugaagucaggauacaaagauuggauccuauggauuuccuuugccauaucauguuuuuugcuuuguguugcuuuguugggguucaucaugugggccugccaaaaaggcaacauuaggugcaacauuugcauuuga

SEQ ID NO: 40306 - RNA, 1701 nt, Artificial Sequence; identical to SEQ ID NO: 40295
  derived and/or modified CDS sequence (wt) from hemagglutinin__InfluenzaA__AFD63967

SEQ ID NO: 40307 - RNA, 1701 nt, Artificial Sequence
  derived and/or modified CDS sequence (wt) from hemagglutinin__InfluenzaA__AFD63989
augaagacuaucauugcuuugagcuacauucuaugucugguuuucgcucaaaaacuucccggaaaugacaacagcacggcaacgcugugccuugggcaccaugcaguaccaaacggaacgauagugaaaacaaucacgaaugaccaaauugaaguuacuaaugcuacugagcugguucagauuuccucaacagguggaauaugcgacaguccucaucagauccuugauggagaaaacugcacacuaauagaugcucuauugggagacccucagugugauggcuuccaaaauaagaaaugggaccuuuuuguugaacgcagcaaagccuacagcaacuguuacccuuaugaugugccggauuaugccucccuuaggucacuaguugccucauccggcacacuggaguuuaacaaugaaagcuucgauuggacuggagucacucagaauggaacaagcucugcuugcaaaaggagaucuaauaaaaguuucuuuaguagauugaauugguugacccacuuaaaauacaaauacccagcauugaacgugacuaugccaaacaaugaaaaauuugacaaauuguacauuugggggguucaccacccggguacggacagugaccaaaucagccuauaugcucaagcaucaggaagaaucacagucucuaccaaaagaagccaacaaacuguaaucccgaauaucggaucuagacccaggguaagggaugucuccagccgaauaagcaucuauuggacaauaguaaaaccgggagacauacuuuugauuaacagcacaggaaaucuaauugcuccucgggguuacuucaaaauacgaagugggaaaagcucaauaaugagaucagaugcacccauuggcaaaugcaauucugaaugcaucacuccaaauggaagcauucccaaugacaaaccauuucaaaauguaaacaggaucacauauggggccugucccagauauguuaagcaaaacacucugaaauuggcaacagggaugcgaaauguaccagagaaacaaacuagaggcauauuuggcgcaaucgcggguuucauagaaaaugguugggagggaaugguggacgguugguacgguuucaggcaucaaaauucugagggcacaggacaagcagcagaucucaaaagcacucaagcagcaaucaaccaaaucaaugggaaacuaaauagguuaaucgggaaaacaaacgagaaauuccaucagauugaaaaagaauucucggaaguagaaggaagaauucaggaccucgagaaauauguugaggacacuaaaauagaucucuggucauacaacgcggagcuucuuguugcccuggagaaccaacauacaauugaucuaacugacucagaaaugaacaaacuguuugaaagaacaaagaagcaacugagggaaaaugcugaggauaugggcaaugguuguuucaaaauauaccacaaaugugacaaugccugcauagggucaaucagaaauggaacuuaugaccaugauguguacagagaugaagcauuaaacaaccgguuccagaucaaagguguugagcugaagucaggauacaaagauuggauccuauggauuuccuuugccauaucauguuuuuugcuuuguguugcuuuguugggguucaucaugugggccugccaaaaaggcaacauuaggugcaacauuugcauuuga

SEQ ID NO: 40308 - RNA, 1701 nt, Artificial Sequence
  derived and/or modified CDS sequence (wt) from hemagglutinin__InfluenzaA__AFD64000
augaagacuaucauugcuuugagcuacauucuaugucugguuuucgcucaaaaacuucccggaaaugacaacagcacggcaacgcugugccuugggcaccaugcaguaccaaacggaacgauagugaaaacaaucacgaaugaccaaauugaaguuacuaaugcuacugagcugguucagauuuccucaacagguggaauaugcgacaguccucaucagauccuugauggagaaaacugcacacuaauagaugcucuauugggagacccucagugugauggcuuccaaaauaagaaaugggaccuuuuuguugaacgcagcaaagccuacagcaacuguuacccuuaugaugugccggauuaugccucccuuaggucacuaguugccucauccggcacacuggaguuuaacaaugaaagcuucgauuggacuggagucacucagaauggaacaagcucugcuugcaaaaggagaucuaauaaaaguuucuuuaguagauugaauugguugacccacuuaaaauacaaauacccagcauugaacgugacuaugccaaacaaugaaaaauuugacaaauuguacauuugggggguucaccacccggguacggacagugaccaaaucagccuauaugcucaagcaucaggaagaaucacagucucuaccaaaagaagccaacaaacuguaaucccgaauaucggaucuagacccaggguaagggaugucuccagccgaauaagcaucuauuggacaauaguaaaaccgggagacauacuuuugauuaacagcacagggaaucuaauugcuccucgggguuacuucaaaauacgaagugggaaaagcucaauaaugagaucagaugcacccauuggcaaaugcaauucugaaugcaucacuccaaauggaagcauucccaaugacaaaccauuucaaaauguaaacaggaucacauauggggccugucccagauauguuaagcaaaacacucugaaauuggcaacagggaugcgaaauguaccagagaaacaaacuagaggcauauuuggcgcaaucgcggguuucauagaaaaugguugggagggaaugguggacgguugguacgguuucaggcaucaaaauucugagggcacaggacaagcagcagaucucaaaagcacucaagcagcaaucaaccaaaucaaugggaaacugaauagguuaaucgggaaaacaaacgagaaauuccaucagauugaaaaagaauucucggaaguagaaggaagaauucaggaccucgagaaauauguugaggacacuaaaauagaucucuggucauacaacgcggagcuucuuguugcccuggagaaccaacauacaauugaucuaacugacucagaaaugaacaaacuguuugaaagaacaaagaagcaacugagggaaaaugcugaggauaugggcaaugguuguuucaaaauauaccacaaaugugacaaugccugcauagggucaaucagaaauggaacuuaugaccaugauguguacagagaugaagcauuaaacaaccgguuucagaucaaagguguugagcugaagucaggauacaaagauuggauccuauggauuuccuuugccauaucauguuuuuugcuuuguguugcuuuguugggguucaucaugugggccugccaaaaaggcaacauuaggugcaacauuugcauuuga

SEQ ID NO: 40309 - RNA, 1701 nt, Artificial Sequence
  derived and/or modified CDS sequence (wt) from hemagglutinin__InfluenzaA__AFD64011
augaagacuaucauugcuuugagcuacauucuaugucugguuuucgcucaaaaacuucccggaaaugacaacagcacggcaacgcugugccuugggcaccaugcaguaccaaacggaacgauagugaaaacaaucacgaaugaccaaauugaaguuacuaaugcuacugagcugguucagaguuccucaacagguggaauaugcgacaguccucaucagauccuugauggagaaaacugcacacuaauagaugcucuauugggagacccucagugugauggcuuccaaaauaagaaaugggaccuuuuuguugaacgcagcaaagccuacagcaacuguuacccuuaugaugugccggauuaugccucccuuaggucacuaguugccucauccggcacacuggaguuuaacaaugaaagcuucgauuggacuggagucacucagaauggaacaagcucugcuugcaaaaggagaucuaauaaaaguuucuuuaguagauugaauugguugacccacuuaaaauacaaauacccagcauugaacgugacuaugccaaacaaugaaaaauuugacaaauuguacauuugggggguucaccacccggguacggacagugaccaaaucagccuauaugcucaagcaccaggaaaaaucacagucucuaccaaaagaagccaacaaacuguaaucccgaauaucggaucuagacccaggguaagggaugucuccagccgaauaagcaucuauuggacaauaguaaaaccgggagacauacuuuugauuaacagcacagggaaucuaauugcuccucgggguuacuucaaaauacgaagugggaaaagcucaauaaugagaucagaugcacccauuggcaaaugcaauucugaaugcaucacuccaaauggaagcauucccaaugacaaaccauuucaaaauguaaacaggaucacauauggggccugucccagauauguuaagcaaaacacucugaaauuggcaacagggaugcgaaauguaccagagaaacaaacuagaggcauauuuggcgcaaucgcggguuucauagaaaaugguugggagggaaugguggacgguugguacgguuucaggcaucaaaauucugagggcacaggacaagcagcagaucucaaaagcacucaagcagcaaucaaccaaaucaaugggaaacugaauagguuaaucgggaaaacaaacgagaaauuccaucagauugaaaaagaauucucagaaguagaagggagaauucaggaccucgagaaauauguugaggacacuaaaauagaucucuggucauacaacgcggagcuucuuguugcccuggagaaccaacauacaauugaucuaacugacucagaaaugaacaaacuguuugaaagaacaaagaagcaacugagggaaaaugcugaggauaugggcaaugguuguuucaaaauauaccacaaaugugacaaugccugcauagggucaaucagaaauggaacuuaugaccaugauguguacagagaugaagcauuaaacaaccgguuccagaucaaagguguugagcugaagucaggauacaaagauuggauccuauggauuuccuuugccauaucauguuuuuugcuuuguguugcuuuguugggguucaucaugugggccugccaaaaaggcaacauuaggugcgacauuugcauuuga

SEQ ID NO: 40310 - RNA, 1701 nt, Artificial Sequence
  derived and/or modified CDS sequence (wt) from hemagglutinin__InfluenzaA__AFD64022
augaagacuaucauugcuuugagcuacauucuaugucugguuuucgcucaaaaacuucccggaaaugacaacagcacggcaacgcugugccuugggcaccaugcaguaccaaacggaacgauagugaaaacaaucacgaaugaccaaauugaaguuacuaaugcuacugagcugguucagauuuccucaacagguggaauaugcgacaguccucaucagauccuugauggagaaaacugcacacuaauagaugcucuauugggagacccucagugugauggcuuccaaaauaagaaaugggaccuuuuuguugaacgcagcaaagccuacagcaacuguuacccuuaugaugugccggauuaugccucccuuaggucacuaguugccucauccggcacacuggaguuuaacaaugaaagcuucgauuggacuggagucacucagaauggaacaagcucugcuugcaaaaggagaucuaauaaaaguuucuuuaguagauugaauugguugacccacuuaaaauacaaauacccagcauugaacgugacuaugccaaacaaugaaaaauuugacaaauuguacauuugggggguucaccacccggguacggacagugaccaaaucagccuauaugcucaagcaucaggaagaaucacagucucuaccaaaagaagccaacaaacuguaaucccgaauaucggaucuagacccaggguaagggaugucuccagccgaauaagcaucuauuggacaauaguaaaaccgggagacauacuuuugauuaacagcacagggaaucuaauugcuccucggggcuacuucaaaauacgaagugggaaaagcucaauaaugagaucagaugcacccauuggcaaaugcaauucugaaugcaucacuccaaauggaagcauucccaaugacaaaccauuucaaaauguaaacaggaucacauauggggccugucccagauauguuaagcaaaacacucugaaauuggcaacagggaugcgaaauguaccagagaaacaaacuagaggcauauuuggcgcaaucgcggguuucauagaaaaugguugggagggaaugguggacgguugguacgguuucaggcaucaaaauucugagggcacaggacaagcagcagaucuaaaaagcacucaagcagcaaucaaccaaaucaaugggaaacugaauagguugaucgggaaaacaaacgagaaauuccaucagauugaaaaagaauucucggaaguagaaggaagaauucaggaccucgagaaauauguugaggacacuaaaauagaucucuggucauacaacgcggagcuucuuguugcccuggagaaccaacauacaauugaucuaacugacucagaaaugaacaaacuguuugaaagaacaaagaagcaacugagggaaaaugcugaggauaugggcaaugguuguuucaaaauauaccacaaaugugacaaugccugcauagggucaaucagaaauggaacuuaugaccaugauguguacagagaugaagcauuaaacaaccgguuccagaucaaagguguugagcugaagucaggauacaaagauuggauccuauggauuuccuuugccauaucauguuuuuugcuuuguguugcuuuguugggguucaucaugugggccugccagaaaggcaacauuaggugcaacauuugcauuuga

SEQ ID NO: 40311 - RNA, 1701 nt, Artificial Sequence; identical to SEQ ID NO: 33773
  derived and/or modified CDS sequence (wt) from hemagglutinin__InfluenzaA__AFD64033

SEQ ID NO: 40312 - RNA, 1701 nt, Artificial Sequence
  derived and/or modified CDS sequence (wt) from hemagglutinin__InfluenzaA__AFD64044
augaagacuaucauugcuuugagcuacauucuaugucugguuuucgcucaaaaacuucccggaaaugaaaacagcacggcaacgcugugccuugggcaccaugcaguaccaaacggaacgauagugaaaacaaucacgaaugaccaaauugaaguuacuaaugcuacugagcugguucagaguuccucaacagguggaauaugcgacaguccucaucagauccuugauggagaaaacugcacacuaauagaugcucuauugggggacccucagugugauggcuuccaaaauaagaaaugggaccuuuuuguugaacgcagcaaagccuacagcaacuguuacccuuaugaugucccggauuaugccucccuuaggucacuaguugccucauccggcacacuggaguuuaacaaugaaagcuucgauuggacuggagucacucagaauggaacaagcucugcuugcaaaaggagaucuaauaaaaguuucuuuaguagauugaauugguugacccacuuaaaauacaaguacccagcauugaacgugacuaugccaaacaaugaaaaauuugacaaauuguacauuugggggguucaccacccggguacggacagugaccaaaucagccuauaugcucaagcaucaggaagaaucacagucucuaccaaaagaagccaacaaacuguaaucccgaauaucggaucuagacccaggguaagggaugucuccagccgaauaagcaucuauuggacaauaguaaaaccgggagacauacuuuugauuaacagcacagggaaucuaauugcuccucgggguuacuucaaaauacgaagugggaaaagcucaauaaugagaucagaugcacccauuggcaaaugcaauucugaaugcaucacuccaaauggaagcauucccaaugacaaaccauuucaaaauguaaacaggaucacauauggggccugucccagauauguuaagcaaaacacucugaaauuggcaacagggaugcgaaauguaccagagaaacagacuagaggcauauuuggcgcaaucgcggguuucauagaaaaugguugggagggaaugguggacgguugguacgguuucaggcaucaaaauucugagggcacaggacaagcagcagaucucaaaagcacucaagcagcaaucaaccaaaucaaugggaaacugaauagguuaaucgggaaaacaaacgagaaauuccaucagauugaaaaagaauucucggaaguagaagggagaauucaggaccucgagaaauauguugaggacacuaaaauagaucucuggucauacaacgcggagcuucuuguugcccuggagaaccaacauacaauugaucuaacugacucagaaaugaacaaacuguuugaaagaacaaagaagcaacugagggaaaaugcugaggauaugggcaaugguuguuucaaaauauaccacaaaugugacaaugccugcauagggucaaucagaaauggaacuuaugaccaugauguguacagagaugaagcauuaaacaaccgguuccagaucaaagguguugagcugaaaucaggauacaaagauuggauccuauggauuuccuuugccauaucauguuuuuugcuuuguguugcuuuguugggguucaucaugugggccugccaaaaaggcaacauuaggugcaacauuugcauuuga

SEQ ID NO: 40313 - RNA, 1701 nt, Artificial Sequence; identical to SEQ ID NO: 40289
  derived and/or modified CDS sequence (wt) from hemagglutinin__InfluenzaA__AFD64055

SEQ ID NO: 40314 - RNA, 1701 nt, Artificial Sequence
  derived and/or modified CDS sequence (wt) from hemagglutinin__InfluenzaA__AFD64066
augaagacuaucauugcuuugagcuacauucuaugucugguuuucgcucaaaaacuucccggaaaugacaacagcacggcaacacugugccuugggcaccaugcaguaccaaacggaacgauagugaaaacaaucacgaaugaccaaauugaaguuacuaaugcuacugagcugguucagaguuccucaacagguggaauaugcgacaguccucaucagauccuugauggagaaaacugcacacuaauagaugcucuauugggagacccucagugugauggcuuccaaaauaagaaaugggaccuuuuuguugaacgcagcaaagccuacagcaacuguuacccuuaugaugugccggauuauaccucccuuaggucacuaguugccucauccggcacacuggaguuuaacaaugaaagcuucaauuggacuggagucacucaaaauggaacaagcucugcuugcaaaaggagaucuaauaaaaguuucuuuaguagauugaauugguugacccacuuaaaauucaaauacccagcauugaacgugacuaugccaaacaaugaaaaauuugacaaauuguacauuugggggguucaccacccggguacggacaaugaccaaaucagccuauaugcucaagcaucaggaagaaucacagucucuaccaaaagaagccaacaaacuguaaucccgaauaucggaucuagacccaggguaagggauguccccagcagaauaagcaucuauuggacaauaguaaaaccgggagacauacuuuugauuaacagcacagggaaucuaauugcuccucgggguuacuucaaaauacgaagugggaaaagcucaauaaugagaucagaugcacccauuggcaaaugcaauucugaaugcaucacuccaaauggaagcauucccaaugacaaaccauuucaaaauguaaacaggaucacauauggggccugucccagauauguuaagcaaaacacucugaaauuggcaacagggaugcgaaauguaccagagaaacaaacuagaggcauauuuggcgcaaucgcggguuucauagaaaaugguugggagggaaugguggacgguugguacgguuucaggcaucaaaaugcugagggaacaggacaagcagcagaucucaaaagcacucaagcagcaaucaaccaaaucaaugggaagcugaauagguugaucgggaaaacaaacgagaaauuccaucagauugaaaaagaauucucagaaguagaaggaagaauucaggaccucgagaaauauguugaggacacuaaaauagaucucuggucauacaacgcggagcuucuuguugcccuggagaaccaacauacaauugaucuaacugacucagaaaugaacaaacuguuugaaagaacaaagaagcaacugagggaaaaugcugaggauaugggcaaugguuguuucaaaauauaccacaaaugugacaaugccugcauagggucaaucagaaauggaacuuaugaccaugauguauacagagaugaagcauuaaacaaccgguuccagaucaaagguguugagcugaagucaggauacaaaaauuggauccuauggauuuccuuugccauaucauguuuuuugcuuuguguugcuuuguugggguucaucaugugggccugccaaaaaggcaacauuaggugcaacauuugcauuuga

SEQ ID NO: 40315 - RNA, 1701 nt, Artificial Sequence
  derived and/or modified CDS sequence (wt) from hemagglutinin__InfluenzaA__AFD64077
augaagacuaucauugcuuugagcuacauucuaugucugguuuucgcucaaaaacuucccggaaaugacaacagcacggcaacgcugugccuugggcaccaugcaguaccaaacggaacgauagugaaaacaaucacgaaugaccaaauugaaguuacuaaugcuacugagcugguucagauuuccucaacaggugaaauaugcgacaguccucaucagauccuugauggagaaaacugcacacuaauagaugcucuauugggagacccucagugugauggcuuccaaaauaagaaaugggaccuuuuuguugaacgcagcaaagccuacagcaacuguuacccuuaugaugugccggauuaugccucccuuaggucacuaguugccucauccggcacacuggaguuuaacaaugaaagcuucgauuggacuggagucacucagaauggaacaagcucugcuugcaaaaggagaucuaauaaaaguuucuuuaguagauugaauugguugacccacuuaaaauacaaauacccagcauugaacgugacuaugccaaacaaugaaaaauuugacaaauuguacauuugggggguucaccacccggguacggacagugaccaaaucagccuauaugcucaagcaucaggaagaaucacagucucuaccaaaagaagccaacaaacuguaaucccgaauaucggaucuagacccaggauaagggaugucuccagccgaauaagcaucuauuggacaauaguaaaaccgggagacauacuuuugauuaacagcacagggaaucuaauugcuccucgggguuacuucaaaauacgaagugggaaaagcucaauaaugagaucagaugcacccauuggcaaaugcaauucugaaugcaucacuccaaauggaagcauucccaaugacaaaccauuucaaaauguaaacaggaucacauauggggccugucccagauauguuaagcaaaacacucugaaauuggcaacagggaugcgaaauguaccagagaaacaaacuagaggcauauuuggcgcaaucgcggguuucauagaaaaugguugggagggaaugguggacgguugguacgguuucaggcaucaaaauucugagggcacaggacaagcagcagaucucaaaagcacucaagcagcaaucaaccaaaucaaugggaaacugaauagguuaaucgggaaaacaaacgagaaauuccaucagauugaaaaagaauucucggaaguagaaggaagaauucaggaccucgagaaauauguugaggacacuaaaauagaucucuggucauacaacgcggagcuucuuguugcccuggagaaccaacauacaauugaucuaacugacucagaaaugaacaaacuguuugaaagaacaaagaagcaacugagggaaaaugcugaggauaugggcaaugguuguuucaaaauauaccacaaaugugacaaugccugcauagggucaaucagaaauggaacuuaugaccaugauguguacagagaugaagcauuaaacaaccgguuccagaucaaagguguugagcugaagucaggauacaaagauuggauccuauggauuuccuuugccauaucauguuuuuugcuuuguguugcuuuguugggguucaucaugugggccugccaaaaaggcaacauuaggugcaacauuugcauuuga

SEQ ID NO: 40316 - RNA, 1701 nt, Artificial Sequence
  derived and/or modified CDS sequence (wt) from hemagglutinin__InfluenzaA__AFD64088
augaagacuaucauugcuuugagcuacauucuaugucugguuuucgcucaaaaacuucccggaaaugacaacagcacggcaacgcugugccuugggcaccaugcaguaccaaacggaacgauagugaaaacaaucacgaaugaccaaauugaaguuacuaaugcuacugagcugguucagauuuccucaacagguggaauaugcgacaguccucaucagauccuugauggagaaaacugcacacuaauagaugcucuauugggagacccucagugugauggcuuccaaaauaagaaaugggaccuuuuuguugaacgcagcaaagccuacagcaacuguuacccuuaugaugugccggauuaugccucccuuaggucacuaguugccucauccggcacacuggaguuuaacaaugaaagcuucgauuggacuggagucacucagaauggaacaagcucugcuugcaaaaggagaucuaauaaaaguuucuuuaguagauugaauugguugacccacuuaaaauacaaauacccagcauugaacgugacuaugccaaacaaugaaaaauuugacaaauuguacauuugggggguucaccacccggguacggacagugaccaaaucagccuauaugcucaagcaucaggaagaaucacagucucuaccaaaagaagccaacaaacuguaaucccgaauaucggaucuagacccaggguaagggaugucuccagccgaauaagcaucuauuggacaauaguaaaaccgggagacauacuuuugauuaacagcacagggaaucuaauugcuccucggggcuacuucaaaauacgaagugggaaaagcucaauaaugagaucagaugcacccauuggcaaaugcaauucugaaugcaucacuccaaauggaagcauucccaaugacaaaccauuucaaaauguaaacaggaucacauauggggccugucccagauauguuaagcaaaacacucugaaauuggcaacagggaugcgaaauguaccagagaaacaaacuagaggcauauuuggcgcaaucgcggguuucauagaaaaugguugggagggaaugguggacgguugguacgguuucaggcaucaaaauucugagggcacaggacaagcagcagaucucaaaagcacucaagcagcaaucaaccaaaucaaugggaaacugaauagguuaaucgggaaaacaaacgagaaauuccaucagauugaaaaagaauucucggaaguagaaggaagaauucaggaccucgagaaauauguugaggacacuaaaauagaucucuggucauacaacgcggagcuucuuguugcccuggagaaccaacauacaauugaucuaacugacucagaaaugaacaaacuguuugaaagaacaaagaagcaacugagggaaaaugcugaggauaugggcaaugguuguuucaaaauauaccacaaaugugacaaugccugcauagggucaaucagaaauggaacuuaugaccaugauguguacagagaugaagcauuaaacaaucgguuccagaucaaagguguugagcugaagucaggauacaaagauuggauccuauggauuuccuuugccauaucauguuuuuugcuuuguguugcuuuguugggguucaucaugugggccugccagaaaggcaacauuaggugcaacauuugcauuuga

SEQ ID NO: 40317 - RNA, 1701 nt, Artificial Sequence; identical to SEQ ID NO: 32088
  derived and/or modified CDS sequence (wt) from hemagglutinin__InfluenzaA__AFD64099

SEQ ID NO: 40318 - RNA, 1701 nt, Artificial Sequence; identical to SEQ ID NO: 40289
  derived and/or modified CDS sequence (wt) from hemagglutinin__InfluenzaA__AFD64110

SEQ ID NO: 40319 - RNA, 1701 nt, Artificial Sequence
  derived and/or modified CDS sequence (wt) from hemagglutinin__InfluenzaA__AFD64121
augaagacuaucauugcuuugagcuacauucuaugucugguuuucgcucaaaaacuucccggaaaugacaacagcacggcaacgcugugccuugggcaccaugcaguaccaaacggaacgauagugaaaacaaucacgaaugaccaaauugaaguuacuaaugcuacugagcugguucagaguuccucaacagguggaauaugcgacaguccucaucagauccuugauggagaaaacugcacacuaauagaugcucuauugggagacccucagugugauggcuuccaaaauaagaaaugggaccuuuuuguugaacgcagcagagccuacagcaacuguuacccuuaugaugugccggauuaugccucccuuaggucacuaguugccucauccggcacacuggaguuuaacaaugaaagcuucaacuggacuggagucacucagaauggaacaagcucugcuugcaaaaggaaaucuaauaaaaguuucuuuaguagauugaauugguugacccacuuaaaauacaaauacccagcauugaacgugacuaugccaaacaaugaaaaauuugacaaauuguacauuugggggguucaccacccggguacggacaaugaccaaaucagccuguaugcucaagcaucaggaagaaucacagucucuaccaaaagaagccaacaaacuguaaucccgaauaucggaucuagacccaggguaagggacgucuccagcagaauaagcaucuauuggacaauaguaaaaccgggagacauacuuuugauuaacagcacagggaaucuaauugcuccucgggguuacuucaaaauacgaagugggaaaagcucaauaaugagaucagaugcacccauuggcaaaugcaauucugaaugcaucacuccaaauggaagcauucccaaugacaaaccauuucaaaauguaaacaggaucacauauggggccugucccagauauguuaagcaaaacacucugaaauuggcaacagggaugcgaaauguaccagagaaacaaacuagaggcauauuuggcgcaaucgcggguuucauagaaaaugguugggagggaaugguggacgguugguacgguuucaggcaucaaaauucugagggcacaggacaagcagcagaucucaaaagcacucaagcagcaaucaaccaaaucaaugggaaacugaauagguuaaucgggaaaacaaacgagaaauuccaucagauugaaaaagaauucucagaaguagaggggagaauucaggaccucgagaaauauguugaggacacuaaaauagaucucuggucauacaacgcagagcuucuuguugcccuggagaaccaacauacaauugaucuaacugacucagaaaugaacaaacuguuugaaagaacaaagaagcaacugagggaaaaugcugaggauaugggcaaugguuguuucaaaauauaccacaaaugugacaaugccugcauagggucaaucagaaauggaacuuaugaccaugauguauacagagaugaagcauuaaacaaccgguuccagaucaaagguguugagcugaagucaggauacaaagauuggauccuauggauuuccuuugccauaucauguuuuuugcuuuguguugcuuuguugggguucaucaugugggccugccaaaaaggcaacauuaggugcaacauuugcauuuga

SEQ ID NO: 40320 - RNA, 1701 nt, Artificial Sequence
  derived and/or modified CDS sequence (wt) from hemagglutinin__InfluenzaA__AFD64132
augaagacuaucauugcuuugagcuacauucuaugucugguuuucgcucaaaaacuucccggaaaugacaacagcacggcaacgcugugccuugggcaccaugcaguaccaaacggaacgauagugaaaacaaucacgaaugaccaaauugaaguuacuaaugcuacugagcugguucagauuuccucaacagguggaauaugcgacaguccucaucagauccuugauggagaaaacugcacacuaauagaugcucuauugggagacccucagugugauggcuuccaaaauaagaaaugggaccuuuuuguugaacgcagcaaagccuacagcaacuguuacccuuaugaugugccggauuaugccucccuuaggucacuaguugccucauccggcacacuggaguuuaacaaugaaagcuucgauuggacuggagucacucagaauggaacaagcucugcuugcaaaaggagaucuaauaaaaguuucuuuaguagauugaauugguugacccacuuaaaauacaaauacccagcauugaacgugacuaugccaaacaaugaaaaauuugacaaauuguacauuugggggguucaccacccggguacggacagugaccaaaucagccuauaugcucaagcaucaggaagaaucacagucucuaccaaaagaagccaacaaacuguaaucccgaauaucggaucuagacccaggguaagggaugucuccagccgaauaagcaucuauuggacaauaguaaaaccgggagacauacuuuugauuaacagcacagggaaucuaauugcuccucgggguuacuucaaaauacgaagugggaaaagcucaauaaugagaucagaugcacccauuggcaaaugcaauucugaaugcaucacuccaaauggaagcauucccaaugacaaaccauuucaaaauguaaacaggaucacauauggggccugucccagauauguuaaacaaaacacucugaaauuggcaacagggaugcgaaauguaccagagaaacaaacuagaggcauauuuggcgcaaucgcggguuucauagaaaaugguugggagggaaugguggacgguugguacgguuucaggcaucaaaauucugagggcacaggacaagcagcagaucucaaaagcacucaagcagcaaucaaccaaaucaaugggaaacugaauagguuaaucgggaaaacaaacgagaaauuccaucagauugaaaaagaauucucggaaguagaaggaagaauucaggaccucgagaaauauguugaggacacuaaaauagaucucuggucauacaacgcggagcuucuuguugcccuggagaaccaacauacaauugaucuaacugacucagaaaugaacaaacuguuugaaagaacaaagaagcaacugagggaaaaugcugaggauaugggcaaugguuguuucaaaauauaccacaaaugugacaaugccugcauagggucaaucagaaauggaacuuaugaccaugauguguacagagaugaagcauuaaacaaccgguuccagaucaaagguguugagcugaagucaggauacaaagauuggauccuauggauuuccuuugccauaucauguuuuuugcuuuguguugcuuuguugggguucaucaugugggccugccaaaaaggcaacauuaggugcaacauuugcauuuga

SEQ ID NO: 40321 - RNA, 1701 nt, Artificial Sequence; identical to SEQ ID NO: 40295
  derived and/or modified CDS sequence (wt) from hemagglutinin__InfluenzaA__AFD64143

SEQ ID NO: 40322 - RNA, 1701 nt, Artificial Sequence
  derived and/or modified CDS sequence (wt) from hemagglutinin__InfluenzaA__AFD64154
augaagacuaucauugcuuugagcuacauucuaugucugguuuucgcucaaaaacuucccggaaaugacaacagcacggcaacgcugugccuugggcaccaugcaguaccaaacggaacgauagugaaaacaaucacgaaugaccaaauugaaguuacuaaugcuacugagcugguucagauuuccucaacagguggaauaugcgacaguccucaucagauccuugauggagaaaacugcacacuaauagaugcucuauugggagacccucagugugauggcuuccaaaauaagaaaugggaccuuuuuguugaacgcagcaaagccuacagcaacuguuacccuuaugaugugccggauuaugccucccuuaggucacuaguugccucauccggcacacuggaguuuaacaaugaaagcuucgauuggacuggagucacucagaauggaacaagcucugcuugcaaaaggagaucuaauaaaaguuucuuuaguagauugaauugguugacccacuuaaaauacaaauacccagcauugaacgugacuaugccaaacaaugaaaaauuugacaaauuguacauuugggggguucaccacccggguacggacagugaccaaaucagccuauaugcucaagcaucaggaagaaucacagucucuaccaaaagaagccaacaaacuguaaucccgaauaucggaucuagacccaggguaagggaugucuccagccgaauaagcaucuauuggacaauaguaaaaccgggagacauacuuuugauuaacagcacagggaaucuaauugcuccucggggcuacuucaaaauacgaagugggaaaagcucaauaaugagaucagaugcacccauuggcaaaugcaauucugaaugcaucacuccaaauggaagcauucccaaugacaaaccauuucaaaauguaaacaggaucacauauggggccugucccagauauguuaagcaaaacacucugaaauuggcaacagggaugcgaaauguaccagagaaacaaacuagaggcauauuuggcgcaaucgcggguuucauagaaaaugguugggagggaaugguggacgguugguacgguuucaggcaucaaaacucugagggcacaggacaagcagcagaucucaaaagcacucaagcagcaaucaaccaaaucaaugggaaacugaauagguuaaucgggaaaacaaacgagaaauuccaucagauugaaaaagaauucucggaaguagaaggaagaauucaggaccucgagaaauauguugaggacacuaaaauagaucucuggucauacaacgcggagcuucuuguugcccuggagaaccaacauacaauugaucuaacugacucagaaaugaacaaacuguuugaaagaacaaagaagcaacugagggaaaaugcugaggauaugggcaaugguuguuucaaaauauaccacaaaugugacaaugccugcauagggucaaucagaaauggaacuuaugaccaugauguguacagagaugaagcauuaaacaaccgguuccagaucaaagguguugagcugaagucaggauacaaagauuggauccuauggauuuccuuugccauaucauguuuuuugcuuuguguugcuuuguugggguucaucaugugggccugccagaaaggcaacauuaggugcaacauuugcauuuga

SEQ ID NO: 40323 - RNA, 1701 nt, Artificial Sequence
  derived and/or modified CDS sequence (wt) from hemagglutinin__InfluenzaA__AFD64179
augaagacuaucauugcuuugagcuacauucuaugucugguuuucgcucaaaaacuucccggaaaugacaacagcacggcaacgcugugccuugggcaccaugcaguaccaaacggaacgauagugaaaacaaucacgaaugaccaaauugaaguuacuaaugcuacugagcugguucagauuuccucaacagguggaauaugcgacaguccucaucagauccuugauggagaaaacugcacacuaauagaugcucuauugggagacccucagugugauggcuuccaaaauaagaaaugggaccuuuuuguugaacgcaguaaagccuacagcaacuguuacccuuaugaugugccggauuaugccucccuuaggucacuaguugccucauccggcacacuggaguuuaacaaugaaagcuucgauuggacuggagucacucagaauggaacaagcucugcuugcaaaaggagaucuaauaaaaguuucuucaguagauugaauugguugacccacuuaaaauacaaauacccagcauugaacgugacuaugccaaacaaugaaaaauuugacaaauuguacauuugggggguucaccacccggguacggacagugaccaaaucagccuauaugcucaagcaucaggaagaaucacagucucuaccaaaagaagccaacaaacuguaaucccgaauaucggaucuagacccaggguaagggaugucuccagccaaauaagcaucuauuggacaauaguaaaaccgggagacauacuuuugauuaacagcacagggaaucuaauugcuccucgggguuacuucaaaauacgaagugggaaaagcucaauaaugagaucagaugcacccauuggcaaaugcaauucugaaugcaucacuccaaauggaagcauucccaaugacaaaccauuucaaaauguaaacaggaucacauauggggccugucccagauauguuaagcaaaacacucugaaauuggcaacagggaugcgaaauguaccagagaaacaaacuagaggcauauuuggcgcaaucgcggguuucauagaaaaugguugggagggaaugguggacgguugguacgguuucaggcaucaaaauucugagggcacaggacaagcagcagaucucaaaagcacucaagcagcaaucaaccaaaucaaugggaaacugaauagguuaaucgggaaaacaaacgagaaauuccaucagauugaaaaagaauucucggaaguagaaggaagaauucaggaccucgagaaauauguugaggacacuaaaauagaucucuggucauacaacgcggagcuucuuguugcccuggagaaccaacauacaauugaucuaacugacucagaaaugaacaaacuguuugaaagaacaaagaagcaacugagggaaaaugcugaggauaugggcaaugguuguuucaaaauauaccacaaaugugacaaugccugcauagggucaaucagaaauggaacuuaugaccaugauguguacagagaugaagcauuaaacaaccgguuccagaucaaagguguugagcugaagucaggauacaaagauuggauccuauggauuuccuuugccauaucauguuuuuugcuuuguguugcuuuguugggguucaucaugugggccugccaaaaaggcaacauuaggugcaacauuugcauuuga

SEQ ID NO: 40324 - RNA, 1701 nt, Artificial Sequence
  derived and/or modified CDS sequence (wt) from hemagglutinin__InfluenzaA__AFD64190
augaagacuaucauugcuuugagcuacauucuaugucugguuuucgcucaaaaacuucccggaaaugacaacagcacggcaacgcugugccuugggcaccaugcaguaccaaacggaacgauagugaaaacaaucacgaaugaccaaauugaaguuacuaaugcuacugagcugguucagauuuccucaacagguggaauaugcgacaguccucaucagauccuugauggagaaaacugcacacuaauagaugcucuauugggagacccucagugugauggcuuccaaaauaagaaaugggaccuuuuuguugaacgcagcaaagccuacagcaacuguuacccuuaugaugugccggauuaugccucccuuaggucacuaguugccucauccggcacacuggaguuuaacaaugaaagcuucgauuggacuggagucacucagaauggaacaagcucugcuugcaaaaggagaucuaauaaaaguuucuuuaguagauugaauugguugacccacuuaaaauacaaauacccagcauugaacgugacuaugccaaacaaugaaaaauuugacaaauuguacauuugggggguucaccacccggguacggacagugaccaaaucagccuauaugcucaagcaucaggaagaaucacagucucuaccaaaagaagccaacaaacuguaaucccgaauaucggaucuagacccaggguaagggaugucuccagccaaauaagcaucuauuggacaauaguaaaaccgggagacauacuuuugauuaacagcacagggaaucuaauugcuccucggggcuacuucaaaauacgaagugggaaaagcucaauaaugagaucagaugcacccauuggcaaaugcaauucugaaugcaucacuccaaauggaagcauucccaaugacaaaccauuucaaaauguaaacaggaucacauauggggccugucccagauauguuaagcaaaacacucugaaauuggcaacagggaugcgaaauguaccagagaaacaaacuagaggcauauuuggcgcaaucgcggguuucauagaaaaugguugggagggaaugguggacgguugguacgguuucaggcaucaaaauucugagggcacaggacaagcagcagaucucaaaagcacucaagcagcaaucaaccaaaucaaugggaaacugaauagguuaaucgggaaaacaaacgagaaauuccaucagauugaaaaagaauucucggaaguagaaggaagaauucaggaccucgagaaauauguugaggacacuaaaauagaucucuggucauacaacgcggagcuucuuguugcccuggagaaccaacauacaauugaucuaacugacucagaaaugaacaaacuguuugaaagaacaaagaagcaacugagggaaaaugcugaggauaugggcaaugguuguuucaaaauauaccacaaaugugacaaugccugcauagggucaaucagaaauggaacuuaugaccaugauguguacagagaugaagcauuaaacaaccgguuccagaucaaagguguugagcugaagucaggauacaaagauuggauccuauggauuuccuuugccauaucauguuuuuugcuuuguguugcuuuguugggguucaucaugugggccugccagaaaggcaacauuaggugcaacauuugcauuuga

SEQ ID NO: 40325 - RNA, 1701 nt, Artificial Sequence; identical to SEQ ID NO: 40305
  derived and/or modified CDS sequence (wt) from hemagglutinin__InfluenzaA__AFD64201

SEQ ID NO: 40326 - RNA, 1701 nt, Artificial Sequence
  derived and/or modified CDS sequence (wt) from hemagglutinin__InfluenzaA__AFD64212
augaagacuaucauugcuuugagcuacauucuaugucugguuuucgcucaaaaacuucccggaaaugacaacagcacggcaacgcugugccuugggcaccaugcaguaccaaacggaacgauagugaaaacaaucacgaaugaccaaauugaaguuacuaaugcuacugagcugguucagaguuccucaacagguggaauaugcgacaguccucaucagauccuugauggagaaaacugcacacuaauagaugcucuauugggagacccucagugugauggcuuccaaaauaagaaaugggaccuuuuuguugaacgcagcaaagccuacagcaacuguuacccuuaugaugugccggauuaugccucccuuaggucacuaguugccucauccggcacacuggaguuuaacaaugaaagcuucaacuggacuggagucacucagaauggaacaagcucugcuugcaaaaggaaaucuaauaaaaguuucuuuaguagauugaauugguugacccacuuaaaauacaaauacccagcauugaacgugacuaugccaaacaaugaaaaauuugacaaauuguacauuugggggguucaccacccggguacggacaaugaccaaaucagccuauaugcucaagcaucaggaagaaucacagucucuaccaaaagaagccaacaaacuguaaucccgaauaucggaucuagacccaggguaagggacgucuccagcagaauaagcaucuauuggacaauaguaaaaccgggagacauacuuuugauuaacagcacagggaaucuaauugcuccucgggguuacuucaaaauacgaagugggaaaagcucaauaaugagaucagaugcacccauuggcaaaugcaauucugaaugcaucacuccaaauggaagcauucccaaugacaaaccauuucaaaauguaaacaggaucacauauggggccugucccagauauguuaagcaaaacacucugaaauuggcaacagggaugcgaaauguaccagagaaacaaacuagaggcauauuuggcgcaaucgcggguuucauagaaaaugguugggagggaaugguggacgguugguacgguuucaggcaucaaaauucugagggcacaggacaagccgcagaucucaaaagcacucaagcagcaaucaaccaaaucaaugggaaacugaauagguuaaucgggaaaacaaacgagaaauuccaucagauugaaaaagaauucucagaaguagaggggagaauucaggaccucgagaaauauguugaggacacuaaaauagaucucuggucauacaacgcggagcuucuuguugcccuggagaaccaacauacaauugaucuaacugacucagaaaugaacaaacuguuugaaagaacaaagaagcaacugagggaaaaugcugaggauaugggcaaugguuguuucaaaauauaccacaaaugugacaaugccugcauagggucaaucagaaauggaacuuaugaccaugauguauacagagaugaagcauuaaacaaccgguuccagaucaaagguguugagcugaagucaggauacaaagauuggauccuauggauuuccuuugccauaucauguuuuuugcuuuguguugcuuuguugggguucaucaugugggccugccaaaaaggcaacauuaggugcaacauuugcauuuga

SEQ ID NO: 40327 - RNA, 1701 nt, Artificial Sequence
  derived and/or modified CDS sequence (wt) from hemagglutinin__InfluenzaA__AFD64223
augaagacuaucauugcuuugagcuacauucuaugucugguuuucgcucaaaaacuucccggaaaugacaacagcacggcaacgcugugccuugggcaccaugcaguaccaaacggaacgauagugaaaacaaucacgaaugaccaaauugaaguuacuaaugcuacugagcugguucagaguuccucaacagguggaauaugcgacaguccucaucagauccuugauggagaaaacugcacacuaauagaugcucuauugggagacccucagugugauggcuuccaaaauaagaaaugggaccuuuuuguugaacgcagcaaagccuacagcaacuguuacccuuaugaugugccggauuaugccucccuuaggucacuaguugccucauccggcacacuggaguuuaacaaugaaagcuucaauuggacuggagucacucagaauggaacaagcucugcuugcaaaaggagaucuaauaaaaguuucuuuaguagauugaauugguugacccauuuaaaauacaaauacccagcauugaacgugacuaugccaaacaaugaaaaauuugacaaauuguacauuugggggguucuccacccggguacggacagugaccaaaucagacuauaugcucaagcaucaggaagaaucacagucucuaccaaaagaagccaacaaacuguaaucccgaauaucggaucuagacccaggguaagggaugucuccagcagaauaagcaucuauuggacaauaguaaaaccgggagacauacuuuugauuaacagcacagggaaucuaauugcuccuagggguuacuucaaaauacgaagugggaaaagcucaauaaugagaucagaugcacccauuggcaaaugcaauucugaaugcaucacuccaaauggaagcauucccaaugacaaaccauuucaaaauguaaacaggaucacauauggggccugucccagauauauuaagcaaaacacucugaaauuggcaacagggaugcgaaauguaccagagaaacaaacuagaggcauauuuggcgcaaucgcggguuucauagaaaaugguugggagggaaugguggacgguugguacgguuucaggcaucaaaauucugagggcacaggacaagcagcagaucucaaaagcacucaagcagcaaucaaccaaaucaaugggaaacugaauagguuaaucgggaaaacaaacgagaaauuccaucagauugaaaaagaauucucagaaguagaagggagaauucaggaccucgagaaauauguugaggacacuaaaauagaucucuggucauacaacgcggagcuucuuguugcccuggagaaccaauauacaauugaucuaacugacucagaaaugaacaaacuguuugaaagaacaaagaagcaacugagggaaaaugcugaggauaugggcaaugguuguuucaaaauauaccacaaaugugacaaugccugcauagggucaaucagaaauggaacuuaugaccaugauguauacagagaugaagcauuaaacaaccgguuccagaucaaagguguugagcugaagucaggauacaaagauuggauccuauggauuuccuuugccauaucauguuuuuugcuuuguguugcuuuguugggguucaucaugugggccugccaaaaaggcaacauuaggugcaacauuugcauuuga

SEQ ID NO: 40328 - RNA, 1701 nt, Artificial Sequence
  derived and/or modified CDS sequence (wt) from hemagglutinin__InfluenzaA__AFD64315
augaagacuaucauugcuuugagcuacauucuaugucugguuuucgcucaaaaacuucccggaaaugacaacagcacggcaacgcugugccuugggcaccaugcaguaccaaacggaacgauagugaaaacaaucacgaaugaccaaauugaaguuacuaaugcuacugagcugguucaaauuuccucaacagguggaauaugcgacaguccucaucagauccuugauggagaaaacugcacacuaauagaugcucuauugggagacccucagugugauggcuuccaaaauaagaaaugggaccuuuuuguugaacgcagcaaagccuacagcaacuguuacccuuaugaugugccggauuaugccucccuuaggucacuaguugccucauccggcacacuggaguuuaacaaugaaagcuucgauuggacuggagucacucagaauggaacaagcucugcuugcaaaaggagaucuaauaaaaguuucuuuaguagauugaauugguugacccacuuaaaauacaaauacccagcauugaacgugacuaugccaaacaaugaaaaauuugacaaauuguacauuugggggguucaccacccggguacggacagugaccaaaucagccuauaugcucaagcaucaggaagaaucacagucucuaccaaaagaagccaacaaacuguaaucccgaauaucggaucuagacccaggguaagggaugucuccagccgaauaagcaucuauuggacaauaguaaaaccgggagacauacuuuugauuaacagcacagggaaucuaauugcuccucggggcuacuucaaaauacgaagugggaaaagcucaauaaugagaucagaugcacccauuggcaaaugcaauucugaaugcaucacuccaaauggaagcauucccaaugacaaaccauuucaaaauguaaacaggaucacauauggggccugucccagauauguuaagcaaaacacucugaaauuggcaacagggaugcgaaauguaccagagaaacaaacuagaggcauauuuggcgcaaucgcggguuucauagaaaaugguugggagggaaugguggacgguugguacgguuucaggcaucaaaauucugagggcacaggacaagcagcagaucucaaaagcacucaagcagcaaucaaccaaaucaaugggaaacugaauagguuaaucgggaaaacaaacgagaaauuccaucagauugaaaaagaauucucggaaguagaaggaagaauucaggaccucgagaaauauguugaggacacuaaaauagaucucuggucauacaacgcggagcuucuuguugcccuggagaaccaacauacaauugaucuaacugacucagaaaugaacaaacuguuugaaagaacaaagaaucaacugagggaaaaugcugaggauaugggcaaugguuguuucaaaauauaccacaaaugugacaaugccugcauagggucaaucagaaauggaacuuaugaccaugauguguacagagaugaagcauuaaacaaccgguuccagaucaaagguguugagcugaagucaggauacaaagauuggauccuauggauuuccuuugccauaucauguuuuuugcuuuguguugcuuuguugggguucaucaugugggccugccagaaaggcaacauuaggugcaacauuugcauuuga

SEQ ID NO: 40329 - RNA, 1701 nt, Artificial Sequence
  derived and/or modified CDS sequence (wt) from hemagglutinin__InfluenzaA__AFD64326
augaagacuaucauugcuuugagcuacauucuaugucugguuuucgcucaaaaacuucccggaaaugacaacagcacggcaacgcugugccuugggcaccaugcaguaccaaacggaacgauagugaaaacaaucacgaaugaccaaauugaaguuacuaaugcuacugagcugguucagaguuccucaacagguggaauaugcgacaguccucaucagauccuugauggagaaaacugcacacuaauagaugcucuauugggagacccucagugugauggcuuccaaaauaagaaaugggaccuuuuuguugaacgcagcagagccuacagcaacuguuacccuuaugaugugccggauuaugccucccuuaggucacuaguugccucauccggcacacuggaguuuaacaaugaaagcuucaacuggacuggagucacucagaauggaacaagcucugcuugcaaaaggaaaucuaauaaaaguuucuuuaguagauugaauugguugacccacuuaaaauacaaauacccagcauugaacgugacuaugccaaacaaugaaaaauuugacaaauuguacauuugggggguucaccacccggguacggacaaugaccaaaucagccuguaugcucaagcaucaggaagaaucacagucucuaccaaaagaagccaacaaacuguaaucccgaauaucggaucuagacccaggguaagggacgucuccagcagaauaagcaucuauuggacaauaguaaaaccgggagacauacuuuugauuaacagcacagggaaucuaauugcuccucgggguuacuucaaaauacgaagugggaaaagcucaauaaugagaucagaugcacccauuggcaaaugcaauucugaaugcaucacuccaaauggaagcauucccaaugacaaaccauuucaaaauguaaacaggaucacauauggggccugucccagauauguuaagcaaaacacucugaaauuggcaacagggaugcgaaauguaccagagaaacaaacuagaggcauauuuggcgcaaucgcggguuucauagaaaaugguugggagggaaugguggacgguugguacgguuucaggcaucaaaauucugagggcacaggacaagcagcagaucucaaaagcacucaagcagcaaucaaccaaaucaaugggaaacugaauagguuaaucgggaaaacaaacgagaaauuccaucagauugaaaaagaauucucagaaguagaggggagaauucaggaccucgagaaauauguugaggacacuaaaauagaucucuggucauacaacgcggagcuucuuguugcccuggagaaccaacauacaauugaucuaacugacucagaaaugaacaaacuguuugaaagaacaaagaagcaacugagggaaaaugcugaggauaugggcaaugguuguuucaaaauauaccacaaaugugacaaugccugcauagggucaaucagaaauggaacuuaugaccaugauguauacagagaugaagcauuaaacaaccgguuccagaucaaagguguugagcugaagucaggauacaaagauuggauccuauggauuuccuuugccauaucauguuuuuugcuuuguguugcuuuguugggguucaucaugugggccugccaaaaaggcaacauuaggugcaacauuugcauuuga

SEQ ID NO: 40330 - RNA, 1701 nt, Artificial Sequence; identical to SEQ ID NO: 40289
  derived and/or modified CDS sequence (wt) from hemagglutinin__InfluenzaA__AFD64337

SEQ ID NO: 40331 - RNA, 1701 nt, Artificial Sequence; identical to SEQ ID NO: 32088
  derived and/or modified CDS sequence (wt) from hemagglutinin__InfluenzaA__AFD64348

SEQ ID NO: 40332 - RNA, 1701 nt, Artificial Sequence; identical to SEQ ID NO: 40289
  derived and/or modified CDS sequence (wt) from hemagglutinin__InfluenzaA__AFD64359

SEQ ID NO: 40333 - RNA, 1701 nt, Artificial Sequence
  derived and/or modified CDS sequence (wt) from hemagglutinin__InfluenzaA__AFD64370
augaagacuaucauugcuuugagcuacauucuaugucugguuuucgcucaaaaacuucccggaaaugacaacagcacggcaacgcugugccuugggcaccaugcaguaccaaacggaacgauagugaaaacaaucacgaaugaccaaauugaaguuacuaaugcuacugagcugguucagaguuccucaacagguggaauaugcgacaguccucaucagauccuugauggagaaaacugcacacuaauagaugcucuauugggagacccucauugugauggcuuccaaaauaagaaaugggaccuuuuuguugaacgcagcaaagccuacagcaacuguuacccuuaugaugugccggauuaugccucccuuaggucacuaguugccucauccggcacacuggaguuuaacaaugaaagcuucaacuggacuggagucacucagaauggaacaagcucugcuugcaaaaggaaaucuaauaaaaguuucuuuaguagauugaauugguugacccacuuaaaauacaaauacccagcauugaacgugacuaugccaaacaaugaaaaauuugacaaauuguacauuugggggguucaccacccggguacggacaaugaccaaaucagccuauaugcucaagcaucaggaagaaucacagucucuaccaaaagaagccaacaaacuguaaucccgaauaucggaucuagacccaggguaagggacaucuccagcagaauaagcaucuauuggacaauaguaaaaccgggagacauacuuuugauuaacagcacagggaaucuaauugcuccucgggguuacuucaaaauacgaagugggaaaagcucaauaaugagaucagaugcacccauuggcaaaugcaauucugaaugcaucacuccaaauggaagcauucccaaugacaaaccauuucaaaauguaaacaggaucacauauggggccugucccagauauguuaagcaaaacacucugaaauuggcaacagggaugcgaaauguaccagagaaacaaacuagaggcauauuuggcgcaaucgcggguuucauagaaaaugguugggagggaaugguggacgguugguacgguuucaggcaucaaaauucugagggcacaggacaagcagcagaucucaaaagcacucaagcagcaaucaaccaaaucaaugggaaacugaauagguuaaucgggaaaacaaacgagaaauuccaucagauugaaaaagaauucucagaaguagaggggagaauucaggaccucgagaaauauguugaggacacuaaaauagaucucuggucauacaacgcggagcuucuuguugcccuggagaaccaacauacaauugaucuaacugacucagaaaugaacaaacuguuugaaagaacaaagaagcaacugagggaaaaugcugaggauaugggcaaugguuguuucaaaauauaccacaaaugugacaaugccugcauagggucaaucagaaauggaacuuaugaccaugauguauacagagaugaagcauuaaacaaccgguuccagaucaaagguguugagcugaagucaggauacaaagauuggauccuauggauuuccuuugccauaucauguuuuuugcuuuguguugcuuuguugggguucaucaugugggccugccaaaaaggcaacauuaggugcaacauuugcauuuga

SEQ ID NO: 40334 - RNA, 1701 nt, Artificial Sequence; identical to SEQ ID NO: 32088
  derived and/or modified CDS sequence (wt) from hemagglutinin__InfluenzaA__AFD64381

SEQ ID NO: 40335 - RNA, 1701 nt, Artificial Sequence
  derived and/or modified CDS sequence (wt) from hemagglutinin__InfluenzaA__AFD64392
augaagacuaucauugcuuugagcuacauucuaugucugguuuucgcucaaaaacuucccggaaaugacaacagcacggcaacgcugugccuugggcaccaugcaguaccaaacggaacgauagugaaaacaaucacgaaugaccaaauugaaguuacuaaugcuacugagcugguucagaguuccucaacagguggaauaugcgacaguccucaucagauccuugauggagaaaacugcacacuaauagaugcucuauugggagacccucagugugauggcuuccaaaauaagaaaugggaccuuuuuguugaacgcagcaaagccuacagcaacuguuacccuuaugaugugccggauuaugccucccuuaggucacuaguugccucauccggcacacuggaguuuaacaaugaaagcuucaacuggacuggagucacucagaauggaacaagcucugcuugcaaaaggaaaucuaauaaaaguuucuuuaguagauugaauugguugacccacuuaaaauacaaauacccagcauugaacgugacuaugccaaacaaugaaaaauuugacaaauuguacauuugggggguucaccacccggguacggacaaugaccaaaucagccuauaugcucaagcaucaggaagaaucacagucucuaccaaaagaagccaacaaacuguaaucccgaauaucggaucuagacccaggguaagggacgucuccagcagaauaagcaucuauuggacaauaguaaaaccgggagacauacuuuugauuaacagcacagggaaucuaauugcuccucgggguuacuucaaaauacgaagugggaaaagcucaauaaugagaucagaugcacccauuggcaaaugcaauucugaaugcaucacuccaaauggaagcauucccaaugacaaaccauuucaaaauguaaacaggaucacauauggggccugucccagauauguuaagcaaaacacucugaaauuggcaacagggaugcgaaauguaccagagaaacaaacuagaggcauauuuggcgcaaucgcggguuucauagaaaaugguugggagggaaugguggacgguugguacgguuucaggcaucaaaauucugagggcacaggacaagcagcagaucucaaaagcacucaagcagcaaucaaccaaaucaaugggaaacugaauagguuaaucgggaaaacaaacgagaaauuccaucagauugaaaaagaauucucagaaguagaggggagaauucaggaccucgagaaauauguugaggacacuaaaauagaucucuggucauacaacgcggagcuucuuguugcccuggagaaccaacauacaauugaucuaacugacucagaaaugaacaaacuguuugaaagaacaaagaagcaacugagggaaaaugcugaggauaugggcaaugguuguuucaaaauauaccacaaaugugacaaugccugcauagggucaaucagaaauggaacuuaugaccaugauguguacagagaugaagcauuaaacaaccgguuccagaucaaagguguugagcugaagucaggauacaaagauuggauccuauggauuuccuuugccauaucauguuuuuugcuuuguguugcuuuguugggguucaucaugugggccugccaaaaaggcaacauuaggugcaacauuugcauuuga

SEQ ID NO: 40336 - RNA, 1701 nt, Artificial Sequence; identical to SEQ ID NO: 40305
  derived and/or modified CDS sequence (wt) from hemagglutinin__InfluenzaA__AFD64403

SEQ ID NO: 40337 - RNA, 1701 nt, Artificial Sequence; identical to SEQ ID NO: 40295
  derived and/or modified CDS sequence (wt) from hemagglutinin__InfluenzaA__AFD64414

SEQ ID NO: 40338 - RNA, 1701 nt, Artificial Sequence
  derived and/or modified CDS sequence (wt) from hemagglutinin__InfluenzaA__AFD64425
augaagacuaucauugcuuugagcuacauucuaugucugguuuucgcucaaaaacuucccggaaaugacaacagcacggcaacgcugugccuugggcaccaugcaguaccaaacggaacgauagugaaaacaaucacgaaugaccaaauugaaguuacuaaugcuacugagcugguucagauuuccucaacagguggaauaugcgacaguccucaucagauccuugauggagaaaacugcacacuaauagaugcucuauugggagacccucagugugauggcuuccaaaauaagaaaugggaccuuuuuguugaacgcagcaaagccuacagcaacuguuacccuuaugaugugccgaauuaugccucccuuaggucacuaguugccucauccggcacacuggaguuuaacaaugaaagcuucgauuggacuggagucacucagaauggaacaagcucugcuugcaaaaggagaucuaauaaaaguuucuuuaguagauugaauugguugacccacuuaaaauacaaauacccagcauugaacgugacuaugccaaacaaugaaaaauuugacaaauuguacauuugggggguucaccacccggguacggacagugaccaaaucagccuauaugcucaagcaucaggaagaaucacagucucuaccaaaagaagccaacaaacuguaaucccgaauaucggaucuagacccaggguaagggaugucuccagccgaauaagcaucuauuggacaauaguaaaaccgggagacauacuuuugauuaacagcacagggaaucuaauugcuccucgggguuacuucaaaauacgaagugggaaaagcucaauaaugagaucagaugcacccauuggcaaaugcaauucugaaugcaucacuccaaauggaagcauucccaaugacaaaccauuucaaaauguaaacaggaucacauauggggccugucccagauauguuaagcaaaacacucugaaauuggcaacagggaugcgaaauguaccagagaaacaaacuagaggcauauuuggcgcaaucgcggguuucauagaaaaugguugggagggaaugguggacgguugguacgguuucaggcaucaaaauucugagggcacaggacaagcagcagaucucaaaagcacucaagcagcaaucaaccaaaucaaugggaaacugaauagguuaaucgggaaaacaaacgagaaauuccaucagauugaaaaagaauucucggaaguagaaggaagaauucaggaccucgagaaauauguugaggacacuaaaauagaucucuggucauacaacgcggagcuucuuguugcccuggagaaccaacauacaauugaucuaacugacucagaaaugaacaaacuguuugaaagaacaaagaagcaacugagggaaaaugcugaggauaugggcaaugguuguuucaaaauauaccacaaaugugacaaugccugcauagggucaaucagaaauggaacuuaugaccauaauguguacagagaugaagcauuaaacaaccgguuccagaucaaagguguugagcugaagucaggauacaaagauuggauccuauggauuuccuuugccauaucauguuuuuugcuuuguguugcuuuguugggguucaucaugugggccugccaaaaaggcaacauuaggugcaacauuugcauuuga

SEQ ID NO: 40339 - RNA, 1701 nt, Artificial Sequence; identical to SEQ ID NO: 40307
  derived and/or modified CDS sequence (wt) from hemagglutinin__InfluenzaA__AFD64436

SEQ ID NO: 40340 - RNA, 1701 nt, Artificial Sequence; identical to SEQ ID NO: 40316
  derived and/or modified CDS sequence (wt) from hemagglutinin__InfluenzaA__AFD64447

SEQ ID NO: 40341 - RNA, 1701 nt, Artificial Sequence
  derived and/or modified CDS sequence (wt) from hemagglutinin__InfluenzaA__AFD64458
augaagacuaucauugcuuugagcuacauucuaugucugguuuucgcucaaaaacuucccggaaaugacaacagcacggcaacgcugugccuugggcaccaugcaguacaaaacggaacgauagugaaaacaaucacgaaugaccaaauugaaguuacuaaugcuacugagcugguucaaaguuccucaacagguggaauaugcgacaguccucaucagauccuugauggagaaaacugcacacuaauagaugcucuauugggagacccccagugugauggcuuccaaaauaagaaaugggaccuuuuuguugaacgcagcaaagccuacagcaacuguuacccuuaugaugugccggauuaugccucccuuaggucacuaguugccucauccggcacacuggaguuuaacaaugaaagcuucgauuggacuggagucacucagaauggaacaagcucugcuugcaaaaggagaucuaauaaaaguuucuuuaguagauugaauugguugacccacuuaaaauacaaauacccagcauugaacgugacuaugccaaacaaugaaaaauuugacaaauuguacauuugggggguucaccacccggguacggacagugaccaaaucagccuauaugcucaagcaucaggaagaaucacagucucuaccaaaagaagccaacaaacuguaaucccgaauaucggaucuagacccaggguaagggaugucuccagccgaauaagcaucuauuggacaauaguaaaaccgggagacauacuuuugauuaacagcacagggaaucuaauugcuccucgggguuacuucaaaauacgaagugggaaaagcucaauaaugagaucagaugcacccauuggcaaaugcaauucugaaugcaucacuccaaauggaagcauucccaaugacaaaccauuucaaaauguaaacaggaucacauauggggccugucccagauauguuaagcaaaacacucugaaauuggcaacagggaugcgaaauguaccagagaaacaaacuagaggcauauuuggcgcaaucgcggguuucauagaaaaugguugggagggaaugguggacgguugguacgguuucaggcaucaaaauucugagggcacaggacaagcagcagaucucaaaagcacucaagcagcaaucaaccaaaucaaugggaaacugaauagguuaaucgggaaaacaaacgagaaauuccaucagauugaaaaagaauucucagaaguagaagggagaauucaggaccucgagaaauauguugaggacacuaaaauagaucucuggucauacaacgcggagcuucuuguugcccuggagaaccaacauacaauugaucuaacugacucagaaaugaacaaacuguuugaaagaacaaagaagcaacugagggaaaaugcugaggauaugggcaaugguuguuucaaaauauaccacaaaugugacaaugccugcauagggucaaucagaaauggaacuuaugaccaugauguguacagagaugaagcauuaaacaaccgguuccagaucaaagguguugagcugaagucaggauacaaagauuggauccuauggauuuccuuugccauaucauguuuuuugcuuuguguugcuuuguugggguucaucaugugggccugccaaaaaggcaacauuaggugcaacauuugcauuuga

SEQ ID NO: 40342 - RNA, 1701 nt, Artificial Sequence
  derived and/or modified CDS sequence (wt) from hemagglutinin__InfluenzaA__AFD64795
augaagacuaucauugcuuugagcuacauucuaugucugguuuucgcucaaaaacuuccuggaaaugacaacagcacggcaacgcugugccuugggcaccaugcagugccaaacggaacgauagugaaaacaaucacgaaugaccaaauugaaguuacuaaugcuacugagcugguucagaguuccucaacaggugagauaugcaacaguccucaucagauccuugauggagaaaacugcacacuaauagaugcucuauugggggacccucagugugauggcuuccaaaacaagaaaugggaccuuuuuguugaacgaagcaaagcccacagcaacuguuacccuuaugaugugccggauuaugccucccuuaggucacuaguugccucauccggcacacuggaguuuaacaaugaaagcuucaauuggacuggagucacucaaaacggaacaagcucugcuugcauaaggagaucuaauaauaguuucuuuaguagauugaauugguugacccacuuaaacuucaaauacccagcauugaacgugacuaugccaaacaaugaacaauuugacaaauuguacauuugggggguucaccacccggguacggacaaggaccaaaucuuccuguaugcucaagcagcaggaagaaucacaguaucuaccaaaagaagccaacaagcuguaauuccgaauaucggaucuagacccagaguaaggaauaucccuagcagaguaagcaucuauuggacaauaguaaaaccgggagacauacuuuugauuaacagcacagggaaucuaauugcuccuagggguuacuucaaaauacgaagugggaaaagcucaauaaugagaucagaugcacccauuggcaaaugcaauucugcaugcaucacuccaaauggaagcauucccaaugacaaaccauuccaaaauguaaacaggaucacauacggggccugucccagauauguuaagcaaaacacucugaaauuggcaacaggaaugagaaauguaccagagaaacaaacuagaggcauauuuggcgcaauagcugguuucauagaaaaugguugggagggaaugguggaugguugguacgguuucaggcaucaaaauucugagggaaggggacaagcagcagaucucaaaagcacucaagcagcaaucgaucaaaucaaugggaagcugaauagauugaucgggaaaaccaacgagaaauuccaucagauugaaaaagaauucucagaagucgaagggagaauucaggaucuugagaaauauguugaggacacuaaaauagaucucuggucauacaacgcggagcuucuuguugcccuggagaaccaacacacaauugaucuaacugacucagaaaugaacaaacuguuugaaaaaacaaagaagcaacugagggaaaaugcugaggauaugggcaaugguuguuucaaaauauaccacaaaugugacaaugccugcauaggaucaaucagaaauggaacuuaugaccacgauguguacagagaugaagcauuaaacaaccgauuccagaucaagggaguugagcugaagucaggguacaaagauuggauccuauggauuuccuuugccauaucauguuuuuugcuuuguguugcuuuguugggguucaucaugugggccugccaaaaaggcaacauuaggugcaacauuugcauuuga

SEQ ID NO: 40343 - RNA, 1701 nt, Artificial Sequence
  derived and/or modified CDS sequence (wt) from hemagglutinin__InfluenzaA__AFD64799
augaagacuaucauugcuuugagcuacauucuaugucugguuuucgcucaaaaacuuccuggaaaugacaacagcacggcaacgcugugccuugggcaccaugcagugccaaacggaacgauagugaaaacaaucacgaaugaccaaauugaaguuacuaaugcuacugagcugguucagaguuccucaacaggugaaauaugcaacaguccucaucagauccuugauggagaaaacugcacacuaauagaugcucuauugggagacccucagugugauggcuuccaaaacaagaaaugggaccuuuuuguugaacgaagcaaagcccacagcaacuguuacccuuaugaugugccggauuaugccucccuuaggucacuaguugccucauccggcacacuggaguuuaacaaugaaagcuucaauuggacuggagucacucaaaacggaacaagcucugcuugcauaaggagaucuaauaauaguuucuuuaguagauugaauugguugacccacuuaaacuucaaauacccagcauugaacgugacuaugccaaacaaugaacaauuugacaaauuguacauuugggggguucaccacccggguacggacaaggaccaaaucuuccuguaugcucaagcaucaggaagaaucacaguaucuaccaaaagaagccaacaagcuguaauuccgaauaucggaucuagacccagaguaaggaauaucccuagcagaguaagcaucuauuggacaauaguaaaaccgggagacauacuuuugauuaacagcacagggaaucuaauugcuccuagggguuacuucaaaauacgaagugggaaaagcucaauaaugagaucagaugcacccauuggcaaaugcaauucugcaugcaucacuccaaauggaagcauucccaaugacaaaccauuccaaaauguaaacaggaucacauacggggccugucccagauauguuaagcaaaacacucugaaauuggcaacaggaaugagaaauguaccagagaaacaaacuagaggcauauuuggcgcaauagcggguuucauagaaaaugguugggagggaaugguggaugguugguacgguuucaggcaucaaaauucugagggaaggggacaagcagcagaucucaaaagcacucaagcagcaaucgaucaaaucaaugggaagcugaauagauugaucgggaaaaccaacgagaaguuccaucagauugaaaaagaauucucagaagucgaagggagaauucaggaccuugagaaauauguugaggacacuaaaauagaucucuggucauacaacgcggagcuucuuguugcccuggagaaccaacacacaauugaucuaacugacucagaaaugaacaaacuguuugaaaaaacaaagaaacaacugagggaaaaugcugaggauaugggcaaugguuguuucaaaauauaccacaaaugugacaaugccugcauaggaucaaucagaaauggaacuuaugaccacgauguguacagagaugaagcauuaaacaaccgauuccagaucaagggaguugagcugaagucaggguacaaagauuggauccuauggauuuccuuugccauaucauguuuuuugcuuuguguugcuuuguugggguucaucaugugggccugccaaaaaggcaacauuaggugcaacauuugcauuuga

SEQ ID NO: 40344 - RNA, 1701 nt, Artificial Sequence
  derived and/or modified CDS sequence (wt) from hemagglutinin__InfluenzaA__AFD64802
augaagaccaucauugcuuugagcuacauucuaugucugguuuucgcucaaaaacuuccuggaaaugacaacagcacggcaacgcugugccuugggcaccaugcagugccaaacggaacgauagugaaaacaaucacgaaugaccaaauugaaguuacuaaugcuacugagcugguucagaguuccucaacaggugaaauaugcaacaguccucaucagauccuugauggagaaaacugcacacuaauagaugcucuauugggagacccucagugugauggcuuccaaaacaagaaaugggaccuuuuuguugaacgaagcaaagcccacagcaacuguuacccuuaugaugugccggauuaugccucccuuaggucacuaguugccucauccggcacacuggaguuuaacaaugaaagcuucaauuggacuggagucacucaaaacggaacaagcucugcuugcauaaggagaucuaauaauaguuucuuuaguagauugaauugguugacccacuuaaacuucaaauacccagcauugaacgugacuaugccaaacaaugaacaauuugacaaauuguacauuugggggguucaccacccggguacggacaaggaccaaaccuuccuguaugcucaagcaucaggaagaaucacaguaucuaccaaaagaagccaacaagcuguaauuccgaauaucggaucuagacccagaguaaggaauaucccuagcagaguaagcaucuauuggacaauaguaaaaccgggagacauacuuuugauuaacagcacagggaaucuaauugcuccuagggguuacuucaaaauacgaagugggaaaagcucaauaaugagaucagaugcacccauuggcaaaugcaauucugcaugcaucacuccaaauggaagcauucccaaugacaaaccauuccaaaauguaaacaggaucacauacggggccugucccagauauguuaagcaaaacacucugaaauuggcaacaggaaugagaaauguaccagagaaacaaacuagaggcauauuuggcgcaauagcggguuucauagaaaaugguugggagggaaugguggaugguugguacgguuucaggcaucaaaauucugagggaaggggacaagcagcagaucucaaaagcacucaagcagcaaucgaucaaaucaaugggaagcugaauagauugaucgggaaaaccaacgagaaauuccaucagauugaaaaagaauucucagaagucgaaggaagaauucaggaccuugagaaauauguugaggacacuaaaauagaucucuggucauacaacgcggagcuucuuguugcccuggagaaccaacacacaauugaucuaacugacucagaaaugaacaaacuguuugaaaaaacaaagaagcaacugagggaaaaugcugaggauaugggcaaugguuguuucaaaauauaccacaaaugugacaaugccugcauaggaucaaucagaaauggaacuuaugaccacgauguguacagagaugaagcauuaaacaaccgauuccagaucaagggaguugagcugaagucagaguacaaagauuggauccuauggauuuccuuugccauaucauguuuuuugcuuuguguugcuuuguugggguucaucaugugggccugccaaaaaggcaacauuaggugcaacauuugcauuuga

SEQ ID NO: 40345 - RNA, 1701 nt, Artificial Sequence
  derived and/or modified CDS sequence (wt) from hemagglutinin__InfluenzaA__AFD64804
augaagacuaucauugcuuugagcuacauucuaugucugguuuucgcucaaaaacuuccuggaaaugacaacagcacggcaacgcugugccuugggcaccaugcagugccaaacggaacgauagugaaaacaaucacgaaugaccaaauugaaguuacuaaugcuacugagcugguucagaguuccucaacaggugaaauaugcaacaguccucaucagauccuugauggagaaaacugcacacuaauagaugcucuauugggagacccucagugugauggcuuccaaaacaagaaaugggaccuuuuuguugaacgaagcaaagcccacagcaacuguuacccuuaugaugugccggauuaugccucccuuaggucacuaguugccucauccggcacacuggaguuuaacaaugaaagcuucaauuggacuggagucacucaaaacggaacaagcucugcuugcauaaggagaucuaauaauaguuucuuuaguagauugaauugguugacccacuuaaacuucaaauacccagcauugaacgugacuaugccaaacaaugaacaauuugacaaauuguacauuugggggguucaccacccggguacggacaaggaccaaaucuuccuguaugcucaagcaucaggaagaaucacaguaucuaccaaaagaagccaacaagcuguaauuccgaauaucggaucuagacccagaguaaggaauaucccuagcagaguaagcaucuauuggacaauaguaaaaccgggagacauacuuuugauuaacagcacagggaaucuaauugcuccuagggguuacuucaaaauacgaagugggaaaagcucaauaaugagaucagaugcacccauuggcaaaugcaauucugcaugcaucacuccaaauggaagcauucccaaugacaaaccauuccaaaauguaaacaggaucacauacggggccugucccagauauguuaagcaaaacacucugaaauuggcaacaggaaugagaaauguaccagagaaacaaacuagaggcauauuuggcgcaauagcggguuucauagaaaaugguugggagggaaugauggaugguugguacgguuucaggcaucaaaauucugaggggaggggacaggcagcagaucucaaaagcacucaagcagcaaucgaucaaaucaaugggaagcugaauagauugaucgggaaaaccaacgagaaauuccaucagauugaaaaagaauucucagaagucgaagggagaauucaggaccuugagaaauauguugaggacacuaaaauagaucucuggucauacaacgcggagcuucuuguugcccuggagaaccaacacacaauugaucuaacugacucagaaaugaacaaacuguuugaaaaaacaaagaagcaacugagggaaaaugcugaggauaugggcaaugguuguuucaaaauauaccacaaaugugacaaugccugcauaggaucaaucagaaauggaacuuaugaccacgauguauacagagaugaagcauuaaacaaccgauuccagaucaagggaguugagcugaagucaggguacaaagauuggauccuauggauuuccuuugccauaucauguuuuuugcuuuguguugcuuuguugggguucaucaugugggccugccaaaaaggcaacauuaggugcaacauuugcauuuga

SEQ ID NO: 40346 - RNA, 1701 nt, Artificial Sequence
  derived and/or modified CDS sequence (wt) from hemagglutinin__InfluenzaA__AFD64806
augaagaccaucauugcuuugagcuacauucuaugucugguuuucgcucaaaaacuuccuggaaaugacaacagcacggcaacgcugugccuugggcaccaugcagugccaaacggaacgauagugaaaacaaucacgaaugaccaaauugaaguuacuaaugcuacugagcugguucagaguuccucaacaggugaaauaugcaacaguccucaucagauccuugauggagaaaacugcacacuaauagaugcucuauugggagacccucagugugauggcuuccaaaacaagaaaugggaccuuuuuguugaacgaagcaaagcccacagcaacuguuacccuuaugaugugccggauuaugccucccuuaggucacuaguugccucauccggcacacuggaguuuaacaaugaaagcuucaauuggacuggagucacucaaaacggaacaagcucugcuugcauaaggagaucuaauaauaguuucuuuaguagauugaauugguugacccacuuaaacuucaaauacccagcauugaacgugacuaugccaaacaaugaacaauuugacaaauuguacauuugggggguucaccacccggguacggacaaggaccaaaccuuccuguaugcucaagcaucaggaagaaucacaguaucuaccaaaagaagccaacaagcuguaauuccgaauaucggaucuagacccagaguaaggaauaucccuagcagaguaagcaucuauuggacaauaguaaaaccgggagacauacuuuugauuaacagcacagggaaucuaauugcuccuagggguuacuucaaaauacgaagugggaaaagcucaauaaugagaucagaugcacccauuggcaaaugcaauucugcaugcaucacuccaaauggaagcauucccaaugacaaaccauuccaaaauguaaacaggaucacauacggggccugucccagauauguuaagcaaaacacucugaaauuggcaacaggaaugagaaauguaccagagaaacaaacuagaggcauauuuggcgcaauagcggguuucauagaaaaugguugggagggaaugguggaugguugguacgguuucaggcaucaaaauucugagggaaggggacaagcagcagaucucaaaagcacucaagcagcaaucgaucaaaucaaugggaagcugaauagauugaucgggaaaaccaacgagaaauuccaucagauugaaaaagaauucucagaagucgaagggagaauucaggaccuugagaaauauguugaggacacuaaaauagaucucuggucauacaacgcggagcuucuuguugcccuggagaaccaacacacaauugaucuaacugacucagaaaugaacaaacuguuugaaaaaacaaagaagcaacugagggaaaaugcugaggauaugggcaaugguuguuucaaaauauaccacaaaugugacaaugccugcauaggaucaaucagaaauggaacuuaugaccacgauguguacagagaugaagcauuaaacaaccgauuccagaucaagggaguugagcugaagucaggguacaaagauuggauccuauggauuuccuuugccauaucauguuuuuugcuuuguguugcuuuguugggguucaucaugugggccugccaaaaaggcaacauuaggugcaacauuugcauuuga

SEQ ID NO: 40347 - RNA, 1701 nt, Artificial Sequence
  derived and/or modified CDS sequence (wt) from hemagglutinin__InfluenzaA__AFD64807
augaagaccaucauugcuuugagcuacauucuaugucugguuuucgcucaaaaacuuccuggaaaugacaacagcacggcaacgcugugccuugggcaccaugcagugccaaacggaacgauagugaaaacaaucacgaaugaccaaauugaaguuacuaaugcuacugagcugguucagaguuccucaacaggugaaauaugcaacaguccucaucagauccuugauggagaaaacugcacacuaauagaugcucuauugggagacccucagugugauggcuuccaaaacaagaaaugggaccuuuuuguugaacgaagcaaagcccacagcaacuguuacccuuaugaugugccggauuaugccucccuuaggucacuaguugccucauccggcacacuggaguuuaacaaugaaagcuucaauuggacuggagucacucaaaacggaacaagcucugcuugcauaaggagaucuaauaauaguuucuuuaguagauugaauugguugacccacuuaaacuucaaauacccagcauugaacgugacuaugccaaacaaugaacaauuugacaaauuguacauuugggggguucaccacccggguacggacaaggaccaaaccuuccuguaugcucaagcaucaggaagaaucacaguaucuaccaaaagaagccaacaagcuguaauuccgaauaucggaucuagacccagaguaagggauaucccuagcagaguaagcaucuauuggacaauaguaaaaccgggagacauacuuuugauuaacagcacagggaaucuaauugcuccuagggguuacuucaaaauacgaagugggaaaagcucaauaaugagaucagaugcaccccuuggcaaaugccauucugcaugcaucacuccaaauggaagcauucccaaugacaaaccauuccaaaauguaaacaggaucacauacggggccugucccagauauguuaagcaaaacacucugaaauuggcaacaggaaugagaaauguaccagagaaacaaacuagaggcauauuuggcgcaauagcggguuucauagaaaaugguugggagggaaugguggaugguugguacgguuucaggcaucaaaauucugagggaaggggacaagcagcagaucucaaaagcacucaagcagcaaucgaucaaaucaaugggaagcugaauagauugaucgggaaaaccaacgagaaauuccaucagauugaaaaagaauucucagaagucgaagggagaauucaggaccuugagaaauauguugaggacacuaaaauagaucucuggucauacaacgcggagcuucuuguugcccuggagaaccaacacacaauugaucuaacugacucagaaaugaacaaacuguuugaaaaaacaaagaagcaacugagggaaaaugcugaggauaugggcaaugguuguuucaaaauauaccacaaaugugacaaugccugcauaggaucaaucagaaauggaacuuaugaccacgauauguacagagaugaagcauuaaacaaccgauuccagaucaagggaguugagcugaagucaggguacaaagauuggauccuauggauuuccuuugccauaucauguuuuuugcuuuguguugcuuuguugggguucaucaugugggccugccaaaaaggcaacauuaggugcaacauuugcauuuga

SEQ ID NO: 40348 - RNA, 1701 nt, Artificial Sequence
  derived and/or modified CDS sequence (wt) from hemagglutinin__InfluenzaA__AFD64810
augaagacuaucauugcuuugagcuacauucuaugucugguuuucgcucaaaaacuuccuggaaaugacaacagcacggcaacgcugugccuugggcaccaugcagugccaaacggaacgauagugaaaacaaucacgaaugaccaaauugaaguuacuaaugcuacugagcugguucagaguuccucaacaggugaaauaugcaacaguccucaucagauccuugauggagaaaacugcacacuaauagaugcucuauugggagacccucagugugauggcuuccaaaacaagaaaugggaccuuuuuguugaacgaagcaaagcccacagcaacuguuacccuuaugaugugccggauuaugccucccuuaggucacuaguugccucauccggcacacuggaguuuaacaaugaaagcuucaauuggacuggagucacucaaaacggaacaagcucugcuugcauaaggagaucuaauaauaguuucuuuaguagauugaauugguugacccacuuaaacuucaaauacccagcauugaacgugacuaugccaaacaaugaacaauuugacaaauuguacauuugggggguucaccacccggguacggacaaggaccaaaucuuccuguaugcucaagcaucaggaagaaucacaguaucuaccaaaagaagccaacaagcuguaauuccgaauaucggaucuagacccagaguaaggaauaucccuagcagaguaagcaucuauuggacaauaguaaaaccgggagacauacuuuugauuaacagcacagggaaucuaauugcuccuagggguuacuucaaaauacgaagugggaaaagcucaauaaugagaucagaugcacccauuggcaaaugcaauucugcaugcaucacuccaaauggaagcauucccaaugacaaaccauuccaaaauguaaacaggaucacauacggggccugucccagauauguuaagcaaaacacucugaaauuggcaacaggaaugagaaauguaccagagaaacaaacuagaggcauauuuggcgcaauagcggguuucauagaaaaugguugggagggaaugguggaugguugguacgguuucaggcaucaaaauucugagggaaggggacaagcagcagaucucaaaagcacucaagcagcaaucgaucaaaucaaugggaagcugaauagauugaucgggaaaaccaacgagaaauuccaucagauugaaaaagaauucucagaagucgaagggagaauucaggaccuugagaaauauguugaggacacuaaaauagaucucuggucauacaacgcggagcuucuuguugcccuggagaaccaacacacaauugaucuaacugacucagaaaugaacaaacuguuugaaaaaacaaagaaacaacugagggaaaaugcugaggauaugggcaaugguuguuucaaaauauaccacaaaugugacaaugccugcauaggaucaaucagaaauggaacuuaugaccccgauguguacagagaugaagcauuaaacaaccgauuccagaucaagggaguugagcugaagucaggguacaaagauuggauccuauggauuuccuuugccauaucauguuuuuugcuuuguguugcuuuguugggguucaucaugugggccugccaaaaaggcaacauuaggugcaacauuugcauuuga

SEQ ID NO: 40349 - RNA, 1701 nt, Artificial Sequence
  derived and/or modified CDS sequence (wt) from hemagglutinin__InfluenzaA__AFD64812
augaagaccaucauugcuuugagcuacauucuaugucugguuuucgcucaaaaacuuccuggaaaugacaacagcacggcaacgcugugccuugggcaccaugcagugccaaacggaacgauagugaaaacaaucacgaaugaccaaauugaaguuacuaaugcuacugagcugguucagaguuccucaacaggugaaauaugcaacaguccucaucagauccuugauggagaaaacugcacacuaauagaugcucuauugggagacccucagugugauggcuuccaaaacaagaaaugggaccuuuuuguugaacgaagcaaagcccacagcaacuguuacccuuaugaugugccggauuaugccucccuuaggucacuaguugccucauccggcacacuggaguuuaacaaugaaagcuucaauuggacuggagucacucaaaacggaacaagcucugcuugcauaaggagaucuaauaauaguuucuuuaguagauugaauugguugacccacuuaaacuucaaauacccagcauugaacgugacuaugccaaacaaugaacaauuugacaaauuguacauuugggggguucaccacccggguacggacaaggaccaaaccuuccuguaugcucaagcaucaggaagaaucacaguaucuaccaaaagaagccaacaagcuguaauuccgaauaucggaucuagacccagaguaaggaauaucccuagcagaguaagcaucuauuggacaauaguaaaaccgggagacauacuuuugauuaacagcacagggaaucuaauugcuccuagggguuacuucaaaauacgaagugggaaaagcucaauaaugagaucagaugcacccauuggcaaaugcaauucugcaugcaucacuccaaauggaagcauucccaaugacaaaccauuccaaaauguaaacaggaucacauacggggccugucccagauauguuaagcaaaacacucugaaauuggcaacaggaaugagaaauguaccagagaaacaaacuagaggcauauuuggcgcaauagcggguuucauagaaaaugguugggagggaaugguggaugguugguacgguuucaggcaucaaaauucugagggaaggggacaagcagcagaucucaaaagcacccaagcagcaaccgaucaaaucaaugggaagcugaauagauugaucgggaaaaccaacgagaaauuccaucagauugaaaaagaauucucagaagucgaagggagaauucaggaccuugagaaauauguugaggacacuaaaauagaucucuggucauacaacgcggagcuucuuguugcccuggagaaccaacacacaauugaucuaacugacucagaaaugaacaaacuguuugaaaaaacaaagaagcaacugagggaaaaugcugaggauaugggcaaugguuguuucaaaauauaccacaaaugugacaaugccugcauaggaucaaucagaaauggaacuuaugaccacgauguguacagagaugaagcauuaaacaaccgauuccagaucaagggaguugagcugaagucaggguacaaagauuggauccuauggauuuccuuugccauaucauguuuuuugcuuuguguugcuuuguugggguucaucaugugggccugccaaaaaggcaacauuaggugcaacauuugcauuuga

SEQ ID NO: 40350 - RNA, 1701 nt, Artificial Sequence
  derived and/or modified CDS sequence (wt) from hemagglutinin__InfluenzaA__AFD64814
augaagaccaucauugcuuugagcuacauucuaugucugguuuucgcucaaaaacuuccuggaaaugacaacagcacggcaacgcugugccuugggcaccaugcagugccaaacggaacgauagugaaaacaaucacgaaugaccaaauugaaguuacuaaugcuacugagcugguucagaguuccucaacaggugaaauaugcaacaguccucaucagauccuugauggagaaaacugcacacuaauagaugcucuauugggagacccucagugugauggcuuccaaaacaagaaaugggaccuuuuuguugaacgaagcaaagcccacagcaacuguuacccuuaugaugugccggauuaugccucccuuaggucacuaguugccucauccggcacacuggaguuuaacaaugaaagcuucaauuggacuggagucacucaaaacggaacaagcucugcuugcauaaggagaucuaauaauaguuucuuuaguagauugaauugguugacccacuuaaacuucaaauauccagcauugaacgugacuaugccaaacaaugaacaauuugacaaauuguacauuugggggguucaccacccggguacggacaaggaccaaaccuuccuguaugcucaagcaucaggaagaaucacaguaucuaccaaaagaagccaacaagcuguaauuccgaauaucggaucuagacccagaguaaggaauaucccuagcagaguaagcaucuauuggacaauaguaaaaccgggagacauacuuuugauuaacagcacagggaaucuaauugcuccuagggguuacuucaaaauacgaagugggaaaagcucaauaaugagaucagaugcacccauuggcaaaugcaauucugcaugcaucacuccaaauggaagcauucccaaugacaaaccauuccaaaauguaaacaggaucacauacggggccugucccagauauguuaagcaaaacacucugaaauuggcaacaggaaugagaaauguaccagagaaacaaacuagaggcauauuuggcgcaauagcggguuucauagaaaaugguugggagggaaugguggaugguugguacgguuucaggcaucaaaauucugagggaaggggacaagcagcagaucucaaaagcacucaagcagcaaucgaucaaaucaaugggaagcugaauagauugaucgggaaaaccaacgagaaauuccaucagauugaaaaagaauucucagaagucgaagggagaauucaggaccuugagaaauauguugaggacacuaaaauagaucucuggucauacaacgcggagcuucuuguugcccuggagaaccaacacacaauugaucuaacugacucagaaaugaacaaacuguuugaaaaaacaaagaagcaacugagggaaaaugcugaggauaugggcaaugguuguuucaaaauauaccacaaaugugacaaugccugcauaggaucaaucagaaauggaacuuaugaccccgauguguacagagaugaagcauuaaacaaccgauuccagaucaagggaguugagcugaagucaggguacaaagauuggauccuauggauuuccuuugccauaucauguuuuuugcuuuguguugcuuuguugggguucaucaugugggccugccaaaaaggcaacauuaggugcaacauuugcauuuga

SEQ ID NO: 40351 - RNA, 1701 nt, Artificial Sequence
  derived and/or modified CDS sequence (wt) from hemagglutinin__InfluenzaA__AFD64816
augaagacuaucauugcuuugagcuacauucuaugucugguuuucgcucaaaaacuuccugaaaaugacaacagcacggcaacgcugugccuugggcaccaugcagugccaaacgggacgauagugaaaacaaucacgaaugaccaaauugaaguuacuaaugcuacugaacugguucagaguuccucaacaggugaaauaugcaacaguccucaucagauccuugauggagaaaacugcacacuaauagaugcucuauugggagacccucagugugauggcuuccaaaacaagaaaugggaccuuuuuguugaacgaagcaaagcccacagcaacuguuacccuuaugaugugccggauuaugccucccuuaggucacuaguugccucauccggcacacuggaguuuaacaaugaaagcuucaauuggacuggagucacucaaaacggaacaagcucugcuugcaugaggagaucuaauaauaguuucuuuaguagauugaauugguugacccacuuaaacuucaaauacccagcauugaacgugacuaugccaaacaaugaacaauuugacaaauuguacauuugggggguucaccacccggguacggacaaggaccaaaucuuccuguaugcucaagcaucaggaagaaucacaguaucuaccaaaagaagccaacaagcuguaauuccgaauaucggaucuagacccagaguaaggaauaucccuagcagaguaagcaucuauuggacaauaguaaaaccgggagacauacuuuugauuaacagcacagggaaucuaauugcuccuagggguuacuucaaaauacgaagugggaaaagcucaauaaugagaucagaugcacccauuggcaaaugcaauucugcaugcaucacuccaaauggaagcauucccaaugacaaaccauuccaaaauguaaacaggaucacauacggggccugucccagauauguuaagcaaaacacucugaaauuggcaacaggaaugagaaauguaccagagaaacaaacuagaggcauauuuggcgcaauagcggguuucauagaaaaugguugggagggaaugguggaugguugguacgguuucaggcaucaaaauucugagggaaggggacaggcagcagaucucaaaagcacucaagcagcaaucgaucaaaucaaugggaagcugaauagauugaucgggaaaaccaacgagaaauuccaucagauugaaaaagaauucucagaagucgaagggagaauucaggaccuugagaaauauguugaagacacuaaaauagaucucuggucauacaacgcggagcuucuuguugcccuggagaaccaacacacaauugaucuaacugacucagaaaugaacaaacuguuugaaaaaacaaagaagcaacugagggaaaaugcugaggauaugggcaaugguuguuucaaaauauaccacaaaugugacaaugccugcauaggaucaaucagaaauggaacuuaugaccacgauguguacagagaugaagcauuaaacaaccgauuccagaucaagggaguugagcugaagucaggguacaaagauuggauccuauggauuuccuuugccauaucauguuuuuugcuuuguguugcuuuguugggguucaucaugugggccugccaaaaaggcaacauuaggugcaacauuugcauuuga

SEQ ID NO: 40352 - RNA, 1701 nt, Artificial Sequence
  derived and/or modified CDS sequence (wt) from hemagglutinin__InfluenzaA__AFD64818
augaagaccaucauugcuuugagcuacauucuaugucugguuuucgcucaaaaacuuccuggaaaugacaacagcacggcaacgcugugccuugggcaccaugcagugccaaacggaacgauagugaaaacaaucacgaaugaccaaauugaaguuacuaaugcuacugagcugguucagaguuccucaacaggugaaauaugcaacaguccucaucagauccuugauggagaaaacugcacacuaauagaugcucuauugggagacccucagugugauggcuuccaaaacaagaaaugggaccuuuuuguugaacgaagcaaagcccacagcaacuguuacccuuaugaugugccggauuaugccucccuuaggucacuaguugccucauccggcacacuggaguuuaacaaugaaagcuucaauuggacuggagucacucaaaacggaacaagcucugcuugcauaaggagaucuaauaauaguuucuuuaguagauugaauugguugacccacuuaaacuucaaauacccagcauugaacgugacuaugccaaacaaugaacaauuugacaaauuguacauuugggggguucaccacccggguacggacaaggaccaaaccuuccuguaugcucaagcaucaggaagaaucacaguaucuaccaaaagaagccaacaagcuguaauuccgaauaucggaucuagacccagaguaaggaauaucccuagcagaguaagcaucuauuggacaauaguaaaaccgggagacauacuuuugauuaacagcacagggaaucuaauugcuccuagggguuacuucaaaauacgaagugggaaaagcucaauaaugagaucagaugcaccccuuggcaaaugcauuucugcaugcaucacuccaaauggaagcauucccaaugacaaaccauuccaaaauguaaacaggaucacauacggggccugucccagauauguuaagcaaaacacucugaaauuggcaacaggaaugagaaauguaccagagaaacaaacuagaggcauauuuggcgcaauagcggguuucauagaaaaugguugggagggaaugguggaugguugguacgguuucaggcaucaaaauucugagggaaggggacaagcagcagaucucaaaagcacucaagcagcaaucgaucaaaucaaugggaagcugaauagauugaucgggaaaaccaacgagaaauuccaucagauugaaaaagaauucucagaagucgaagggagaauucaggaccuugagaaauauguugaggacacuaaaauagaucucuggucauacaacgcggagcuucuuguugcccuggagaaccaacacacaauugaucuaacugacucagaaaugaacaaacuguuugaaaaaacaaagaagcaacugagggaaaaugcugaggauaugggcaaugguuguuucaaaauauaccacaaaugugacaaugccugcauaggaucaaucagaaauggaacuuaugaccacgauguguacagagaugaagcauuaaacaaccgauuccagaucaagggaguugagcugaagucaggguacaaagauuggauccuauggauuuccuuugccauaucauguuuuuugcuuuguguugcuuuguugggguucaucaugugggccugccaaaaaggcaacauuaggugcaacauuugcauuuga

SEQ ID NO: 40353 - RNA, 1701 nt, Artificial Sequence
  derived and/or modified CDS sequence (wt) from hemagglutinin__InfluenzaA__AFD64819
augaagaccaucauugcuuugagcuacauucuaugucugguuuucgcucaaaaacuuccuggaaaugacaacagcacggcaacgcugugccuugggcaccaugcagugccaaacggaacgauagugaaaacaaucacgaaugaccaaauugaaguuacuaaugcuacugagcugguucagaguuccucaacaggugaaauaugcaacaguccucaucagauccuugauggagaaaacugcacacuaauagaugcucuauugggagacccucagugugauggcuuccaaaacaagaaaugggaccuuuuuguugaacgaagcaaagcccacagcaacuguuacccuuaugaugugccggauuaugccucccuuaggucacuaguugccucauccggcacacuggaguuuaacaaugaaagcuucaauuggacgggagucacucaaaacggaacaagcucugcuugcauaaggagaucuaauaauaguuucuuuaguagauugaauugguugacccacuuaaacuucaaauaccccgcauugaacgugacuaugccaaacaaugaacaauuugacaaauuguacauuugggggguucaccacccggguacggacaaggaccaaaccuuccuguaugcucaagcaucaggaagaaucacaguaucuaccaaaagaagccaacaagcuguaauuccgaauaucggaucuagacccagaauaaggaauaucccuagcagaguaagcaucuauuggacaauaguaaaaccgggagacauacuuuugauuaacagcacagggaaucuaauugcuccuagggguuacuucaaaauacgaagugggaaaagcucaauaaugagaucagaugcacccauuggcaaaugcauuucugcaugcaucacuccaaauggaagcauucccaaugacaaaccauuccaaaauguaaacaggaucacauacggggccugucccagauauguuaagcaaaacacucugaaauuggcaacaggaaugagaaauguaccagagaaacaaacuagaggcauauuuggcgcaauagcggguuucauagaaaaugguugggagggaaugguggaugguugguacgguuucaggcaucaaaauucugagggaaggggacaagcagcagaucucaaaagcacucaagcagcaaucgaucaaaucaaugggaagcugaauagauugaucgggaaaaccaacgagaaauuccaucagauugaaaaagaauucucagaagucgaagggagaauucaggaccuugagaaauauguugaggacacuaaaauagaucucuggucauacaacgcggagcuucuuguugcccuggagaaccaacacacaauugaucuaacugacucagaaaugaacaaacuguuugaaaaaacaaagaagcaacugagggaaaaugcugaggauaugggcaaugguuguuucaaaauauaccacaaaugugacaaugccugcauaggaucaaucagaaauggaacuuaugaccccgauguguacagagaugaagcauuaaacaaccgauuccagaucaagggaguugagcugaagucaggguacaaagauuggauccuauggauuuccuuugccauaucauguuuuuugcuuuguguugcuuuguugggguucaucaugugggccugccaaaaaggcaacauuaggugcaacauuugcauuuga

SEQ ID NO: 40354 - RNA, 1701 nt, Artificial Sequence
  derived and/or modified CDS sequence (wt) from hemagglutinin__InfluenzaA__AFD64820
augaagaccaucauugcuuugagcuacauucuaugucugguuuucgcucaaaaacuuccuggaaaugacaacagcacggcaacgcugugccuugggcaccaugcagugccaaacggaacgauagugaaaacaaucacgaaugaccaaauugaaguuacuaaugcuacugagcugguucagaguuccucaacaggugaaauaugcaacaguccucaucagauccuugauggagaaaacugcacacuaauagaugcucuauugggagacccucagugugauggcuuccaaaacaagaaaugggaccuuuuuguugaacgaagcaaagcccacagcaacuguuacccuuaugaugugccggauuaugccucccuuaggucacuaguugccucauccggcacacuggaguuuaacaaugaaagcuucaauuggacuggagucacucaaaacggaacaagcucugcuugcauaaggagaucuaauaauaguuucuuuaguagauugaauugguugacccacuuaaacuucaaauacccagcauugaacgugacuaugccaaacaaugaacaauuugacaaauuguacauuugggggguccaccacccggguacggacaaggaccaaaucuuccuguaugcucaagcaucaggaagaaucacaguaucuaccaaaagaagccaacaagcuguaauuccgaauaucggaucuagacccagaguaaggaauaucccuagcagaguaagcaucuauuggacaauaguaaaaccgggagacauacuuuugauuaacagcacagggaaucuaauugcuccuagggguuacuucaaaauacgaagugggaaaagcucaauaaugagaucagaugcacccauuggcaaaugcaauucugcaugcaucacuccaaauggaagcauucccaaugacaaaccauuccaaaauguaaacaggaucacauacggggccugucccagauauguuaagcaaaacacucugaaauuggcaacaggaaugagaaauguaccagagaaacaaacuagaggcauauuuggcgcaauagcagguuucauagaaaaugguugggagggaaugguggaugguugguacgguuucaggcaucaaaauucugagggaaggggacaagcagcagaucucaaaagcacucaagcagcaaucgaucaaaucaaugggaagcugaauagauugaucgggaaaaccaacgagaaauuccaucagauugaaaaagaauucucagaagucgaagggagaauucaggaccuugagaaauauguugaggacacuaaaauagaucucuggucauacaacgcggagcuucuuguugccuuggagaaccaacacacaauugaucuaacugacucagaaaugaacaaacuguuugaaaaaacaaagaagcaacugagggaaaaugcugaggauaugggcaaugguuguuucaaaauauaccacaaaugugacaaugccugcauaggaucaaucagaaauggaacuuaugaccacgauguguacagagaugaagcauuaaacaaccgauuccagaucaagggaguugagcugaagucaggguacaaagauuggauccuauggauuuccuuugccauaucauguuuuuugcuuuguguugcuuuguugggguucaucaugugggccugccaaaaaggcaacauuaggugcaacauuugcauuuga

SEQ ID NO: 40355 - RNA, 1701 nt, Artificial Sequence
  derived and/or modified CDS sequence (wt) from hemagglutinin__InfluenzaA__AFD64822
augaagacuaucauugcuuugagcuacauucuaugucugguuuucgcucaaaaacuuccuggaaaugacaacagcacggcaacgcugugccuugggcaccaugcagugccaaacgggacgauagugaaaacaaucacgaaugaccaaauugaaguuacuaaugcuacugaacugguucagaguuccucaacaggugaaauaugcaacaguccucaucagauccuugauggagaaaacugcacacuaauagaugcucuauugggagacccucagugugauggcuuccaaaacaagaaaugggaccuuuuuguugaacgaagcaaagcccacagcaacuguuacccuuaugaugugccggauuaugccucccuuaggucacuaguugccucauccggcacacuggaguuuaacaaugaaagcuucaauuggacuggagucacucaaaacggaacaagcucugcuugcaugaggagaucuaauaauaguuucuuuaguagauugaauugguugacccacuuaaacuucaaauacccagcauugaacgugacuaugccaaacaaugaacaauuugacaaauuguacauuugggggguucaccacccggguacggacaaggaccaaaucuuccuguaugcucaagcaucaggaagaaucacaguaucuaccaaaagaagccaacaagcuguaauuccgaauaucggaucuagacccagaguaaggaauaucccuagcagaguaagcaucuauuggacaauaguaaaaccgggagacauacuuuugauuaacagcacagggaaucuaauugcuccuagggguuacuucaaaauacgaagugggaaaagcucaauaaugagaucagaugcacccauuggcaaaugcaauucugcaugcaucacuccaaauggaagcauucccaaugacaaaccauuccaaaauguaaacaggaucacauacggggccugucccagauauguuaagcaaaacacucugaaauuggcaacaggaaugagaaauguaccagagaaacaaacuagaggcauauuuggcgcaauagcggguuucauagaaaaugguugggagggaaugguggaugguugguacgguuucaggcaucaaaauucugagggaaggggacaggcagcagaucucaaaagcacucaagcagcaaucgaucaaaucaaugggaagcugaauagauugaucgggaaaaccaacgagaaauuccaucagauugaaaaagaauucucagaagucgaagggagaauucaggaccuugagaaauauguugaagacacuaaaauagaucucuggucauacaacgcggagcuucuuguugcccuggagaaccaacacacaauugaucuaacugacucagaaaugaacaaacuguuugaaaaaacaaagaagcaacugagggaaaaugcugaggauaugggcaaugguuguuucaaaauauaccacaaaugugacaaugccugcauaggaucaaucagaaauggaacuuaugaccacgauguguacagagaugaagcauuaaacaaccgauuucagaucaagggaguugagcugaagucaggguacaaagauuggauccuauggauuuccuuugccauaucauguuuuuugcuuuguguugcuuuguugggguucaucaugugggccugccaaaaaggcaacauuaggugcaacauuugcauuuga

SEQ ID NO: 40356 - RNA, 1701 nt, Artificial Sequence
  derived and/or modified CDS sequence (wt) from hemagglutinin__InfluenzaA__AFD64823
augaagacuaucauugcuuugagcuacauucuaugucugguuuucgcucaaaaacuuccuggaaaugacaacagcacggcaacgcugugccuugggcaccaugcagugccaaacggaacgauagugaaaacaaucacgaaugaccaaauugaaguuacuaaugcuacugagcugguucagaguuccucaacaggugagauaugcaacaguccucaucagauccuugauggagaaaacugcacacuaauagaugcucuauugggggacccucagugugauggcuuccaaaacaagaaaugggaccuuuuuguugaacgaagcaaagcccacagcaacuguuacccuuaugaugugccggauuaugccucccuuaggucacuaguugccucauccggcacacuggaguuuaacaaugaaagcuucaauuggacuggagucacucaaaacggaacaagcucugcuugcauaaggagaucuaauaauaguuucuuuaguagauugaauugguugacccacuuaaacuucaaauacccagcauugaacgugacuaugccaaacaaugaacaauuugacaaauuguacauuugggggguucaccacccggguacggacaaggaccaaaucuuccuguaugcucaagcagcaggaagaaucacaguaucuaccaaaagaagccaacaagcuguaauuccgaauaucggaucuagacccagaguaaggaauaucccuagcagaguaagcaucuauuggacaauaguaaaaccgggagacauacuuuugauuaacagcacagggaaucuaauugcuccuagggguuacuucaaaauacgaagugggaaaagcucaauaaugagaucagaugcacccauuggcagaugcaauucugcaugcaucacuccaaauggaagcauucccaaugacaaaccauuccaaaauguaaacaggaucacauacggggccugucccagauauguuaagcaaaacacucugaaauuggcaacaggaaugagaaauguaccagagaaacaaacuagaggcauauuuggcgcaauagcugguuucauagaaaaugguugggagggaaugguggaugguugguacgguuucaggcaucaaaauucugagggaaggggacaagcagcagaucucaaaagcacucaagcagcaaucgaucaaaucaaugggaagcugaauagauugaucgggaaaaccaacgagaaauuccaucagauugaaaaagaauucucagaagucgaagggagaauucaggaucuugagaaauauguugaggacacuaaaauagaucucuggucauacaaugcggagcuucuuguugcccuggagaaccaacacacaauugaucuaacugacucagaaaugaacaaacuguuugaaaaaacaaagaagcaacugagggaaaaugcugaggauaugggcaaugguuguuucaaaauauaccacaaaugugacaaugccugcauaggaucaaucagaaauggaacuuaugaccacgauguguacagagaugaagcauuaaacaaccgauuccagaucaagggaguugagcugaagucaggguacaaagauuggauccuauggauuuccuuugccauaucauguuuuuugcuuuguguugcuuuguugggguucaucaugugggccugccaaaaaggcaacauuaggugcaacauuugcauuuga

SEQ ID NO: 40357 - RNA, 1701 nt, Artificial Sequence
  derived and/or modified CDS sequence (wt) from hemagglutinin__InfluenzaA__AFD64824
augaagaccaucauugcuuugagcuacauucuaugucugguuuucgcucaaaaacuuccuggaaaugacaacagcacggcaacgcugugccuugggcaccaugcagugccaaacggaacgauagugaaaacaaucacgaaugaccaaauugaaguuacuaaugcuacugagcugguucagaguuccucaacaggugaaauaugcaacaguccucaucagauccuugauggagaaaacugcacacuaauagaugcucuauugggagacccucagugugauggcuuccaaaacaagaaaugggaccuuuuuguugaacgaagcaaagcccacagcaacuguuacccuuaugaugugccggauuaugccucccuuaggucacuaguugccucauccggcacacuggaguuuaacaaugaaagcuucaauuggacuggagucacucaaaacggaacaagcucugcuugcauaaggagaucuaauaauaguuucuuuaguagauuaaauugguugacccacuuaaacuucaaauacccagcauugaacgugacuaugccaaacaaugaacaauuugacaaauuguacauuugggggguucaccacccggguacggacaaggaccaaaccuuccuguaugcucaagcaucaggaagaaucacaguaucuaccaaaagaagccaacaagcuguaauuccgaauaucggaucuagacccagaguaaggaauaucccuagcagaguaagcaucuauuggacaauaguaaaaccgggagacauacuuuugauuaacagcacagggaaucuaauugcuccuagggguuacuucaaaauacgaagugggaaaagcucaauaaugagaucagaugcacccauuggcaaaugcaauucugcaugcaucacuccaaauggaagcauucccaaugacaaaccauuccaaaauguaaacaggaucacauacggggccugucccagauauguuaagcaaaacacucugaaauuggcaacaggaaugagaaauguaccagagaaacaaacuagaggcauauuuggcgcaauagcggguuucauagaaaaugguugggagggaaugguggaugguugguacgguuucaggcaucaaaauucugagggaaggggacaagcagcagaucucaaaagcacucaagcagcaaucgaucaaaucaaugggaagcugaauagauugaucgggaaaaccaacgagaaauuccaucagauugaaaaagaauucucagaagucgaagggagaauucaggaccuugagaaauauguugaggacacuaaaauagaucucuggucauacaacgcggagcuucuuguugcccuggagaaccaacacacgauugaucuaacugacucagaaaugaacaaacuguuugaaaaaacaaagaagcaacugagggaaaaugcugaggauaugggcaaugguuguuucaaaauauaccacaaaugugacaaugccugcauaggaucaaucagaaauggaacuuaugaccacgauguguacagagaugaagcauuaaacaaccgauuccagaucaagggaguugagcugaagucaggguacaaagauuggauccuauggauuuccuuugccacaucauguuuuuugcuuuguguugcuuuguugggguucaucaugugggccugccaaaaaggcaacauuaggugcaacauuugcauuuga

SEQ ID NO: 40358 - RNA, 1701 nt, Artificial Sequence; identical to SEQ ID NO: 40346
  derived and/or modified CDS sequence (wt) from hemagglutinin__InfluenzaA__AFD64825

SEQ ID NO: 40359 - RNA, 1701 nt, Artificial Sequence; identical to SEQ ID NO: 40346
  derived and/or modified CDS sequence (wt) from hemagglutinin__InfluenzaA__AFD64827

SEQ ID NO: 40360 - RNA, 1701 nt, Artificial Sequence
  derived and/or modified CDS sequence (wt) from hemagglutinin__InfluenzaA__AFD64828
augaagacuaucauugcuuugagcuacauucuaugucugguuuucgcucaaaaacuuccuggaaaugacaacagcacggcaacgcugugccuugggcaccaugcagugccaaacggaacgauagugaaaacaaucacgaaugaccaaauugaaguuacuaaugcuacugagcugguucagaguuccucaacaggugaaauaugcaacaguccucaucagauccuugauggagaaaacugcacacuaauagaugcucuauugggagacccucagugugauggcuuccaaaacaagaaaugggaccuuuuuguugaacgaagcaaagcccacagcaacuguuacccuuaugaugugccggauuaugccucccuuaggucacuaguugccucauccggcacacuggaguuuaacaaugaaagcuucaauuggacuggagucacucaaaacggaacaagcucugcuugcauaaggagaucuaauaauaguuucuuuaguagauugaauugguugacccacuuaaacuucaaauacccagcauugaacgugacuaugccaaacaaugaacaauuugacaaauuguacauuugggggguucaccacccggguacggacaaggaccaaaucuuccuguaugcucaagcaucaggaagaaucacaguaucuaccaaaagaagccaacaagcuguaauucccaauaucggaucuagacccagaguaaggaauaucccuagcagaguaagcaucuauuggacaauaguaaaaccgggagacauacuuuugauuaacagcacagggaaucuaauugcuccuagggguuacuucaaaauacgaagugggaaaagcucaauaaugagaucagaugcacccauuggcaaaugcaauucugcaugcaucacuccaaauggaagcauucccaaugacaaaccauuccaaaauguaaacaggaucacauacggggccugucccagauauguuaagcaaaacacucugaaauuggcaacaggaaugagaaauguaccagagaaacaaacuagaggcauauuuggcgcaauagcggguuucauagaaaaugguugggagggaaugauggaugguugguacgguuucaggcaucaaaauucugagggaaggggacaggcagcagaucucaaaagcacucaagcagcaaucgaucaaaucaaugggaagcugaauagauugaucgggaaaaccaacgagaaauuccaucagauugaaaaagaauucucagaagucgaagggagaauucaggaccuugagaaauauguugaggacacuaaaauagaucucuggucauacaacgcggagcuucuuguugcccuggagaaccaacacacaauugaucuaacugacucagaaaugaacaaacuguuugaaaaaacaaagaagcaacugagggaaaaugcugaggauaugggcaaugguuguuucaaaauauaccacaaaugugacaaugccugcauaggaucaaucagaaauggaacuuaugaccccgauguauacagagaugaagcauuaaacaaccgauuccagaucaagggaguugagcugaagucaggguacaaagauuggauccuauggauuuccuuugccauaucauguuuuuugcuuuguguugcuuuguugggguucaucaugugggccugccaaaaaggcaacauuaggugcaacauuugcauuuga

SEQ ID NO: 40361 - RNA, 1701 nt, Artificial Sequence
  derived and/or modified CDS sequence (wt) from hemagglutinin__InfluenzaA__AFD64830
augaagacuaucauugcuuugagcuacauucuaugucugguuuucgcucaaaaacuuccuggaaaugacaacagcacggcaacgcugugccuugggcaccaugcagugccaaacgggacgauagugaaaacaaucacgaaugaccaaauugaaguuacuaaugcuacugaacugguucagaguuccucaacaggugaaauaugcaacaguccucaucagauccuugauggagaaaacugcacacuaauagaugcucuauugggagacccucagugugauggcuuccaaaacaagaaaugggaccuuuuuguugaacgaagcaaagcccacagcaacuguuacccuuaugaugugccggauuaugccucccuuaggucacuaguugccucauccggcacacuggaguuuaacaaugaaagcuucaauuggacuggagucacucaaaacggaacaagcucugcuugcaugaggagauccaauaauaguuucuuuaguagauugaauugguugacccacuuaaacuucaaauacccagcauugaacgugacuaugccaaacaaugaacaauuugacaaauuguacauuugggggguucaccacccggguacggacaaggaccaaaucuuccuguaugcucaagcaucaggaagaaucacaguaucuaccaaaagaagccaacaagcuguaauuccgaauaucggaucuagacccagaguaaggaauaucccuagcagaguaagcaucuauuggacaauaguaaaaccgggagacauacuuuugauuaacagcacagggaaucuaauugcuccuagggguuacuucaaaauacgaagugggaaaagcucaauaaugagaucagaugcacccauuggcaaaugcaauucugcaugcaucacuccaaauggaagcauucccaaugacaaaccauuccaaaauguaaacaggaucacauacggggccugucccagauauguuaagcaaaacacucugaaauuggcaacaggaaugagaaauguaccagagaaacaaacuagaggcauauuuggcgcaauagcggguuucauagaaaaugguugggagggaaugguggaugguugguacgguuucaggcaucaaaauucugagggaaggggacaggcagcagaucucaaaagcacucaagcagcaaucgaucaaaucaaugggaagcugaauagauugaucgggaaaaccaacgagaaauuccaucagauugaaaaagaauucucagaagucgaagggagaauucaggaccuugagaaauauguugaagacacuaaaauagaucucuggucauacaacgcggagcuucuuguugcccuggagaaccaacacacaauugaucuaacugacucagaaaugaacaaacuguuugaaaaaacaaagaagcaacugagggaaaaugcugaggauaugggcaaugguuguuucaaaauauaccacaaaugugacaaugccugcauaggaucaaucagaaauggaacuuaugaccacgauguguacagagaugaagcauuaaacaaccgauuccagaucaagggaguugagcugaagucaggguacaaagauuggauccuauggauuuccuuugccauaucauguuuuuugcuuuguguugcuuuguugggguucaucaugugggccugccaaaaaggcaacauuaggugcaacauuugcauuuga

SEQ ID NO: 40362 - RNA, 1701 nt, Artificial Sequence
  derived and/or modified CDS sequence (wt) from hemagglutinin__InfluenzaA__AFD98095
augaagacuaucauugcuuugagcuacauucuaugucugguuuucgcucaaaaacuuccuggaaaugacaacagcacggcaacgcugugccuugggcaccaugcagugccaaacggaacgauagugaaaacaaucacgaaugaccaaauugaaguuacuaaugcuacugagcugguucagaguuccucaacaggugaaauaugcaacaguccucaucagauccuugauggagaaaacugcacacuaauagaugcucuauugggagacccucagugugauggcuuccaaaacaagaaaugggaccuuuuuguugaacgaagcaaagcccacagcaacuguuacccuuaugaugugccggauuaugccucccuuaggucacuaguugccucauccggcacacuggaguuuaacaaugaaagcuucaauuggacuggagucacucaaaacggaacaagcucugcuugcauaaggagaucuaauaauaguuucuuuaguagauugaauugguugacccacuuaaacuucaaauacccagcauugaacgugacuaugccaaacaaugaacaauuugacaaauuguacauuugggggguucaccacccggguacggacaaggaccaaaucuuccuguaugcucaagcaucaggaagaaucacaguaucuaccaaaagaagccaacaagcuguaauuccgaauaucggaucuagacccagaguaaggaauaucccuagcagaguaagcaucuauuggacaauaguaaaaccgggagacauacuuuugauuaacagcacagggaaucuaauugcuccuagggguuacuucaaaauacgaagugggaaaagcucaauaaugagaucagaugcacccauuggcaaaugcaauucugcaugcaucacuccaaauggaagcauucccaaugacaaaccauuccaaaauguaaacaggaucacauacggggccugucccagauauguuaagcaaaacacucugaaauuggcaacaggaaugagaaauguaccagagaaacaaacuagaggcauauuuggcgcaauagcggguuucauagaaaaugguugggagggaaugguggaugguugguacgguuucaggcaucaaaauucugagggaaggggacaagcagcagaucucaaaagcacucaagcagcaaucgaucaaaucaaugggaagcugaauagauugaucgggaaaaccaacgagaaauuccaucagauugaaaaagaauucucagaagucgaagggagaauucaggaccuugagaaauauguugaggacacuaaaauagaucucuggucauacaacgcggagcuucuuguugcccuggagaaccaacacacaauugaucuaacugacucagaaaugaacaaacuguuugaaaaaacaaagaaacaacugagggaaaaugcugaggauaugggcaaugguuguuucaaaauauaccacaaaugugacaaugccugcauaggaucaaucagaaauggaacuuaugaccacgauguguacagagaugaagcauuaaacaaccgauuccagaucaagggaguugagcugaagucaggguacaaagauuggauccuauggauuuccuuugccauaucauguuuuuugcuuuguguugcuuuguugggguucaucaugugggccugccaaaaaggcaacauuaggugcaacauuugcauuuga

SEQ ID NO: 40363 - RNA, 1701 nt, Artificial Sequence
  derived and/or modified CDS sequence (wt) from hemagglutinin__InfluenzaA__AFD98106
augaagaccaucauugcuuugagcuacauucuaugucugguuuucgcucagaaacuuccuggaaaugacaacagcacggcaacgcugugccuugggcaccaugcaguaccaaacggaacgauagugaaaacaaucacgaaugaccaaauugaaguuacuaaugcuacugagcugguucagaguuccucagcaggugaaauaugcgacaguccucaucauauccuugauggagaaaacugcacacuaauagaugcucuauugggagacccucagugugauggcuuccaaaauaagaaaugggaccuuuuuguugaacgaagcagagccuacagcaacuguuacccuuaugaugugccggauuaugccucccuuaggucacuaguugccucauccggcacacuggaguuuaacaaugaaagcuucaauuggacuggagucacucaaaacggaacaagcucugcuugcauaaggagaucuaauaauaguuucuuuaguagauugaauugguugacccacuuaaacuucaaauacccagcauugaacgugacuaugccaaacaaugaacaauuugacaaauuguacauuugggggguucaccacccggguacggacaaggaccaaaucuuccuguaugcucaagcaucaggaagaaucacaguaucuaccaaaagaagccaacaagcuguaaucccgaauaucggaucuagacccagaguaaggaauaucccuagcagaauaagcaucuauuggacaauaguaaaaccgggagacauacuuuugauuaacagcacagggaaucuaauugcuccuagggguuacuucaaaauacgaagugggaaaagcucaauaaugagaucagaugcacccauuggcaaaugcaauucugaaugcaucacuccaaauggaagcauucccaaugacaaaccauuccaaaauguaaacaggaucacauacggggccugucccagauauguuaagcaaagcacucugaaauuggcaacaggaaugcgaaauguaccagagaaacaaacuagaggcauauuuggcgcaauagcggguuucauagaaaaugguugggagggaaugauggaugguugguacgguuucaggcaucaaaauucugagggaagaggacaagcagcagaucucaaaagcacucaagcagcaaucgaucaaaucaauggaaagcugaauagauugaucgggaaaaccaacgagaaauuccaucagauugaaaaagaauucucagaagucgaagggagaauucaggaccuugagaaauauguugaggacacuaaaauagaucucuggucauacaacgcggagcuucuuguugcccuggagaaccaacauacaauugaucuaacugacucagaaaugaacaaacuguuugaaaaaacaaagaagcaacugagggaaaaugcugaggauaugggcaaugguuguuucaaaauauaucacaaaugugacaaugccugcauaggaucaaucagaaauggaacuuaugaccacgauguauacagagaugaagcauuaaacaaccgguuccagaucaagggaguugagcugaagucaggguacaaagauuggauccuauggauuuccuuugccauaucauguuuuuugcuuuguguugcuuuguugggguucaucaugugggccugccaaaaaggcaacauuagaugcaacauuugcauuuga

SEQ ID NO: 40364 - RNA, 1701 nt, Artificial Sequence
  derived and/or modified CDS sequence (wt) from hemagglutinin__InfluenzaA__AFD98128
augaagacuaucauugcuuugagcuacauucuaugucugguuuucgcucaaaaacuuccuggaaaugacaacagcacggcaacgcugugccuugggcaccaugcagugccaaacggaacgauagugaaaacaaucacgaaugaccaaauugaaguuacuaaugcuacugagcugguucagaauuccucaacaggugaaauaugcaacaguccucaucagauccuugauggagaaaacugcacacuaauagaugcucuauugggagacccucagugugauggcuuccaaaacaagaaaugggaccuuuuuguugaacgaagcaaagcccacagcaacuguuacccuuaugaugugccggauuaugccucccuuaggucacuaguugccucauccggcacacuggaguuuaacaaugaaagcuucaauuggacuggagucacucaaaacggaacaagcucugcuugcauaaggaaaucuaauaauaguuucuuuaguagauugaauugguugacccacuuaaacuucaaauacccagcauugaacgugacuaugccaaacaaugaacaauuugacaaauuguacauuugggggguucaccacccggguacggacaaggaccaaaucuuccuguaugcucaagcagcaggaagaaucacaguaucuaccaaaagaagccaacaagcuguaauuccgaauaucggaucuagacccagaguaaggaauauuccuagcagaguaagcaucuauuggacaauaguaaaaccgggagacauacuuuugauuaacagcacagggaaucuaauugcuccuagggguuacuucaaaauacgaagugggaaaagcucaauaaugagaucagaugcacccauuggcaaaugcaauucugcaugcaucacuccaaauggaagcauucccaaugacaaaccauuccaaaauguaaacaggaucacauacggggccugucccagauauguuaagcaaaacacucugaaauuggcaacaggaaugagaaauguaccagagaaacaaacuagaggcauauuuggcgcaauagcugguuucauagaaaaugguugggagggaaugguggaugguugguacgguuucaggcaucaaaauucugagggaaggggacaagcagcagaucucaaaagcacucaagcagcaaucgaucaaaucaaugggaagcugaauagauugaucgggaaaaccaacgagaaauuccaucagauugaaaaagaauucucagaagucgaagggagaauucaggaccuugagaaauauguugaggacacuaaaauagaucucuggucauacaacgcggagcuucuuguugcccuggagaaccaacacacaauugaucuaacugacucagaaaugaacaaauuguuugaaaaaacaaagaagcaacugagggaaaaugcugaggauaugggcaaugguuguuucaaaauauaccacaaaugugacaaugccugcauaggaucaaucagaaauggaacuuaugaccacgauguguacagagaugaagcauuaaacaaccgauuccagaucaagggaguugagcugaagucaggguacaaagauuggauccuauggauuuccuuugccauaucauguuuuuugcuuuguguugcuuuguugggguucaucaugugggccugccaaaaaggcaacauuaggugcaacauuugcauuuga

SEQ ID NO: 40365 - RNA, 1701 nt, Artificial Sequence; identical to SEQ ID NO: 40362
  derived and/or modified CDS sequence (wt) from hemagglutinin__InfluenzaA__AFD98139

SEQ ID NO: 40366 - RNA, 1701 nt, Artificial Sequence
  derived and/or modified CDS sequence (wt) from hemagglutinin__InfluenzaA__AFD98161
augaagaccaucauugcuuugagcuacauucuaugucugguuuucgcucaaaaacuuccuggaaaugacaacagcacggcaacgcugugccuugggcaccaugcaguaccaaacggaacgauagugaaaacaaucacgaaugaccaaauugaaguuacuaaugcuacugagcugguucagaauuccucagcaggugaaauaugcgacaguccucaucauauccuugauggagaaaacugcacacuaauagaugcucuauugggagacccucagugugauggcuuccaaaauaagaaaugggaccuuuuuguugaacgaagcagagccuacagcaacuguuacccuuaugaugugccggauuaugccucccuuaggucacuaguugccucauccggcacacuggaguuuaacaaugaaagcuucaauuggacuggagucacucaaaacgggacaagcucugcuugcauaaggagaucuaauaauaguuucuuuaguagauugaauugguugacccacuuaaacuucaaauacccagcauugaacgugacuaugccaaacaaugaacaauuugacaaauuguacauuugggggguucaccacccggguacggacaaggaccaaaucuuccuguaugcucaagcaucaggaagaaucacaguaucuaccaaaagaagccaacaagcuguaaucccgaauaucggaucuagacccagaguaaggaauaucccuagcagaauaagcaucuauuggacaauaguaaaaccgggagacauacuuuugauuaacagcacagggaaucuaauugcuccuagggguuacuucaaaauacgaagugggaaaagcucaauaaugagaucagaugcacccauuggcaaaugcaauucugaaugcaucacuccaaauggaagcauucccaaugacaaaccauuccaaaauguaaacaggaucacauacggggccugucccagauauguuaagcaaagcacucugaaauuggcaacaggaaugcgaaauguaccagagaaacaaacuagaggcauauuuggcgcaauagcggguuucauagaaaaugguugggagggaaugauggaugguugguacgguuucaggcaucaaaauucugagggaagaggacaagcagcagaucucaaaagcacucaagcagcaaucgaucaaaucaauggaaagcugaauagauugaucgggaaaaccaacgagaaauuccaucagauugaaaaagaauucucagaagucgaagggagaauucaggaccuugagaaauauguugaggacacuaaaauagaucucuggucauacaacgcggagcuucuuguugcccuggagaaccaacauacaauugaucuaacugacucagaaaugaacaaacuguuugaaaaaacaaagaagcaacugagggaaaaugcugaggauaugggcaaugguuguuucaaaauauaccacaaaugugacaaugccugcauaggaucaaucagaaauggaacuuaugaccacgauguauacagagaugaagcauuaaacaaccgguuccagaucaagggaguugagcugaagucaggguacaaagauuggauccuauggauuuccuuugccauaucauguuuuuugcuuuguguugcuuuguugggguucaucaugugggccugccaaaaaggcaacauuaggugcaacauuugcauuuga

SEQ ID NO: 40367 - RNA, 1701 nt, Artificial Sequence
  derived and/or modified CDS sequence (wt) from hemagglutinin__InfluenzaA__AFD98172
augaagaccaucauugcuuugagcuacauucuaugucugguuuucgcucaaaaacuuccuggaaaugacaacagcacggcaacgcugugccuugggcaccaugcaguaccaaacggaacgauagugaaaacaaucacgaaugaccaaauugaaguuacuaaugcuacugagcugguucagaguuccucagcaggugaaauaugcgacaguccucaucauauccuugauggagaaaacugcacacuaauagaugcucuauugggagacccucagugugauggcuuccaaaauaagaaaugggaccuuuuuguugaacgaagcagagccuacagcaacuguuacccuuaugaugugccggauuaugccucccuuaggucacuaguugccucauccggcacacuggaguuuaacaaugaaagcuucaauuggacuggagucacucaaaacggaacaagcucugcuugcauaaggagaucuaauaauaguuucuuuaguagauugaauugguugacccacuuaaacuucaaauacccagcauugaacgugacuaugccaaacaaugaacaauuugacaaauuguacauuugggggguucaccacccggguacggacaaggaccaaaucuuccuguaugcucaagcaucaggaagaaucacaguaucuaccaaaagaagccaacaagcuguaaucccgaacaucggaucuagacccagaguaaggaauaucccuagcagaauaagcaucuauuggacaauaguaaaaccgggagacauacuuuugauuaacagcacagggaaucuaauugcuccuagggguuacuucaaaauacgaagugggaaaagcucaauaaugagaucagaugcacccauuggcaaaugcaauucugaaugcaucacuccaaauggaagcauucccaaugacaaaccauuccaaaauguaaacaggaucacauacggggccugucccagauauguuaagcaaagcacucugaaauuggcaacaggaaugcgaaauguaccagagaaacaaacuagaggcauauuuggcgcaauagcggguuucauagaaaaugguugggagggaaugauggaugguugguacgguuucaggcaucaaaauucugagggaagaggacaagcagcagaucucaaaagcacucaagcagcaaucgaucaaaucaauggaaagcugaauagauugaucgggaaaaccaacgagaaauuccaucagauugaaaaagaauucucagaagucgaagggagaauucaggaccuugagaaauauguugaggacacuaaaauagaucucuggucauacaacgcggagcuucuuguugcccuggagaaccaacauacaauugaucuaacugacucagaaaugaacaaacuguuugaaaaaacaaagaagcaacugagggaaaaugcugaggauaugggcaaugguuguuucaaaauauaccacaaaugugacaaugccugcauaggaucaaucagaaauggaacuuaugaccacgauguauacagagaugaagcauuaaacaaccgguuccagaucaagggaguugagcugaagucaggguacaaagauuggguccuauggauuuccuuugccauaucauguuuuuugcuuuguguugcuuuguugggguucaucaugugggccugccaaaaaggcaacauuaggugcaacauuugcauuuga

SEQ ID NO: 40368 - RNA, 1701 nt, Artificial Sequence
  derived and/or modified CDS sequence (wt) from hemagglutinin__InfluenzaA__AFD98183
augaagacuaucauugcuuugagcuacauucuaugucugguuuucgcucaaaaacuuccuggaaaugacaacagcacggcaacgcugugccuugggcaccaugcagugccaaacggaacgauagugaaaacaaucacgaaugaccaaauugaaguuacuaaugcuacugagcugguucagaguuccucaacaggugaaauaugcaacaguccucaucagauccuugauggagaaaacugcacacuaauagaugcucuauugggagacccucagugugauggcuuccaaaacaagaaaugggaccuuuuuguugaacgaagcaaagcccacagcaacuguuacccuuaugaugugccggauuaugccucccuuaggucacuaguugccucauccggcacacuggaguuuaacaaugaaagcuucaauuggacuggagucacucaaaacggaacaagcucugcuugcauaaggagaucuaauaauaguuucuuuaguagauugaauugguugacccacuuaaacuucaaauacccagcauugaacgugacuaugccaaacaaugaacaauuugacaaauuauacauuugggggguucaccacccggguacggacaaggaccaaaucuuccuguaugcucaagcaucaggaagaaucacaguaucuaccaaaagaagccaacaagcuguacuuccgaauaucggaucuagacccagaguaaggaauaucccuagcagaguaagcaucuauuggacaauaguaaaaccgggagacauacuuuugauuaacagcacagggaaucuaauugcuccuagggguuacuucaaaauacgaagugggaaaagcucaauaaugagaucagaugcacccauuggcaaaugcaauucuacaugcaucacuccaaauggaagcauucccaaugacaaaccauuccaaaauguaaacaggaucacauacggggccugucccagauauguuaagcaaaacacucugaaauuggcaacaggaaugagaaauguaccagagaaacaaacuagaggcauauuuggcgcaauagcggguuucauagaaaaugguugggagggaaugguggaugguugguacgguuucaggcaucaaaauucugagggaaggggacaagcagcagaucucaaaagcacucaagcagcaaucgaccaaaucaaugggaagcugaauagauugaucgggaaaaccaacgagaaauuccaucagauugaaaaagaauucucagaagucgaagggagaauucaggaccuugagaaauauguugaggacacuaaaauagaucucuggucauacaacgcggagcuucuuguugcccuggagaaccaacacacaauugaucuaacugacucagaaaugaacaaacuguuugaaaaaacaaagaagcaacugagggaaaaugcugaggauaugggcaaugguuguuucaaaauauaccacaaaugugacaaugccugcauaggaucaaucagaaauggaacuuaugaccacgauguguacagagaugaagcauuaaacaaccgauuccagaucaagggaguugagcugaagucaggguacaaagauuggauccuauggauuuccuuugccauaucauguuuuuugcuuuguguugcuuuguugggguucaucaugugggccugccaaaaaggcaacauuaggugcaacauuugcauuuga

SEQ ID NO: 40369 - RNA, 1701 nt, Artificial Sequence
  derived and/or modified CDS sequence (wt) from hemagglutinin__InfluenzaA__AFD98194
augaagacuaucauugcuuugagcuacauucuaugucugguuuucgcucaaaaacuuccuggaaaugacaacagcacggcaacgcugugccuugggcaccaugcagugccaaacggaacgauagugaaaacaaucacgaaugaccaaauugaaguuacuaaugcuacugagcugguucagaguuccucaacaggugaaauaugcaacaguccucaucagauccuugauggagaaaacugcacacuaauagaugcucuauugggagacccucagugugauggcuuccaaaacaagaaaugggaccuuuuuguugaacgaagcaaagcccacagcaacuguuacccuuaugaugugccggauuaugccucccuuaggucacuaguugccucauccggcacacuggaguuuaacaaugaaagcuucaauuggacuggagucacucaaaacggaacaagcucugcuugcauaaggagaucuaauaauaguuucuuuaguagauugaauugguugacccacuuaaacuucaaauacccagcauugaacgugacuaugccaaacaaugaacaauuugacaaauuguacauuugggggguucaccacccggguacggacaaggaccaaaucuuccuguaugcucaagcagcaggaagaaucacaguaucuaccaaaagaagccaacaagcuguaauuccgaauaucggaucuagacccagaguaaggaauaucccuagcagaguaagcaucuauuggacaauaguaaaaccgggagacauacuuuugauuaacagcacagggaaucuaauugcuccuagggguuacuucaaaauacgaagugggaaaagcucaauaaugagaucagaugcacccauuggcaaaugcaauucugcaugcaucacuccaaauggaagcauucccaaugacaaaccauuccaaaauguaaacaggaucacauacggggccugucccagauauguuaagcaaaacacucugaaauuggcaacaggaaugagaaauguaccagagaaacaaacuagaggcauauuuggcgcaauagcugguuucauagaaaaugguugggagggaaugguggaugguugguacgguuucaggcaucaaaauucugagggaaggggacaagcagcagaucucaaaagcacucaagcagcaaucgaucaaaucaaugggaagcugaauagauugaucgggaaaaccaacgagaaauuccaucagauugaaaaagaauucucagaagucgaagggagaauucaggaccuugagaaauauguugaggacacuaaaauagaucucuggucauacaacgcggagcuucuuguugcccuggagaaccaacacacaauugaucuaacugacucagaaaugaacaaacuguuugaaaaaacaaagaagcaacugagggaaaaugcugaggauaugggcaaugguuguuucaaaauauaccacaaaugugacaaugccugcauaggaucaaucagaaauggaacuuaugaccacgauguguacagagaugaagcauuaaacaaccgauuccagaucaagggaguugagcugaagucaggguacaaagauuggauccuauggauuuccuuugccauaucauguuuuuugcuuuguguugcuuuguugggguucaucaugugggccugccaaaaaggcaacauuaggugcaacauuugcauuuga

SEQ ID NO: 40370 - RNA, 1701 nt, Artificial Sequence
  derived and/or modified CDS sequence (wt) from hemagglutinin__InfluenzaA__AFD98205
augaaggcaauacuaguaguucugcuauauacauuugcaaccgcaaaugcagacacauuauguauagguuaucaugcgaacaauucaacagacacuguagacacaguacuagaaaagaauguaacaguaacacacucuguuaaccuucuagaagacaagcauaacgggaaacuaugcaaacuaagagggguagccccauugcauuuggguaaauguaacauugcuggcuggauccugggaaauccagagugugaaucacucuccacagcaagcucaugguccuacauuguggaaacaucuaguucagacaauggaacguguuacccaggagauuucaucgauuaugaggagcuaagagagcaauugagcucagugucaucauuugaaagguuugagauauuccccaagacaaguucauggcccaaucaugacucgaacaaagguguaacgacagcauguccucaugcuggagcaaaaagcuucuacaaaaauuuaauauggcuaguuaaaaaaggaaauucauacccaaaacucagcaaauccuacauuaaugauaaagggaaagaaguccucgugcuauggggcauucaccauccaccuacuagugcugaccaacaaagucucuaucagaaugcagaugcauauguuuuuguggggacaucaagauacagcaagaaguucaagccggaaauagcaauaagacccaaagugagggaucaagaagggagaaugaacuauuacuggacacuaguagagccgggagacaaaauaacauucgaagcaacuggaaaucuagugguaccgagauaugcauucgcaauggaaagaaaugcuggaucugguauuaucauuucagauacaccaguccacgauugcaauacaacuugucagacacccaagggugcuauaaacaccagccuuccauuucagaauauacauccgaucacaauuggaaaauguccaaaauauguaaaaagcacaaaauugagacuggccacaggauugaggaaugucccgucuauucaaucuagaggccuauuuggggccauugccgguuucauugaagggggguggacagggaugguagauggaugguacgguuaucaccaucaaaaugagcaggggucaggguaugcagccgaccugaagagcacacagaaugccauugacgagauuacuaacaaaguaaauucuguuauugaaaagaugaauacacaguucacagcaguagguaaagaguucaaccaccuggaaaaaagaauagagaauuuaaauaaaaaaguugaugaugguuuccuggacauuuggacuuacaaugccgaacuguugguucuauuggaaaaugaaagaacuuuggacuaccacgauucaaaugugaagaacuuauaugaaaagguaagaagccaguuaaaaaacaaugccaaggaaauuggaaacggcugcuuugaauuuuaccacaaaugugauaacacgugcauggaaagugucaaaaaugggacuuaugacuacccaaaauacucagaggaagcaaaauuaaacagagaagaaauagaugggguaaagcuggaaucaacaaggauuuaccagauuuuggcgaucuauucaacugucgccaguucauugguacugguagucucccugggggcaaucaguuucuggaugugcucuaaugggucucuacaguguagaauauguauuuaa

SEQ ID NO: 40371 - RNA, 1701 nt, Artificial Sequence
  derived and/or modified CDS sequence (wt) from hemagglutinin__InfluenzaA__AFD98215
augaagaccaucauugcuuugagcuacauucuaugucugguuuucgcucaaaaacuuccuggaaaugacaacagcacggcaacacugugccuugggcaccaugcaguaccaaacggaacgauagugaagacaaucacgaaugaccaaauugaaguuacuaaugcuacugagcugguucagaguuccucagcaggugaaauaugcgacaguccucaucauauccuugauggagaaaacugcacacuaauagaugcucuauugggagacccucagugugauggcuuccaaaauaagaaaugggaccuuuuuguugaacgaagcagagccuacagcaacuguuacccuuaugaugugccggauuaugccucccuuaggucacuaguugccucauccggcacacuggaguuuaacaaugaaagcuucaauuggacuggagucacucaaaacggaacaagcucugcuugcauaaggagaucuaauaauaguuucuuuaguagauugaauugguugacccacuuaaacuucaaauacccagcauugaacgugacuaugccaaacaaugaacaauuugacaaauuguacauuugggggguucaccacccggguacggacaaggaccaaaucuuccuguaugcucaagcaucaggaagaaucacaguaucuaccaaaagaagccaacaagcuguaaucccgaauaucggaucuagacccagaguaaggaauaucccuagcagaauaagcaucuauuggacaauaguaaaaccgggagacauacuuuugauuaacagcacagggaaucuaauugcuccuagggguuacuucaaaauacgaagugggaaaagcucaauaaugagaucagaugcacccauuggcaaaugcaauucugaaugcaucacuccaaauggaagcauucccaaugacaaaccauuccaaaauguaaacaggaucacauacggggccugucccagauauguuaagcaaagcacucugaaauuggcaacaggaaugcgaaauguaccagagaaacaaacuagaggcauauuuggcgcaauagcggguuucauagaaaaugguugggagggaaugauggaugguugguacgguuucaggcaucaaaauucugagggaagaggacaagcagcagaucucaaaagcacucaagcagcaaucgaucaaaucaauggaaagcugaauagauugaucgggaaaaccaacgagaaauuccaucagauugaaaaagaauucucagaagucgaagggagaauucaggaccuugagaaauauguugaggacacuaaaauagaucucuggucauacaacgcggagcuucuuguugcccuggagaaccaacauacaauugaucuaacugacucagaaaugaacaaacuguuugaaaaaacaaagaagcaacugagggaaaaugcugaggauaugggcaaugguuguuucaaaauauaccacaaaugugacaaugccugcauaggaucaaucagaaauggaacuuaugaccacgauguauacagagaugaagcauuaaacaaccgguuccagaucaagggaguugagcugaagucaggguacaaagauuggauccuauggauuuccuuugccauaucauguuuuuugcuuuguguugcuuuguugggguucaucaugugggccugccaaaaaggcaacauuaggugcaacauuugcauuuga

SEQ ID NO: 40372 - RNA, 1701 nt, Artificial Sequence
  derived and/or modified CDS sequence (wt) from hemagglutinin__InfluenzaA__AFD98226
augaagacuaucauugcuuugagcuacauucuaugucugguuuucgcucaaaaacuuccuggaaaugacaacagcacggcaacgcugugccuugggcaccaugcagugccaaacggaacgauagugaaaacaaucacgaaugaccaaauugaaguuacuaaugcuacugagcugguucagaguuccucaacaggugaaauaugcaacaguccucaucagauccuugauggagaaaacugcacacuaauagaugcucuauugggagacccucagugugauggcuuccaaaacaagaaaugggaccuuuuuguugaacgaagcaaagcccacagcaacuguuacccuuaugaugugccggauuaugccucccuuaggucacuaguugccucauccggcacacuggaguuuaacaaugaaagcuucaauuggacuggagucacucaaaacggaacaagcucugcuugcauaaggagaucuaauaauaguuucuuuaguagauugaauugguugacccacuuaaacuucaaauacccagcauugaacgugaccaugccaaacaaugaacaauuugacaaauuguacauuugggggguucaccacccggguacggacaaggaccaaaucuuccuguaugcucaagcaucaggaagaaucacaguaucuaccaaaagaagccaacaagcuguaauuccgaauaucggaucuagacccagaguaaggaauaucccuagcagaguaagcaucuauuggacaauaguaaaaccgggagacauacuuuugauuaacagcacagggaaucuaauugcuccuagggguuacuucaaaauacgaagugggaaaagcucaauaaugagaucagaugcacccauuggcaaaugcaauucugcaugcaucacuccaaauggaagcauucccaaugacaaaccauuccaaaauguaaacaggaucacauacggggccugucccagauauguuaagcaaaacacucugaaauuggcaacaggaaugagaaauguaccagagaaacaaacuagaggcauauuuggcgcaauagcggguuucauagaaaaugguugggagggaaugguggaugguugguacgguuucaggcaucaaaauucugagggaaggggacaagcagcagaucucaaaagcacucaagcagcaaucgaucaaaucaaugggaagcugaauagauugaucgggaaaaccaacgagaaauuccaucagauugaaaaagaauucucagaagucgaagggagaauucaggaccuugagaaauauguugaggacacuaaaauagaucucuggucauacaacgcggagcuucuuguugcccuggagaaccaacacacaauugaucuaacugacucagaaaugaacaaacuguuugaaaaaacaaagaagcaacugagggaaaaugcugaggauaugggcaaugguuguuucaaaauauaccacaaaugugacaaugccugcauaggaucaaucagaaauggaacuuaugaccacgauguguacagagaugaagcauuaaacaaucgauuccagaucaagggaguugagcugaagucaggguacaaagauuggauccuauggauuuccuuugccauaucauguuuuuugcuuuguguugcuuuguugggguucaucaugugggccugccaaaaaggcaacauuaggugcaacauuugcauuuga

SEQ ID NO: 40373 - RNA, 1701 nt, Artificial Sequence
  derived and/or modified CDS sequence (wt) from hemagglutinin__InfluenzaA__AFD98237
augaagacuaucauugcuuugagcuacauucuaugucugguuucugcucaaaaacuuccuggaaaugacaacagcacggcaacgcugugccuugggcaccaugcagugccaaacggaacgauagugaaaacaaucacgaaugaccaaauugaaguuacuaaugcuacugagcugguucagaguuccucaacaggugaaauaugcaacaguccucaucagauccuugauggagaaaacugcacacuaauagaugcucuauugggagacccucagugugauggcuuccaaaacaagaaaugggaccuuuuuguugaacgaagcaaagcccacagcaacuguuacccuuaugaugugccggauuaugccucccuuaggucacuaguugccucauccggcacacuggaguuuaacaaugaaagcuucaauuggacuggagucacucaaaacggaacaagcucugcuugcauaaggagaucuaauaauaguuucuuuaguagauugaauugguugacccacuuaaacuucaaauacccagcauugaacgugacuaugccaaacaaugaacaauuugacaaauuguacauuugggggguucaccacccggguacggacaaggaccaaaucuuccuguaugcucaagcaucaggaagaaucacaguaucuaccaaaagaagccaacaagcuguaauuccgaauaucggaucuagacccagaguaaggaauaucccuagcagaguaagcaucuauuggacaauaguaaaaccgggagacauacuuuugauuaacagcacagggaaucuaauugcuccuagggguuacuucaaaauacgaagugggaaaagcucaauaaugagaucagaugcacccauuggcaaaugcaauucugcaugcaucacuccaaauggaagcauucccaaugacaaaccauuccaaaauguaaacaggaucacauacggggccugucccagauauguuaagcaaaacacucugaaauuggcaacaggaaugagaaauguaccagagaaacaaacuagaggcauauuuggcgcaauagcggguuucauagaaaaugguugggagggaaugguggaugguugguacgguuucaggcaucaaaauucugagggaaggggacaggcagcagaucucaaaagcacucaagcagcaaucgaucaaaucaaugggaagcugaauagauugaucgggaaaaccaacgagaaauuccaucagauugaaaaagaauucucagaagucgaagggagaauucaggaccuugagaaauauguugaggacacuaaaauagaucucuggucauacaacgcggagcuucuuguugcccuggagaaccaacacacaauugaucuaacugacucagaaaugaacaaacuguuugaaaaaacaaagaagcaacugagggaaaaugcugaggauaugggcaaugguuguuucaaaauauaccacaaaugugacaaugccugcauaggaucaaucagaaauggaacuuaugaccacgauguguacagagaugaagcauuaaacaaccgauuccagaucaagggaguugagcugaagucaggguacaaagauuggauccuauggauuuccuuugccauaucauguuuuuugcuuuguguugcuuuguugggguucaucaugugggccugccaaaaaggcaacauuaggugcaacauuugcauuuga

SEQ ID NO: 40374 - RNA, 1701 nt, Artificial Sequence
  derived and/or modified CDS sequence (wt) from hemagglutinin__InfluenzaA__AFD98248
augaagaccaucauugcuuugagcuacauucuaugucugguuuucgcucaaaaacuuccuggaaaugacaacagcacggcaacgcugugccuugggcaccaugcaguaccaaacggaacgauagugaaaacaaucacgaaugaccaaauugaaguuacuaaugcuacugagcugguucagaauuccucagcaggugaaauaugcgacaguccucaucauauccuugauggagaaaacugcacacuaauagaugcucuauugggagacccucagugugauggcuuccaaaauaagaaaugggaccuuuuuguugaacgaagcagagccuacagcaacuguuacccuuaugaugugccggauuaugccucccuuaggucacuaguugccucauccggcacacuggaguuuaacaaugaaagcuucaauuggacuggagucacucaaaacggaacaagcucugcuugcauaaggagaucuaauaauaguuucuuuaguagauugaauugguugacccacuuaaacuucaaauacccagcauugaacgugacuaugccaaacaaugaacaauuugacaaauuguacauuugggggguucaccacccggguacggacaaggaccaaaucuuccuguaugcucaagcaucaggaagaaucacaguaucuaccaaaagaagccaacaagcuguaaucccgaauaucggaucuagacccagaguaaggaauaucccuagcagaauaagcaucuauuggacaauaguaaaaccgggagacauacuuuugauuaacagcacagggaaucuaauugcuccuagagguuacuucaaaauacgaagugggaaaagcucaauaaugagaucagaugcacccauuggcaaaugcaauucugaaugcaucacuccaaauggaagcauucccaaugacaaaccauuccaaaauguaaacaggaucacauacggggccugucccagauauguuaagcaaagcacucugaaauuggcaacaggaaugcgaaauguaccagagaaacaaacuagaggcauauuuggcgcaauagcggguuucauagaaaaugguugggagggaaugauggaugguugguacgguuucaggcaucaaaauucugagggaagaggacaagcagcagaucucaaaagcacucaagcagcaaucgaucaaaucaauggaaagcugaauagauugaucgggaaaaccaacgagaaauuccaucagauugaaaaagaauucucagaagucgaagggagaauucaggaccuugagaaauauguugaggacacuaaaauagaucucuggucauacaacgcggagcuucuuguugcccuggagaaccaacauacaauugaucuaacugacucagaaaugaacaaacuguuugaaaaaacaaagaagcaacugagggaaaaugcugaggauaugggcaaugguuguuucaaaauauaccacaaaugugacaaugccugcauaggaucaaucagaaauggaacuuaugaccacgauguauacagagaugaagcauuaaacaaccgguuccagaucaagggaguugagcugaagucaggguacaaagauuggauccuauggauuuccuuugccauaucauguuuuuugcuuuguguugcuuuguugggguucaucaugugggccugccaaaaaggcaacauuaggugcaacauuugcauuuga

SEQ ID NO: 40375 - RNA, 1701 nt, Artificial Sequence
  derived and/or modified CDS sequence (wt) from hemagglutinin__InfluenzaA__AFD98259
augaagaccaucauugcuuugagcuacauucuaugucugguuuucgcucaaaaacuuccuggaaaugacaacagcacggcaacgcugugccuugggcaccaugcaguaccaaacggaacgauagugaaaacaaucacgaaugaccaaauugaaguuacuaaugcuacugagcugguucagaguuccucagcaggugaaauaugcgacaguccucaucauauccuugauggagaaaacugcacacuaauagaugcucuauugggagacccucagugugauggcuuccaaaauaagaaaugggaccuuuuuguugaacgaagcaaagccuacagcaacuguuacccuuaugaugugcaggauuaugccucccuuaggucacuaguugccucauccggcacacuggaguuuaacaaugaaagcuucaauuggacuggagucacucaaaacggaacaagcucugcuugcauaaggagaucuaauaauaguuucuuuaguagauugaauugguugacccacuuaaacuucaaauacccagcauugaacgugacuaugccaaacaaugaacaauuugacaaauuguacauuugggggguucaccacccggguacggacaaggaccaaaucuuccuguaugcucaagcaucaggaagaaucacaguaucuaccaaaagaagccaacaagcuguaaucccgaauaucggaucuagacccagaguaaggaauauccccagcagaauaagcaucuauuggacaauaguaaaaccgggagacauacuuuugauuaacagcacagggaaucuaauugcuccuagggguuacuucaaaauacgaagugggaaaagcucaauaaugagaucagaugcacccauuggcaaaugcaauucugaaugcaucacuccaaauggaagcauucccaaugacaaaccauuccaaaauguaaacaggaucacauacggggccugucccagauauguuaagcaaagcacucugaaauuggcaacaggaaugcgaaauguaccagagaaacaaacuagaggcauauuuggcgcaauagcggguuucauagaaaaugguugggagggaaugauggaugguugguacgguuucaggcaucaaaauucugagggaagaggacaagcagcagaucucaaaagcacucaagcagcaaucgaucaaaucaauggaaagcugaauagauugaucgggaaaaccaacgagaaauuccaucagauugaaaaagaauucucagaagucgaagggagaauucaggaccuugagaaauauguugaggacacuaaaauagaucucuggucauacaacgcggagcuucuuguugcccuggagaaccaacauacaauugaucuaacugacucagaaaugaacaaacuguuugaaaaaacaaagaagcaacugagggaaaaugcugaggauaugggcaaugguuguuucaaaauauaccacaaaugugacaaugccugcauaggaucaaucagaaauggaacuuaugaccacgauguauacagagaugaagcauuaaacaaccgguuccagaucaagggaguugagcugaagucaggguacaaagauuggauccuauggauuuccuuugccauaucauguuuuuugcuuuguguugcuuuguugggguucaucaugugggccugccaaaaaggcaacauuaggugcaacauuugcauuuga

SEQ ID NO: 40376 - RNA, 1701 nt, Artificial Sequence
  derived and/or modified CDS sequence (wt) from hemagglutinin__InfluenzaA__AFD98270
augaaggcaauacuaguaguucugcuauauacauuuguaaccgcaaaugcagacacauuauguauagguuaucaugcgaacaauucaacagacacuguagacacaguacuagaaaagaauguaacaguaacacacucuguuaaccuucuagaagacaagcauaacgggaaacuaugcaaacuaagagggguaaccccauugcauuuggguaaauguaacauugcuggcuggauccugggaaauccagagugugaaucacucuccacagcaagcucaugguccuacauuguggaaacaucuaguucagacaauggaacguguuacccaggagauuucaucaauuaugaggagcuaagagagcaauugagcucagugucaucauuugaaagguuugagauauuccccaauacaaguucauggcccaaucaugacucgaacaaagguguaacggcagcauguccucaugcuggagcaaaaagcuucuacaaaaauuuaauauggcuaguuaaaaaaggaaauucauacccaaagcucagcaaauccuacauuaaugauaaagggaaagaaguccucgugcuguggggcauucaccauccaucuacuacugcugaccaacaaagucucuaucagaaugcagaugcauauguuuuuguggggacaucaagauacagcaagaaguucaagccggaaauagcaauaagacccaaagugagggaucaagaagggagaaugaacuauuacuggacacuaguagagccgggagacaaaauaacauucgaagcaacuggaaaucuagugguaccgagauaugcauucgcaauggaaagaaaugcuggaucugguauuaucauuucagauacaccaguccacgauugcaauacaacuugucagacacccaagggugcuauaaacaccagccucccauuucagaauauacauccgaucacaauuggaaaauguccaaaauauguaaaaagcacaaaauugagacuggccacaggauugaggaaugucccgucuauucaaucuagaggccuauuuggggccauugccggcuucauugaagggggguggacagggaugguagauggaugguacgguuaucaccaucaaaaugagcaggggucaggauaugcagccgaccugaagagcacacagaaugccauugacaagauuacuaacaaaguaaauucuguuauugaaaagaugaauacacaguucacagcaguagguaaagaguucaaccaccuggaaaaaagaauagagaauuuaaauaaaaaaguugaugaugguuuccuggacauuuggacuuacaaugccgaacuguugguucuauuggaaaaugaaagaacuuuggacuaccacgauucaaaugugaagaacuuguaugaaaagguaagaaaccaguuaaaaaacaaugccaaggaaauuggaaacggcugcuuugaauuuuaccacaaaugcgauaacacgugcauggaaagugucaaaaaugggacuuaugacuacccaaaauacucagaggaagcaaaauuaaacagagaagaaauagaugggguaaagcuggaaucaacaaggauuuaccagauuuuggcgaucuauucaacugucgccaguucauugguacugguagucucccugggggcaaucaguuucuggaugugcucuaaugggucucuacaguguagaauauguauuuaa

SEQ ID NO: 40377 - RNA, 1701 nt, Artificial Sequence
  derived and/or modified CDS sequence (wt) from hemagglutinin__InfluenzaA__AFD98280
augaaggcaauacuaguaguucugcuauauacauuugcaaccgcaaaugcagacacauuauguauagguuaccaugcgaacaauucaacagacacuguagacacaguacuagaaaagaauguaacaguaacacacucuguuaaucuucuagaagacaagcauaacgggaaacuaugcaaacuaagagggguagccccauugcauuuggguaaauguaacauugcuggcuggauccugggaaauccagagugugauucacucuccacagcaagaucaugguccuacauuguggaaacaucuaguucagacaauggaacguguuacccaggagauuucaucgauuaugaggagcuaagagagcaauugagcucagugucaucauuugaaagguuugagauauuccccaagacaaguucauggcccaaucaugacucgaacaaagguguaacggcagcauguccucaugcuggagcaaaaggcuucuacaaaaauuuaauauggcuaguuaaaaaaggaaauucauacccaaagcucagcaaauccuacauuaaugauaaagggaaagaaguccucgugcuauggggcauucaccauccaucuacuacugcugaccaacaaagucucuaucagaaugcagauacauauguuuuuguggggacaucaagauacagcaagaaguucaagccggaaauagcaauaagacccaaagugagggaucaagaagggagaaugaacuauuacuggacacuaguagagccgggagacaaaauaacauucgaagcaacuggaaaucuagugguaccgagauaugcauucgcaauggaaagaaaugcuggaucugguauuaucauuucagauacaccaguccacgauugcaauacaacuugucagacacccaagggugcuauaaacaccagccucccauuucagaauauacauccgaucacaauuggaaaauguccaaaauauguaaaaagcacaaaauugagacuggccacaggauugaggaaugucccgucuauucaaucuagaggccuauuuggggccauugccggcuucauugaagggggguggacagggaugguagauggaugguacgguuaucaccaucaaaaugagcaagggucaggauaugcagccgaccugaagagcacacagaaugccauugacaagauuacuaacaaaguaaauucuguuauugaaaagaugaauacacaguucacagcaguagguaaagaguucaaccaccuggaaaaaagaauagagaauuuaaauaaaaaaguugaugaugguuuccuggacauuuggacuuacaaugccgaacuguugguucuauuggaaaaugaaagaacuuuggacuaccacgauucaaauguuaagaacuuauaugaaaagguaagaaaccaguuaaaaaacaaugccaaggaaauuggaaauggcugcuuugaauuuuaccacaaaugcgauaacacgugcauggaaagugucaaaaaugggacuuaugacuacccaaaauacucagaggaagcaaaauuaaacagagaagaaauagaugggguaaagcuggaaucaacaaggauuuaccagauuuuggcgaucuauucaacugucgccaguucauugguacugguagucucccugggggcaaucaguuuuuggaugugcucuaaugggucucuacaguguagaauauguauuuaa

SEQ ID NO: 40378 - RNA, 1701 nt, Artificial Sequence
  derived and/or modified CDS sequence (wt) from hemagglutinin__InfluenzaA__AFD98290
augaagacuaucauugcuuugagcuacauucuaugucugguuuucgcucaaaaacuuccuggaaaugacaacagcacggcaacgcugugccuugggcaccaugcagugccaaacgggacgauagugaaaacaaucacgaaugaccaaauugaaguuacuaaugcuacugaacugguucagaguuccucaacaggugaaauaugcaacaguccucaucagauccuugauggagaaaacugcacacuaauagaugcucuauugggagacccucagugugauggcuuccaaaacaagaaaugggaccuuuuuguugaacgaagcaaagcccacagcaacuguuacccuuaugaugugccggauuaugccucccuuaggucacuaguugccucauccggcacacuggaguuuaacaaugaaagcuucaauuggacuggagucacucaaaacggaacaagcucugcuugcaugaggagaucuaauaauaguuucuuuaguagauugaauugguugacccacuuaaacuucaaauacccagcauugaacgugacuaugccaaacaaugaacaauuugacaaauuguacauuugggggguucaccacccggguacggacaaggaccaaaucuuccuguaugcucaagcaucaggaagaaucacaguaucuaccaaaagaagccaacaagcuguaauuccgaauaucggaucuagacccagaguaaggaauaucccuagcagaguaagcaucuauuggacaauaguaaaaccgggagacauacuuuugauuaacagcacagggaaucuaauugcuccuagggguuacuucaaaauacgaagugggaaaagcucaauaaugagaucagaugcacccauuggcaaaugcaauucugcaugcaucacuccaaauggaagcauucccaaugacaaaccauuccaaaauguaaacaggaucacauacggggccugucccagauauguuaagcaaaacacucugaaauuggcaacaggaaugagaaauguaccagagaaacaaacuagaggcauauuuggcgcaauagcggguuucauagaaaaugguugggagggaaugguggaugguugguacgguuucaggcaucaaaauucugagggaaggggacaggcagcagaucuuaaaagcacucaagcagcaaucgaucaaaucaaugggaagcugaauagauugaucgggaaaaccaacgagaaauuccaucagauugaaaaagaauucucagaagucgaagggagaauucaggaccuugagaaauauguugaagacacuaaaauagaucucuggucauacaacgcggagcuucuuguugcccuggagaaccaacacacaauugaucuaacugacucagaaaugaacaaacuguuugaaaaaacaaagaagcaacugagggaaaaugcugaggauaugggcaaugguuguuucaaaauauaccacaaaugugacaaugccugcauaggaucaaucagaaauggaacuuaugaccacgauguguacagagaugaagcauuaaacaaccgauuccagaucaagggaguugagcugaagucaggguacaaagauuggauccuauggauuuccuuugccauaucauguuuuuugcuuuguguugcuuuguugggguucaucaugugggccugccaaaaaggcaacauuaggugcaacauuugcauuuga

SEQ ID NO: 40379 - RNA, 1701 nt, Artificial Sequence
  derived and/or modified CDS sequence (wt) from hemagglutinin__InfluenzaA__AFD98310
augaaggcaauacuaguaguucugcuauauacauuugcaaccgcaaaugcagacacauuauguauagguuaucaugcgaacaauucaacagacacuguagacacaguacuagaaaagaauguaacaguaacacacucuguuaaccuucuagaagacaagcauaacgggaaacuaugcaaacuaagagggguagccccauugcauuuggguaaauguagcauugcuggcuggauccugggaaauccagaaugugaaucacucuccacagcaagcucaugguccuacauuguggaaacaucuaguucagacaauggaacguguuacccaggagauuucaucaauuaugaggagcuaagagagcaauugagcucagugucaucauuugaaagguuugagauauuccccaagacaaguucauggcccaaucaugacucgaacaaagguguaacggcagcauguccucaugcuggagcaaaaagcuucuacaaaaauuuaauauggcuaguuaaaaaaggaaauucauacccaaagcucagcaaauccuacauuaaugauaaagggaaagaaguccucgugcuauggggcauucaccauccaucuacuacugcugaccaacaaagucucuaucagaaugcagaugcauauguuuuuguggggacaucaagauacagcaagaaguucaagccggaaauagcaauaagacccaaagugagggaucaagaagggagaaugaacuauuacuggacacuaguagagccgggagacaaaauaacauucgaagcaacuggaaaucuagugguaccgagauaugcauucgcaauggaaagaaaugcuggaucugguauuaucauuucagauacaccaguccacgauugcaauacaacuugucagacacccaagggugcuauaaacaccagccucccauuucagaauauacauccgaucacaauuggaaaauguccaaaauauguaaaaagcacaaaauugagacuggccacaggauugaggaaugucccgucuauucaaucuagaggccuauuuggggccauugccggcuucauugaagggggguggacagggaugguagauggaugguacgguuaucaccaucaaaaugagcaggggucaggauaugcagccgaccugaagagcacacagaaugccauugacaagauuacuaacaaaguaaauucuguuauugaaaagaugaauacacaguucacagcaguagguaaagaguucaaccaccuggaaaaaagaauagagaauuuaaauaaaaaaguugaugaugguuuccuggacauuuggacuuacaaugccgaacuguugguucuauuggaaaaugaaagaacuuuggacuaccacgauucaaaugugaagaacuuauaugaaaagguaagaaaccaguuaaaaaacaaugccaaggaaauuggaaacggcugcuuugaauuuuaccacaaaugcgauaacacgugcauggaaagugucaaaaaugggacuuaugacuacccaaaauacucagaggaagcaaaauuaaacagagaagaaauagaugggguaaagcuggaaucaacaaggauuuaccagauuuuggcgaucuauucaacugucgccaguucauugguacugguagucucccugggggcaaucagcuucuggaugugcucuaaugggucucuacaguguagaauauguauuuaa

SEQ ID NO: 40380 - RNA, 1701 nt, Artificial Sequence
  derived and/or modified CDS sequence (wt) from hemagglutinin__InfluenzaA__AFD98320
augaaggcaauacuaguaguucugcuauauacauuugcaaccgcaaaugcagacacauuauguauagguuaucaugcgaacaauucaacagacacuguagacacaguacuagaaaagaauguaacaguaacacacucuguuaaucuccuagaagacaagcauaacgggaaacuaugcaaacuaagagggguagccccauugcauuuggguaaauguaacauugcuggcuggauccugggaaauccagagugugaaucacucuccacagcaagcucaugguccuacauuguggaaacaucuaguucagacaauggaacguguuacccaggagauuucaucgauuaugaggagcuaagagagcaauugagcucagugucaucauuugaaagguuugagauauuccccaagacaaguucauggcccaaucaugacucgaacaaagguguaacugcagcauguccucaugcuggagcaaaaggcuucuacaaaaauuuaauauggcuaguuaaaaaaggaaauucauacccaaagcucagcaaauccuacauuaaugauaaagggaaagaaguccuugugcuauggggcauucaccauccaucuacuacugcugaccaacaaagucucuaucagaaugcagauacauauguuuuuguggggacaucaagauacagcaagaaguucaagccggaaauagcaauaagacccaaagugagggaucaagaagggagaaugaacuauuacuggacacuaguagagccgggagacaaaauaacauucgaagcaacuggaaaucuagugguaccgagauaugcauucgcaauggaaagaaaugcuggaucuggcauuaucauuucagauacaccaguccacgauugcaauacaacuugucagacacccaagggugcuauaaacaccagccucccauuucagaauauacauccgaucacaauuggaaaauguccaaaauauguaaaaagcacaaaauugagacuggccacaggauugaggaaugucccgucuauucaaucuagaggccuauuuggggccauugccggcuucauugaagggggguggacagggaugguagauggaugguacgguuaucaccaucaaaaugagcaggggucaggauaugcagccgaccugaagagcacacagaaugccauugacaagauuacuaacaaaguaaauucuguuauugaaaagaugaauacacaguucacagcaguagguaaagaguucaaccacuuggaaaaaagaauagagaauuuaaauaaaaaaguugaugaugguuuccuggacauuuggacuuacaaugccgaacuguugguucuauuggaaaaugaaagaacuuuggacuaccacgauucaaaugugaagaacuuauaugaaaagguaagaaaccaguuaaaaaacaaugccaaggaaauuggaaauggcugcuuugaauuuuaccacaaaugcgauaacacgugcauggaaagugucaaaaaugggacuuaugacuacccaaaauacucagaggaagcaaaauuaaacagagaagaaauagaugggguaaagcuggaaucaacaaggauuuaccagauuuuggcgaucuauucaacugucgccaguucauugguacugguagucucccugggggcaaucaguuuuuggaugugcucuaaugggucucuacaguguagaauauguauuuaa

SEQ ID NO: 40381 - RNA, 1701 nt, Artificial Sequence; identical to SEQ ID NO: 40366
  derived and/or modified CDS sequence (wt) from hemagglutinin__InfluenzaA__AFD98340

SEQ ID NO: 40382 - RNA, 1701 nt, Artificial Sequence
  derived and/or modified CDS sequence (wt) from hemagglutinin__InfluenzaA__AFD98351
augaagaccaucauugcuuugagcuacauucuaugucugguuuucgcucaaaaacuuccuggaaaugacaacagcacggcaacgcugugccuugggcaccaugcaguaccaaacggaacgauagugaaaacaaucacgaaugaccaaauugaaguuacuaaugcuacugagcugguucagaguuccucagcaggugaaauaugcgacaguccucaucauauccuugauggagaaaacugcacacuaauagaugcucuauugggagacccucagugugauggcuuccaaaauaagaaaugggaccuuuuuguugaacgaagcagagccuacagcaacuguuacccuuaugaugugccggauuaugccucccuuaggucacuaguugccucauccggcacacuggaguuuaacaaugaaagcuucaauuggacuggagucacucaaaacggaacaagcucugcuugcauaaggagaucuaauaauaguuucuuuaguagauugaauugguugacccacuuaaacuucaaauacccagcauugaacgugacuaugccaaacaaugaacaauuugacaaauuguacauuugggggguucaccacccggguacggacaaggaccaaaucuuccuguaugcucaagcaucaggaagaaucacaguaucuaccaaaagaagccaacaagcuguaaucccgaauaucggaucuagacccagaguaaggaauaucccuagcagaauaagcaucuauuggacaauaguaaaaccgggagacauacuuuugauuaacagcacagggaaucuaauugcuccuagggguuacuucaaaauacgaagugggaaaagcucaauaaugagaucagaugcacccauuggcaaaugcaauucugaaugcaucacuccaaauggaagcauucccaaugacaaaccauuccaaaauguaaacaggaucacauacggggccugucccagauauguuaagcaaagcacucugaaauuggcaacaggaaugcgaaauguaccagagaaacaaacuagaggcauauuuggcgcaauagcggguuucauagaaaaugguugggagggaaugauggaugguugguacgguuucaggcaucaaaauucugagggaagaggacaagcagcagaucucaaaagcacucaagcagcaaucgaucaaaucaauggaaagcugaauagauugaucgggaaaaccaacgagaaauuccaucagauugaaaaagaauucucagaagucgaagggagaauucaggaccuugagaaauauguugaggacacuaaaauagaucucuggucauacaacgcggagcuucuuguugcccuggagaaccaacauacaauugaucuaacugacucagaaaugaacaaacuguuugaaaaaacaaagaagcaacugagggaaaaugcugaggauaugggcaaugguuguuucaaaauauaccacaaaugugacaaugccugcauaggaacaaucagaaauggaacuuaugaccacgauguauacagagaugaagcauuaaacaaccgguuccagaucaagggaguugagcugaagucaggguacaaagauuggauccuauggauuuccuuugccauaucauguuuuuugcuuuguguugcuuuguugggguucaucaugugggccugccaaaaaggcaacauuaggugcaacauuugcauuuga

SEQ ID NO: 40383 - RNA, 1701 nt, Artificial Sequence
  derived and/or modified CDS sequence (wt) from hemagglutinin__InfluenzaA__AFD98362
augaagacuaucauugcuuugagcuacauucuaugucugguuuucgcucaaaaacuuccuggaaaugacaacagcauggcaacgcugugccuugggcaccaugcaguaccaaacggaacgauagugaaaacaaucacgaaugaccaaauugaaguuacuaaugcuacugagcugguucagaauuccucaacaggugaaauaugcgacaguccucaucagauccuugauggagaaaacugcacacuaauagaugcucuauugggagacccucagugugauggcuuccaaaauaagaaaugggaccuuuuuguugaacgaagcaaagccuacagcaacuguuacccuuaugaugugccggauuaugccucccuuaggucacuaguugccucauccggcacacuggaguuuaacaaugaaagcuucaauuggacuggagucacucaaaacggaacaagcucugcuugcauaaggagaucuaauaauaguuucuuuaguagauugaauugguugacccacuuaaacuucaaauacccagcauugaacgugacuaugccaaacaaugaacaauuugacaaauuguacauuugggggguucaccacccggguacggacaaggaccaaaucuuccuguaugcucaagcaucaggaagaaucacaguaucuaccaaaagaggccaacaagcuguaaucccgaauaucggaucuagacccagaguaaggaauaucccuagcagaauaagcaucuauuggacaauaguaaaaccgggagacauacuuuugauuaacagcacagggaaucuaauugcuccuagggguuacuucaaaauacgaagugggaaaagcucaauaaugagaucagaugcacccauuggcaaaugcaauucugaaugcaucacuccaaauggaagcauucccaaugacaaaccauuccaaaauguaaacaggaucacauacggggccugucccagauauguuaagcaaaacacucugaaauuggcaacaggaaugcgaaauguaccagagaaacaaacuagaggcauauuuggcgcaauagcggguuucauagaaaaugguugggagggaaugguggaugguugguacgguuucaggcaucaaaauucugagggaagaggacaagcagcagaucucaaaagcacucaagcagcaaucgaucaaaucaaugggaagcugaauagauuggucgggaaaaccaacgagaaauuccaucagauugaaaaagaauucucagaagucgaagggagaauucaggaccuugagaaauauguugaggacacuaaaauagaucucuggucauacaacgcggagcuucuuguugcccuggagaaccaacauacaauugaucuaacugacucagagaugaacaaacuguuugaaaaaacaaagaagcaacugagggaaaaugcugaggauaugggcaaugguuguuucaaaauauaccacaaaugugacaaugccugcauaggaucaaucagaaauggaacuuaugaccacgauguauacagagaugaagcauuaaacaaccgguuccagaucaagggaguugagcugaagucaggguacaaagauuggauccuauggauuuccuuugccauaucauguuuuuugcucuguguugcuuuguugggguucaucaugugggccugccaaaaaggcaacauuaggugcaacauuugcauuuga

SEQ ID NO: 40384 - RNA, 1701 nt, Artificial Sequence
  derived and/or modified CDS sequence (wt) from hemagglutinin__InfluenzaA__AFD98373
augaagaccaucauugcuuugagcuacauucuaugucugguuuucgcucaaaaacuuccuggaaaugacaacagcacggcaacgcugugccuugggcaccaugcaguaccaaacggaacgauagugaaaacaaucacgaaugaccaaauugaaguuacuaaugcuacugagcugguucagaguuccucagcaggugaaauaugcgacaguccucaucauauccuugauggagaaaacugcacacuaauagaugcucuauugggagacccucagugugauggcuuccaaaauaagaaaugggaccuuuuuguugaacgaagcagagccuacagcaacuguuacccuuaugaugugccggauuaugccucccuuaggucacuaguugccucauccggcacacuggaguuuaacaaugaaagcuucaauuggacuggagucacucaaaacggaacaagcucugcuugcauaaggagaucuaauaauaguuucuuuaguagauugaauugguugacccacuuaaacuucaaauacccagcauugaacgugacuaugccaaacaaugaacaauuugacaaauuguacauuugggggguucaccacccggguacggacaaggaccaaaucuuccuguaugcucaagcaucaggaagaaucacaguaucuaccaaaagaagccaacaagcuguaaucccgaauaucggaucuagacccagaguaaggaauaucccuagcagaauaagcaucuauuggacaauaguaaaaccgggagacauacuuuugauuaacagcacagggaaucuaauugcuccuagggguuacuucaaaauacgaagugggaaaagcucaauaaugagaucagaugcacccauuggcaaaugcaauucugaaugcaucacuccaaauggaagcauucccaaugacaaaccauuccaaaauguaaacaggaucacauacggggccugucccagauauguuaagcaaagcacucugaaauuggcaacaggaaugcgaaauguaccagagaaacaaacuagaggcauauuuggcgcaauagcggguuucauagaaaaugguugggagggaaugauggaugguugguacgguuucaggcaucaaaauucugagggaagaggacaagcagcagaucucaaaagcacucaagcagcaaucgaucaaaucaauggaaagcugaauagauugaucgggaaaaccaacgagaaauuccaucagauugaaaaagaauucucagaagucgaagggagaauucaggaccuugagaaauauguugaggacacuaaaauagaucucuggucauacaacgcggagcuucuuguugcccuggagaaccaacauacaauugaucuaacugacucagaaaugaacaaacuguuugaaaaaacaaagaagcaacugagggaaaaugcugaggauaugggcaaugguuguuucaaaauauaccacaaaugugacaaugccugcauaggaucaaucagaaauggaacuuaugaccacgauguauacagagaugaagcauuaaacaaccgguuccagaucaagggaguugagcugaagucaggguacaaagauuggauccuauggauuuccuuugccauaucauguuuuuugcuuuguguugcuuuguugggguucaucaugugggccugccaaaaaggcaacauuaggugcaacauuugcauuuga

SEQ ID NO: 40385 - RNA, 1701 nt, Artificial Sequence
  derived and/or modified CDS sequence (wt) from hemagglutinin__InfluenzaA__AFD98384
augaagacuaucauugcuuugagcuacauucuaugucugguuuucgcucaaaaacuuccuggaaaugacaacagcacggcaacgcugugccuugggcaccaugcagugccaaacggaacgauagugaaaacaaucacgaaugaccaaauugaaguuacuaaugcuacugagcugguucagaguuccucaacaggugaaauaugcaacaguccucaucagauccuugauggagaaaacugcacacuaauagaugcucuauugggagacccucagugugauggcuuccaaaacaagaaaugggaccuuuuuguugaacgaagcaaagcccacagcaacuguuacccuuaugaugugccggauuaugccucccuuaggucacuaguugccucauccggcacacuggaguuuaauaaugaaagcuucaauuggacuggagucacucaaaacggaacaagcucugcuugcauaaggagaucuaauaauaguuucuuuaguagauugaauugguugacccacuuaaacuucaaauacccagcauugaacgugacuaugccaaacaaugaacaauuugacaaauuguacauuugggggguucaccacccggguacggacaaggaccaaaucuuccuguaugcucaagcaucaggaagaaucacaguaucuaccaaaagaagccaacaagcuguaauuccgaauaucggaucuagacccagaguaaggaauaucccuagcagaguaagcaucuauuggacaauaguaaaaccgggagacauacuuuugauuaacagcacagggaaucuaauugcuccuagggguuacuucaaaauacgaagugggaaaagcucaauaaugagaucagaugcacccauuggcaaaugcaauucugcaugcaucacuccaaauggaagcauucccaaugacaaaccauuccaaaauguaaacaggaucacauacggggccugucccagauauguuaagcaaaacacucugaaauuggcaacaggaaugagaaauguaccagagaaacaaacuagaggcauauuuggcgcaauagcggguuucauagaaaaugguugggagggaaugguggaugguugguacgguuucaggcaucaaaauucugagggaaggggacaagcagcagaucucaaaagcacucaagcagcaaucgaucaaaucaaugggaagcugaauagauugaucgggaaaaccaacgagaaauuccaucagauugaaaaagaauucucagaagucgaagggagaauucaggaccuugagaaauauguugaggacacuaaaauagaucucuggucauacaacgcggagcuucuuguugcccuggagaaccaacacacaauugaucuaacugacucagaaaugaacaaacuguuugaaaaaacaaagaagcaacugagggaaaaugcugaggauaugggcaaugguuguuucaaaauauaccacaaaugugacaaugccugcauaggaucaaucagaaauggaacuuaugaccacgauguguacagagaugaagcauuaaacaaccgauuccagaucaagggaguugaguugaagucaggguacaaagauuggauccuauggauuuccuuugccauaucauguuuucugcuuuguguugcuuuguugggguucaucaugugggccugccaaaaaggcaacauuaggugcaacauuugcauuuga

SEQ ID NO: 40386 - RNA, 1701 nt, Artificial Sequence
  derived and/or modified CDS sequence (wt) from hemagglutinin__InfluenzaA__AFD98395
augaagaccaucauugcuuugagcuacauucuaugucugguuuucgcucaaaaacuuccuggagaugacaacagcacggcaacgcugugccuugggcaccaugcaguaccaaacggaacgauagugaaaacaaucacgaaugaccaaauugaaguuacuaaugcuacugagcugguucagaauuccucagcaggugaaauaugcgacaguccucaucauauccuugauggagaaaacugcacacuaauagaugcucuauugggagacccucagugugauggcuuccaaaauaagaaaugggaccuuuuuguugaacgaagcagagccuacagcaacuguuacccuuaugaugugccggauuaugccucccuuaggucacuaguugccucauccggcacacuggaguuuaacaaugaaagcuucaauuggacuggagucacucaaaacggaacaagcucugcuugcauaaggagaucuaauaauaguuucuuuaguagauugaauugguugacccacuuaaacuucaaauacccagcauugaacgugacuaugccaaacaaugaacaauuugacaaauuguacauuugggggguucaccacccggguacggacaaggaccaaaucuuccuguaugcucaagcaucaggaagaaucacaguaucuaccaaaagaagccaacaagcuguaaucccgaauaucggaucuagacccagaguaaggaauaucccuagcagaauaagcaucuauuggacaauaguaaaaccgggagacauacuuuugauuaacagcacagggaaucuaauugcuccuagggguuacuucaaaauacgaagugggaaaagcucaauaaugagaucagaugcacccauuggcaaaugcaauucugaaugcaucacuccaaauggaagcauucccaaugacaaaccauuccaaaauguaaacaggaucacauacggagccugucccagauauguuaagcaaagcacucugaaauuggcaacaggaaugcgaaauguaccagagaaacaaacuagaggcauauuuggcgcaauagcggguuucauagaaaaugguugggagggaaugauggaugguugguacgguuucaggcaucaaaauucugagggaagaggacaagcagcagaucucaaaagcacucaagcagcaaucgaucaaaucaauggaaagcugaauagauugaucgggaaaaccaacgagaaauuccaucagauugaaaaagaauucucagaagucgaagggagaauucaggaccuugagaaauauguugaggacacuaaaauagaucucuggucauacaacgcggagcuucuuguugcccuggagaaccaacauacaauugaucuaacugacucagaaaugaacaaacuguuugaaaaaacaaagaagcaacugagggaaaaugcugaggauaugggcaaugguuguuucaaaauauaccacaaaugugacaaugccugcauaggaucaaucagaaauggaacuuaugaccacgauguauacagagaugaagcauuaaacaaccgguuccagaucaagggaguugagcugaagucaggguacaaagauuggauccuauggauuuccuuugccauaucauguuuuuugcuuuguguugcuuuguugggguucaucaugugggccugccaaaaaggcaacauuaggugcaacauuugcauuuga

SEQ ID NO: 40387 - RNA, 1701 nt, Artificial Sequence
  derived and/or modified CDS sequence (wt) from hemagglutinin__InfluenzaA__AFD98406
augaagaccaucauugcuuugagcuacauucuaugucugguuuucgcucaaaaacuuccuggaaaugacaacagcacggcaacgcugugccuugggcaccaugcaguaccaaacggaacgauagugaaaacaaucacgaaugaccaaauugaaguuacuaaugcuacugagcugguucagaguuccucagcaggugaaauaugcgacaguccucaucauauccuugauggagaaaacugcacacuaauagaugcucuauugggagacccucagugugauggcuuccaaaauaagaaaugggaccuuuuuguugaacgaagcagagccuacagcaacuguuacccuuaugaugugccggauuaugccucccuuaggucacuaguugccucauccggcacacuggaguuuaacaaugaaagcuucaauuggacuggagucacucaaaacggaacaagcucugcuugcauaaggagaucuaauaauaguuucuuuaguagauuaaauugguugacccacuuaaacuucaaauacccagcauugaacgugacuaugccaaacaaugaacaauuugacaaauuguacauuugggggguucaccacccggguacggacaaggaccaaaucuuccuguaugcucaagcaucaggaagaaucacaguaucuaccaaaagaagccaacaagcuguaaucccgaauaucggaucuagacccagaguaaggaauaucccuagcagaauaagcaucuauuggacaauaguaaaaccgggagacauacuuuugauuaacagcacagggaaucuaauugcuccuagggguuacuucaaaauacgaagugggaaaagcucaauaaugagaucagaugcacccauuggcaaaugcaauucugaaugcaucacuccaaauggaagcauucccaaugacaaaccauuccaaaauguaaacaggaucacauacggggccugucccagauauguuaagcaaagcacucugaaauuggcaacaggaaugcgaaauguaccagagaaacaaacuagaggcauauuuggcgcaauagcggguuucauagaaaaugguugggagggaaugauggaugguugguacgguuucaggcaucaaaauucugagggaagaggacaagcagcagaucucaaaagcacucaagcagcaaucgaucaaaucaauggaaagcugaauagauugaucgggaaaaccaacgagaaauuccaucagauugaaaaagaauucucagaagucgaagggagaauucaggaccuugagaaauauguugaggacacuaaaauagaucucuggucauacaacgcggagcuucuuguugcccuggagaaccaacauacaauugaucuaacugacucagaaaugaacaaacuguuugaaaaaacaaagaagcaacugagggaaaaugcugaggauaugggcaaugguuguuucaaaauauaccacaaaugugacaaugccugcauaggaucaaucagaaauggaacuuaugaccacgauguauacagagaugaagcauuaaacaaccgguuccagaucaagggaguugagcugaagucaggguacaaagauuggauccuauggauuuccuuugccauaucauguuuuuugcuuuguguugcuuuguugggguucaucaugugggccugccaaaaaggcaacauuaggugcaacauuugcauuuga

SEQ ID NO: 40388 - RNA, 1701 nt, Artificial Sequence; identical to SEQ ID NO: 40366
  derived and/or modified CDS sequence (wt) from hemagglutinin__InfluenzaA__AFD98417

SEQ ID NO: 40389 - RNA, 1701 nt, Artificial Sequence
  derived and/or modified CDS sequence (wt) from hemagglutinin__InfluenzaA__AFD98428
augaagaccaucauugcuuugagcuacauucuaugucugguuuucgcucaaaaacuuccuggaaaugacaacagcacggcaacgcugugccuugggcaccaugcagugccaaacggaacgauagugaaaacaaucacgaaugaccaaauugaaguuacuaaugcuacugagcugguucagaguuccucaacaggugaaauaugcaacaguccucaucagauccuugauggagaaaacugcacacuaauagaugcucuauugggagacccucagugugauggcuuccaaaacaagaaaugggaccuuuuuguugaacgaagcaaagcccacagcaacuguuacccuuaugaugugccggauuaugccucccuuaggucacuaguugccucauccggcacacuggaguuuaacaaugaaagcuucaauuggacuggagucacucaaaacggaacaagcucugcuugcauaaggagaucuaauaauaguuucuuuaguagauugaauugguugacccacuuaaacuucaaauacccagcauugaacgugacuaugccaaacaaugaacaauuugacaaauuguacauuugggggguucaccacccggguacggacaaggaccaaaccuuccuguaugcucaagcaucaggaagaaucacaguaucuaccaaaagaagccaacaagcuguaauuccgaauaucggaucuagacccagaguaaggaauaucccuagcagaguaagcaucuauuggacaauaguaaaaccgggagacauacuuuugauuaacagcacagggaaucuaauugcuccuagggguuacuucaaaauacgaagugggaaaagcucaauaaugagaucagaugcacccauuggcaaaugcaauucugcaugcaucacuccaaauggaagcauucccaaugacaaaccauuccaaaauguaaacaggaucacauacggggccugccccagauauguuaagcaaaacacucugaaauuggcaacaggaaugagaaauguaccagagaaacaaacuagaggcauauuuggcgcaauagcggguuucauagaaaaugguugggagggaaugguggaugguugguacgguuucaggcaucaaaauucugagggaaggggacaagcagcagaucucaaaagcacucaagcagcaaucgaucaaaucaaugggaagcugaauagauugaucgggaaaaccaacgagaaauuccaucagauugaaaaagaauucucagaagucgaagggagaauucaggaccuugagaaauauguugaggacacuaaaauagaucucuggucauacaacgcggagcuucuuguugcccuggagaaccaacacacaauugaucuaacugacucagaaaugaacaaacuguuugaaaaaacaaagaagcaacugagggaaaaugcugaggauaugggcaaugguuguuucaaaauauaccacaaaugugacaaugccugcauaggaucaaucagaaauggaacuuaugaccacgauguguacagagaugaagcauuaaacaaccgauuccagaucaagggaguugagcugaagucaggguacaaagauuggauccuauggauuuccuuuaccauaucauguuuuuugcuuuguguugcuuuguugggguucaucaugugggccugccaaaaaggcaacauuaggugcaacauuugcauuuga

SEQ ID NO: 40390 - RNA, 1701 nt, Artificial Sequence
  derived and/or modified CDS sequence (wt) from hemagglutinin__InfluenzaA__AFD98439
augaaggcaauacuaguaguucugcuauauacauuugcaaccgcaaaugcagacacauuauguauagguuaucaugcgaacaauucaacagacacuguagacacaguacuagaaaagaauguaacaguaacacacucuguuaaccuucuagaagacaagcauaacgggaaacuaugcaaacuaagagggguagccccauugcauuuggguaaauguaacauugcuggcuggauucugggaaauccagagugugaaucacucuccacagcaagcucaugguccuacauuguggaaacaucuaguucagacaauggaacguguuacccaggagauuucaucaauuaugaggagcuaagagagcaauugagcucagugucaucauuugaaagguuugagauauuccccaagacaaguucauggcccaaucaugacucgaacaaagguguaacggcagcauguccucaugcuggagcaaaaagcuucuacaaaaauuuaauauggcuaguuaaaaaaggaaauucauacccaaagcucagcaaauccuacauuaaugauaaagggaaagaaguccucgugcuguggggcauucaccauccaucuacuacugcugaccaacaaagucucuaucagaaugcagaugcauauguuuuuguggggacaucaagauacagcaagaaguucaagccggaaauagcaauaagacccaaagugagggaucaagaagggagaaugaacuauuacuggacacuaguagagccgggagacaaaauaacauucgaagcaacuggaaaucuagugguaccgagauaugcauucgcaauggaaagaaaugcuggaucugguauuaucauuucagauacaccaguccacgauugcaauacaacuugucagacacccaagggugcuauaaacaccagccucccauuucagaauauacauccgaucacaauuggaaaauguccaaaauauguaaaaagcacaaaauugagacuggccacaggauugaggaaugucccgucuauucaaucuagaggccuauuuggggccauugccggcuucauugaagggggguggacagggaugguagauggaugguacgguuaucaccaucaaaaugagcaggggucaggauaugcagccgaccugaagagcacacagaaugccauugacaagauuacuaacaaaguaaauucuguuauugaaaagaugaauacacaguucacagcaguagguaaagaguucaaccaccuggaaaaaagaauagagaauuuaaauaaaaaaguugaugaugguuuccuggacauuuggacuuacaaugccgaacuguugguucuauuggaaaaugaaagaacuuuggacuaccacgauucaaaugugaagaacuuguaugaaaagguaagaaaccaguuaaaaaacaaugccaaggaaauuggaaacggcugcuuugaauuuuaccacaaaugcgauaacacgugcauggaaagugucaaaaaugggacuuaugacuacccaaaauacucagaggaagcaaaauuaaacagagaagaaauagaugggguaaagcuggaaucaacaaggauuuaccagauuuuggcgaucuauucaacugucgccaguucauugguacugguagucucccugggggcaaucaguuucuggaugugcucuaaugggucucuacaguguagaauauguauuuaa

SEQ ID NO: 40391 - RNA, 1701 nt, Artificial Sequence
  derived and/or modified CDS sequence (wt) from hemagglutinin__InfluenzaA__AFD98449
augaagacuaucauugcuuugagcuacauucuaugucugguuuucgcucaaaaacuuccuggaaaugacaacagcacggcaacgcugugccuugggcaccaugcaguaccaaacggaacgauagugaaaacaaucacgaaugaccaaauugaaguuacuaaugcuacugagcugguucagaguuccucaacaggugaaauaugcgacaguccucaucagauccuugaugggaaaaacugcacacuaauagaugcucuauugggagacccucagugugauggcuuccaaaauaagaaaugggaccuuuuuguugaacgcagcaaagccuacagcaacuguuacccuuaugaugugccggauuaugccucccuuaggucacuaguugccucauccggcacacuggaguuuaacaaugaaaacuucaauuggacuggagucacucaaaacggaacaagcucugcuugcauaaggagaucuaaaaacaguuucuuuaguagauugaauugguugacccacuuaaacuucaaauucccagcauugaacgugacuaugccaaacaaugaacaauuugacaaauuguacauuugggggguucaccacccggguacggacaaagaccaaaucuuccuauaugcucaagcaucaggaagaaucacagucucuaccaaaagaagccaacaaacugcaaucccgaauaucggaucuagacccagaguaaggaauaucccuagcagaauaagcauauauuggacaauaguaaaaccgggagacauacuuuugauuaacagcacagggaaucuaauugcuccuagggguuacuucaaaauacgaagugggaaaagcucaauaaugagaucagaugcacccauuggcaaaugcaauucugaaugcaucacuccaaauggaagcauucccaaugacaaaccauuccaaaauguaaacaggaucacauacggggccugucccagauauguuaagcaaaacacucugaaauuggcaacagggaugcgaaauguaccagagaaacaaacuagaggcauauuuggcgcaaucgcggguuucauagaaaauggaugggagggaaugguggaugguugguacgguuucaggcaucaaaauucugagggaagaggacaagcagcagaucucaaaagcacucaagcagcaaucgaucaaaucaaugggaagcugaauagauugaucgggaaaaccaacgagaaauuccaucaaauugaaaaagaauucucagaagucgaagggagaauucaggaccuugagaaauauguugaggacacuaaaauagaucucuggucauacaacgcggagcuucuuguugcccuggagaaccaacauacaauugaucuaacugacucagaaaugaacaaacuguuugaaaaaacaaagaagcaacugagggaaaaugcugaggauaugggcaaugguuguuucaaaauauaccacaaaugugacaaugccugcauagggucaaucagaaauggaacuuauaaccacgauguauacagagaugaagcacuaaacaaccgguuucagaucaagggaguugagcugaagucaggguacaaagauuggauccuauggauuuccuuugccauaucauguuuuuugcuuuguguugcuuuguugggguucaucaugugggccugccaaaaaggcaacauuaggugcaacauuugcauuuga

SEQ ID NO: 40392 - RNA, 1701 nt, Artificial Sequence
  derived and/or modified CDS sequence (wt) from hemagglutinin__InfluenzaA__AFD98460
augaagaccaucauugcuuugagcuacauucuaugucugguuuucgcucaaaaacuuccuggaaaugacaacagcacggcaacgcugugccuugggcaccaugcaguaccaaacggaacgauagugaaaacaaucacgaaugaccaaauugaaguuacuaaugcuacugagcugguucagaguuccucagcaggugaaauaugcgacaguccucaucauauccuugauggagaaaacugcacacuaauagaugcucuauugggagacccucagugugauggcuuccaaaauaagaaaugggaccuuuuuguugaacgaagcagagccuacagcaacuguuacccuuaugaugugccggauuaugccucccuuaggucacuaguugccucauccggcacacuggaguuuaacaaugaaagcuucaauuggacuggagucacucaaaacggaacaagcucugcuugcauaaggagaucuaauaauaguuucuuuaguaaauugaauugguugacccacuuaaacuucaaauacccagcauugaacgugacuaugccaaacaaugaacaauuugacaaauuguacauuugggggguucaccacccggguacggacaaggaccaaaucuuccuguaugcucaagcaucaggaagaaucacaguaucuaccaaaagaagccaacaagcuguaaucccgaauaucggaucuagacccagaguaaggaauaucccuagcagaauaagcaucuauuggacaauaguaaaaccgggagacauacuuuugauuaacagcacagggaaucuaauugcuccuagggguuacuucaaaauacgaagugggaaaagcucaauaaugagaucagaugcacccauuggcaaaugcaauucugaaugcaucacuccaaacggaagcauucccaaugacaaaccauuccaaaauguaaacaggaucacauacggggccugucccagauauguuaagcaaagcacucugaaauuggcaacaggaaugcgaaauguaccagagaaacaaacuagaggcauauuuggcgcaauagcggguuucauagaaaaugguugggagggaaugauggaugguugguacgguuucaggcaucaaaauucugagggaagaggacaagcagcagaucucaaaagcacucaagcagcaaucgaucaaaucaauggaaagcugaauagauugaucgggaaaaccaacgagaaauuccaucagauugaaaaagaauucucagaagucgaagggagaauucaggaccuugagaaauauguugaggacacuaaaauagaucucuggucauacaacgcggagcuucuuguugcccuggagaaccaacauacaauugaucuaacugacucagaaaugaacaaacuguuugaaaaaacaaagaagcaacugagggaaaaugcugaggauaugggcaaugguuguuucaaaauauaccacaaaugugacaaugccugcauaggaucaaucagaaauggaacuuaugaccacgauguauacagagaugaagcauuaagcaaccgguuccagaucaagggaguugagcugaagucaggguacaaagauuggauccuauggauuuccuuugccauaucauguuuuuugcuuuguguugcuuuguugggguucaucaugugggccugccaaaaaggcaacauuaggugcaacauuugcauuuga

SEQ ID NO: 40393 - RNA, 1701 nt, Artificial Sequence
  derived and/or modified CDS sequence (wt) from hemagglutinin__InfluenzaA__AFD98471
augaaggcaauacuaguaguucugcuauauacauuugcaaccgcaaaugcagacacauuauguauagguuaucaugcgaacaauucaacagacacuguagacacaguacuagaaaagaauguaacaguaacacacucuguuaaccuucuagaagacaagcauaacgggaaacuaugcaaacuaagagggguagccccauugcauuuggguaaauguaacauugcuggcuggauccugggaaauccagagugugaaucacucuccacagcaagcucaugguccuacauuguggaaacaucuaguucagacaauggaacguguuacccaggagauuucaucaauuaugaggagcuaagagagcaauugagcucagugucaucauuugaaagguuugagauauuccccaagacaagcucauggcccaaucaugacucgaacaaagguguaacggcagcauguccucaugcuggagcaaaaagcuucuacaaaaauuuaauauggcuaguuaaaaaaggaaauucauacccaaagcucagcaaauccuacauuaaugauaaagggaaagaaguccucgugcuauggggcauucaccauccaucuacuacugcugaccaacaaagucucuaucagaaugcagaugcauauguuuuuguggggacaucaagauacagcaagaaguucaagccggaaauagcaauaagacccaaagugagggaucaagaagggagaaugaacuauuacuggacauuaguagagccgggagacaaaauaacauucgaagcaacuggaaaucuagugguaccgagguaugcauucgcaauggaaagaaaugcuggaucugguauuaucauuucagauacaccaguccacgauugcaauacaacuugucagacacccaagggugcuauaaacaccagccucccauuucagaauauacauccgaucacaauuggaaaauguccaaaauauguaaaaagcacaaaauugagacuggccacaggauugaggaaugucccgucuauucaaucuagaggccuauuuggggccauugccggcuucauugaagggggguggacagggaugguagauggaugguacgguuaucaucaucaaaaugagcaggggucaggauaugcagccgaccugaagagcacacagaaugccauugacaagauuacuaacaaaguaaauucuguuauugaaaagaugaauacacaguucacagcaguagguaaagaguucaaccaccuggaaaaaagaauagagaauuuaaauaaaaaaguugaugaugguuuccuggacauuuggacuuacaaugccgaacuguugguucuauuggaaaaugaaagaacuuuggacuaccacgauucaaaugugaagaacuuauaugaaaagguaagaaaccaguuaaaaaacaaugccaaggaaauuggaaacggcugcuuugaauuuuaccacaaaugcgauaacacgugcauggaaagugucaaaaaugggacuuaugacuacccaaaauacucagaggaagcaaaauuaaacagagaagaaauagaugggguaaagcuggaaucaacaaggauuuaccagauuuuggcgaucuauucaacugucgccaguucauugguacugguagucucccugggggcaaucaguuucuggaugugcucuaaugggucucuacaguguagaauauguauuuaa

SEQ ID NO: 40394 - RNA, 1701 nt, Artificial Sequence
  derived and/or modified CDS sequence (wt) from hemagglutinin__InfluenzaA__AFD98481
augaagacuaucauugcuuugagcuacauucuaugucugguuuucgcucaaaaacuuccuggaaaugacaacagcacggcaacgcugugccuugggcaccaugcagugccaaacggaacgauagugaaaacaaucacgaaugaccaaauugaaguuacuaaugcuacugagcugguucagaauuccucaacaggugaaauaugcaacaguccucaucagauccuugauggagaaaacugcacacuaauagaugcucuauugggagacccucagugugauggcuuccaaaacaagaaaugggaccuuuuuguugaacgaagcaaagcccacagcaacuguuacccuuaugaugugccggauuaugccucccuuaggucacuaguugccucauccggcacacuggaguuuaacaaugaaagcuucaauuggacuggagucacucaaaacggaacaagcucugcuugcauaaggagaucuaauaauaguuucuuuaguagauugaauugguugacccacuuaaacuucaaauacccagcauugaacgugacuaugccaaacaaugaacaauuugacaaauuguacauuugggggguucaccacccggguacggacaaggaccaaaucuuccuguaugcucaagcagcaggaagaaucacaguaucuaccaaaagaagccaacaagcuguaauuccgaauaucggaucuagacccagaguaaggaauaucccuagcagaguaagcaucuauuggacaauaguaaaaccgggagacauacuuuugauuaacagcacagggaaucuaauugcuccuagggguuacuucaaaauacgaagugggaaaagcucaguaaugagaucagaugcacccauuggcaaaugcaauucugcaugcaucacuccaaauggaagcauucccaaugacaaaccauuccaaaauguaaacaggaucacauacggggccugucccagauauguuaagcaaaacacucugaaauuggcaacaggaaugagaaauguaccagagaaacaaacuagaggcauauuuggcgcaauagcugguuucauagaaaaugguugggagggaaugguggaugguugguacgguuucaggcaucaaaauucugagggaaggggacaagcagcagaucucaaaagcacucaagcagcaaucgaucaaaucaaugggaagcugaauagauugaucgggaaaaccaacgagaaauuccaucagauugaaaaagaauucucagaagucgaagggagaauucaggaccuugagaaauauguugaggacacuaaaauagaucucuggucauacaacgcggagcuucuuguugcccuggagaaccaacacacaauugaucuaacugacucagaaaugaacaaauuguuugaaaaaacaaagaagcaacugagggaaaaugcugaggauaugggcaaugguuguuucaaaauauaccacaaaugugacaaugccugcauaggaucaaucagaaauggaacuuaugaccacgauguguacagagaugaagcauuaaacaaccgauuccagaucaagggaguugagcugaagucaggguacaaagauuggauccuauggauuuccuuugccauaucauguuuuuugcuuuguguugcuuuguugggguucaucaugugggccugccaaaaaggcaacauuaggugcaacauuugcauuuga

SEQ ID NO: 40395 - RNA, 1701 nt, Artificial Sequence; identical to SEQ ID NO: 40362
  derived and/or modified CDS sequence (wt) from hemagglutinin__InfluenzaA__AFD98492

SEQ ID NO: 40396 - RNA, 1701 nt, Artificial Sequence
  derived and/or modified CDS sequence (wt) from hemagglutinin__InfluenzaA__AFD98503
augaagaccaucauugcuuugagcuacauucuaugucugguuuucgcucaaaaacuuccuggaaaugacaacagcacggcaacgcugugccuugggcaccaugcaguaccaaacggaacgauagugaaaacaaucacgaaugaccaaauugaaguuacuaaugcuacugagcugguucagaguuccucugcaggugaaauaugcgacaguccucaucauauccuugauggagaaaacugcacacuaauagaugcucuauugggagacccucagugugauggcuuccaaaauaagaaaugggaccuuuuuguugaacgaagcagagccuacagcaacuguuacccuuaugaugugccggauuaugccucccuuaggucacuaguugccucauccggcacacuggaguuuaacaaugaaagcuucaauuggacuggagucacucaaaacggaacaagcucugcuugcauaaggagaucuaauaauaguuucuuuaguagauugaauugguugacccacuuaaacuucaaauacccagcauugaacgugacuaugccaaacaaugaacaauuugacaaauuguacauuugggggguucaccacccggguacggacaaggaccaaaucuuccuguaugcucaagcaucaggaagaaucacaguaucuaccaaaagaagccaacaagcuguaaucccgaauaucggaucuagacccagaguaaggaauaucccuagcagaauaagcaucuauuggacaauaguaaaaccgggagacauacuuuugauuaacagcacagggaaucuaauugcuccuagggguuacuucaaaauacgaagugggaaaagcucaauaaugagaucagaugcacccauuggcaaaugcaauucugaaugcaucacuccaaauggaagcauucccaaugacaaaccauuccaaaauguaaacaggaucacauacggggccugucccagauauguuaagcaaagcacucugaaauuggcaacaggaaugcgaaauguaccagagaaacaaacuaaaggcauauuuggcgcaauagcggguuucauagaaaaugguugggagggaaugauggaugguugguacgguuucaggcaucaaaauucugagggaagaggacaagcagcagaucucaaaagcacucaagcagcaaucgaucaaaucaauggaaagcugaauagauugaucgggaaaaccaacgagaaauuccaucagauugaaaaagaauucucagaagucgaagggagaauucaggaccuugagaaauauguugaggacacuaaaauagaucucuggucauacaacgcggagcuucuuguugcccuggagaaccaacauacaauugaucuaacugacucagaaaugaacaaacuguuugaaaaaacaaagaagcaacugagggaaaaugcugaggauaugggcaaugguuguuucaaaauauaccacaaaugugacaaugccugcauaggaucaaucagaaauggaacuuaugaccacgauguauacagagaugaagcauuaaacaaccgguuccagaucaagggaguugagcugaagucaggguacaaagauuggauccuauggauuuccuuugccauaucauguuuuuugcuuuguguugcuuuguugggguucaucaugugggccugccaaaaaggcaacauuaggugcaacauuugcauuuga

SEQ ID NO: 40397 - RNA, 1701 nt, Artificial Sequence
  derived and/or modified CDS sequence (wt) from hemagglutinin__InfluenzaA__AFD98514
augaagacuaucauugcuuugagcuacauucuaugucugguuuucgcucaaaaacuuccuggaaaugacaacagcacggcaacgcugugccuugggcaccaugcagugccaaacggaacgauagugaaaacaaucacgaaugaccaaauugaaguuacuaaugcuacugagcugguucagaguuccucaacaggugaaauaugcaacaguccucaucagauccuugauggagaaaacugcacacuaauagaugcucuauugggagacccucagugugauggcuuccaaaacaagaaaugggaccuuuuuguugaacgaagcaaagcccacagcaacuguuacccuuaugaugugccggauuaugccucccuuaggucacuaguugccucauccggcacacuggaguuuaacaaugaaagcuucaauuggacuggagucacucaaaacggaacaagcucugcuugcauaaggagaucuaauaauaguuucuuuaguagauugaauugguugacccacuuaaacuucaaauacccagcauugaacgugacuaugccaaacaaugaacaauuugacaaauuguacauuugggggguucaccacccgggaacagacaaggaccaaaucuuccuguaugcucaagcaucaggaagaaucacaguaucuaccaaaagaagccaacaagcuguaauuccgaauaucggaucuagacccagaguaaggaauaucccuagcagaguaagcaucuauuggacaauaguaaaaccgggagacauacuuuugauuaacagcacagggaaucuaauugcuccuagggguuacuucaaaauacgaagugggaaaagcucaauaaugagaucagaugcacccauuggcaaaugcaauucugcaugcaucacuccaaauggaagcauucccaaugacaaaccauuccaaaauguaaacaggaucacauacggggccugucccagauauguuaagcaaaacacucugaaauuggcaacaggaaugagaaauguaccagagaaacaaacuagaggcauauuuggcgcaauagcggguuucauagaaaaugguugggagggaaugguggaugguugguacgguuucaggcaucaaaauucugagggaaggggacaagcagcagaucucaaaagcacucaagcagcaaucgaucaaaucaaugggaagcugaauagauugaucgggaaaaccaacgagaaauuccaucagauugaaaaagaauucucagaaguugaagggagaauucaggaccuugagaaauauguugaggacacuaaaauagaucucuggucauacaacgcggagcuucuuguugcccuggagaaccaacacacaauugaucuaacugacucagaaaugaacaaacuguuugaaaaaacaaagaaacaacugagggaaaaugcugaggauaugggcaaugguuguuucaaaauauaccacaaaugugacaaugccugcauaggaucaaucagaaauggaacuuaugaccacgauguguacagagaugaagcauuaaacaaccgauuccagaucaagggaguugagcugaagucaggguacaaagauuggauccuauggauuuccuuugccauaucauguuuuuugcuuuguguugcuuuguugggguucaucaugugggccugccaaaaaggcaacauuaggugcaacauuugcauuuga

SEQ ID NO: 40398 - RNA, 1701 nt, Artificial Sequence
  derived and/or modified CDS sequence (wt) from hemagglutinin__InfluenzaA__AFD98525
augaagaccaucauugcuuugagcuacauucuaugucugguuuucgcucaaaaacuuccuggaaaugacaacagcacggcaacgcugugccuugggcaccaugcagugccaaacggaacgauagugaaaacaaucacgaaugaccaaauugaaguuacuaaugcuacugagcugguucagaguuccucaacaggugaaauaugcaacaguccucaucagauccuugauggagaaaacugcacacuaauagaugcucuauugggagacccucagugugauggcuuccaaaacaagaaaugggaccuuuuuguugaacgaagcaaagcccacagcaacuguuacccuuaugaugugccggauuaugccucccuuaggucacuaguugccucauccggcacacuggaguuuaacaaugaaagcuucaauuggacuggagucacucaaaacggaacaagcucugcuugcauaaggagaucuaauaauaguuucuuuaguagauugaauugguugacccacuuaaacuucaaauacccagcauugaacgugacuaugccaaacaaugaacaauuugacaaauuguacauuugggggguucaccauccggguacggacaaggaccaaaccuuccuguaugcucaagcaucaggaagaaucacaguaucuaccaaaagaagccaacaagcuguaauuccgaauaucggaucuagacccagaguaaggaauaucccuagcagaguaagcaucuauuggacaauaguaaaaccgggagacauacuuuugauuaacagcacagggaaucuaauugcuccuagggguuacuucaaaauacgaagugggaaaagcucaauaaugagaucagaugcacccauuggcaaaugcaauucugcaugcaucacuccaaauggaagcauucccaaugacaaaccauuccaaaauguaaacaggaucacauacggggccugucccagauauguuaagcaaaacacucugaaauuggcaacaggaaugagaaauguaccagagaaacaaacuagaggcauauuuggcgcaauagcggguuucauagaaaaugguugggagggaaugguggaugguugguacgguuucaggcaucaaaauucugagggaaggggacaagcagcagaucucaaaagcacucaagcagcaaucgaucaaaucaaugggaagcugaauagauugaucgggaaaaccaacgagaaauuccaucagauugaaaaagaauucucagaagucgaagggagaauucaggaccuugagaaauauguugaggacacuaaaauagaucucuggucauacaacgcggagcuucuuguugcccuggagaaccaacacacaauugaucuaacugacucagaaaugaacaaacuguuugaaaaaacaaagaagcaacugagggaaaaugcugaggauaugggcaaugguuguuucaaaauauaccacaaaugugacaaugccugcauaggaucaaucagaaauggaacuuaugaccacgauguguacagagaugaagcauuaaacaaccgauuccagaucaagggaguugagcugaagucaggguacaaagauuggauccuauggauuuccuuugccauaucauguuuuuugcuuuguguugcuuuguugggguucaucaugugggccugccaaaaaggcaacauuaggugcaacauuugcauuuga

SEQ ID NO: 40399 - RNA, 1701 nt, Artificial Sequence
  derived and/or modified CDS sequence (wt) from hemagglutinin__InfluenzaA__AFD98558
augaagacuaucauugcuuugagcuacauucuaugucugguuuucgcucaaaaacuuccuggaaaugacaacagcacggcaacgcugugccuugggcaccaugcagugccaaacggaacgauagugaaaacaaucacgaaugaccaaauugaaguuacuaaugcuacugagcugguucagaguuccucaacaggugaaauaugcaacaguccucaucagauccuugauggagaaaacugcacacuaauagaugcucuauugggagacccucagugugauggcuuccaaaacaagaaaugggaccuuuuuguugaacgaagcaaagcccacagcaacuguuacccuuaugaugugccggauuaugccucccuuaggucacuaguugccucauccggcacacuggaguuuaacaaugaaagcuucaauuggacuggagucacucaaaacggaacaagcucugcuugcauaaggagaucuaauaauaguuucuuuaguagauugaauugguugacccacuuaaacuucaaauacccagcauugaacgugacuaugccaaacaaugaacaauuugacaaauuguacauuugggggguucaccacccggguacggacaaggaccaaaucuuccuguaugcucaagcagcaggaagaaucacaguaucuaccaaaagaagccaacaagcuguaauuccgaauaucggaucuagacccagaguaaggaauaucccuagcagaguaagcaucuauuggacaauaguaaaaccgggagacauacuuuugauuaacagcacagggaaucuaauugcuccuagggguuacuucaaaauacgaagugggaaaagcucaauaaugagaucagaugcacccauuggcaaaugcaauucugcaugcaucacuccaaauggaagcauucccaaugacaaaccauuccaaaauguaaacaggaucacauacggggccugucccagauauguuaagcaaaacacucugaaauuggcaacaggaaugagaaauguaccagagaaacaaacuagaggcauauuuggagcaauagcugguuucauagaaaaugguugggagggaaugguggaugguugguacgguuucaggcaucaaaauucugagggaaggggacaagcagcagaucucaaaagcacucaagcagcaaucgaucaaaucaaugggaagcugaauagauugaucgggaaaaccaacgagaaauuccaucagauugaaaaagaauucucagaagucgaagggagaauucaggaccuugagaaauauguugaggacacuaaaauagaucucuggucauacaacgcggagcuucuuguugcccuggagaaccaacacacaauugaucuaacugacucagaaaugaacaaauuguuugaaaaaacaaagaagcaacugagggaaaaugcugaggauaugggcaaugguuguuucaaaauauaccacaaaugugacaaugccugcauaggaucaaucagaaauggaacuuaugaccacgauguguacagagaugaagcauuaaacaaccgauuccagaucaagggaguugagcugaagucaggguacaaagauuggauccuauggauuuccuuugccauaucauguuuuuugcuuuguguugcuuuguugggguucaucaugugggccugccaaaaaggcaacauuaggugcaacauuugcauuuga

SEQ ID NO: 40400 - RNA, 1701 nt, Artificial Sequence
  derived and/or modified CDS sequence (wt) from hemagglutinin__InfluenzaA__AFD98569
augaagaccaucauugcuuugagcuacauucuaugucugguuuucgcucaaaaacuuccuggaaaugacaacagcacggcaacgcugugccuugggcaccaugcagugccaaacggaacgauagugaaaacaaucacgaaugaccaaauugaaguuacuaaugcuacugagcugguucagaguuccucaacaggugaaauaugcaacaguccucaucagauccuugauggagaaaacugcacacuaauagaugcucuauugggagacccucagugugauggcuuccaaaacaagaaaugggaccuuuuuguugaacggagcaaagcccacagcaacuguuacccuuaugaugugccggauuaugccucccuuaggucacuaguugccucauccggcacacuggaguuuaacaaugaaagcuucaauuggacuggagucacucaaaacggaacaagcucugcuugcauaaggagaucuaauaauaguuucuuuaguagauugaauugguugacccacuuaaacuucaaauacccagcauugaacgugacuaugccaaacaaugaacaauuugacaaauuguacauuugggggguucaccacccggguacggacaaggaccaaaccuuccuguaugcucaagcaucaggaagaaucacaguaucuaccaaaagaagccaacaagcuguaauuccgaauaucggaucuagacccagaguaaggaauaucccuagcagaguaagcaucuauuggacaauaguaaaaccgggagacauacuuuugauuaacagcacagggaaucuaauugcuccuagggguuacuucaaaauacgaagugggaaaagcucaauaaugagaucagaugcacccauuggcaaaugcaauucugcaugcaucacuccaaauggaagcauucccaaugacaaaccauuccaaaauguaaacaggaucacauacggggccugucccagauauguuaagcaaaacacucugaaauuggcaacaggaaugagaaauguaccagagaaacaaacuagaggcauauuuggcgcaauagcggguuucauagaaaaugguugggagggaaugguggaugguugguacgguuucaggcaucaaaauucugagggaaggggacaagcagcagaucucaaaagcacucaagcagcaaucgaucaaaucaaugggaagcugaauagauugaucgggaaaaccaacgagaaauuccaucagauugaaaaagaauucucagaagucgaagggagaauucaggaccuugagaaauauguugaggacacuaaaauagaucucuggucauacaacgcggagcuucuuguugcccuggagaaccaacacacaauugaucuaacugacucagaaaugaacaaacuguuugaaaaaacaaagaagcaacugagggaaaaugcugaggauaugggcaaugguuguuucaaaauauaccacgaaugugacaaugccugcauaggaucaaucagaaauggaacuuaugaccacgauguguacagagaugaagcauuaaacaaccgauuccagaucaagggaguugagcugaagucaggguacaaagauuggauccuauggauuuccuuugccauaucauguuuuuugcuuuguguugcuuuguugggguucaucaugugggccugccaaaaaggcaacauuaggugcaacauuugcauuuga

SEQ ID NO: 40401 - RNA, 1701 nt, Artificial Sequence; identical to SEQ ID NO: 38992
  derived and/or modified CDS sequence (wt) from hemagglutinin__InfluenzaA__AFD98580

SEQ ID NO: 40402 - RNA, 1701 nt, Artificial Sequence
  derived and/or modified CDS sequence (wt) from hemagglutinin__InfluenzaA__AFE02942
augaaggcaauacuaguaguucugcuauauacauuugcaaccgcaaaugcagacacauuauguauagguuaucaugcgaacaauucaacagacacuguagacacauuacuagaaaagaauguaacaguaacacacucuguuaaccuucuagaagacaagcauaacgggaagcuaugcaaacuaagagggguagccccauugcauuuggguaaauguaacauugcuggcuggauccugggaaauccagagugugaaucacucuccacagcaagcucaugguccuacauuguggaaacaucuaauucagacaauggaacguguuacccaggagauuucaucgauuaugaggagcuaagagagcaauugagcucagugucaucauuugaaagguuugagauauuccccaagacaaguucauggcccaaucaugacucgaacaaagguguaacggcagcauguccucaugcuggagcaaaaagcuucuacaaaaauuuaauauggcuaguuaaaaaaggaaauucauacccaaagcucagcaaauccuacauuaaugauaaagggaaagaaguccucgugcuauggggcauucaccauccaucuacuagugcugaccaacaaagucucuaucagaaugcagaugcauauguuuuuguguggacaucaagauacagcaagaaguucaagccggaaauagcaauaagacccaaagugagggaucaagaagggagaaugaacuauuacuggacacuaguagagccgggagacaaaauaacauucgaagcaacuggaaaucuagugguaccgagauaugcauucgcaauggacagaaaugcuggaucugguauuaucauuucagauacaccaguccacgauugcaauacaacuugucagacacccaagggugcuauaaacaccagccucccauuucagaauauacauccgaucacaauuggaaaauguccaaaauauguaaaaagcacaaaauugagacuggccacaggauugaggaaugucccgucuauucaaucuagaggccuauuuggggccauugccgguuucauugaagggggguggacagggaugguagauggaugguacgguuaucaccaucaaaaugagcaggggucaggauaugcagccgaccugaagagcacacagaaugccauugacgagauuacuaacaaaguaaauucuguuauugaaaagaugaauacacaauucacagcaguagguaaagaguucaaccaccuggaaaaaagaauagagaauuuaaauaaaaaaguugaugaugguuuccuggacauuuggacuuacaaugccgaacuguugguucuauuggaaaaugaaagaacuuuggacuaccacgauucaaaugugaagaacuuauaugaaaagguaagaagccaguuaaaaaacaaugccaaggaaauuggaaacggcugcuuugaauuuuaccacaaaugcgauaacacgugcauggaaagugucaaaaaugggacuuaugauuacccaaaauacucagaggaagcaaaauuaaacagagaagaaauagaugggguaaagcuggaaucaacaaggauuuaccagauuuuggcgaucuauucaacugucgccaguucauugguacugguagucucccugggggcaaucaguuucuggaugugcucuaaugggucucuacaguguagaauauguauuuaa

SEQ ID NO: 40403 - RNA, 1701 nt, Artificial Sequence
  derived and/or modified CDS sequence (wt) from hemagglutinin__InfluenzaA__AFE18688
augaaggcaauacuaguaguucugcuauauacauuugcaaccgcaaaugcagacacauuauguauagguuaucaugcgaacaauucaacagacacuguagacacaguacuagaaaagaauguaacaguaacacacucuguuaaccuucuagaagacaagcauaacgggaaacuaugcaaacuaagagggguagccccauugcauuuggguaaauguaacauugcuggcuggauccugggaaauccagagugugaaucacucuccacagcaagcucaugguccuacauuguggaaacaucuaguucagacaauggaacguguuacccaggagauuucaucgauuaugaggagcuaagagagcaauugagcucagugucaucauuugaaagguuugagauauuccccaagacaaguucauggcccaaucaugacucgaacaaagguguaacagcagcauguccucaugcuggagcaaaaagcuucuacaaaaauuuaauauggcuaguuaaaaaaggaaauucauacccaaagcucagcaaauccuacauuaaugauaaagggaaagaaguccucgugcuauggggcauucaccauccaucuacuagugcugaccaacaaagucucuaucagaaugcagaugcauauguuuuuguggggacaucaagauacagcaagaaguucaagccggaaauagcaauaagacccaaagugagggaucaagaagggagaaugaacuauuacuggacacuaguagagccgggagacaaaauaacauucgaagcaacuggaaaucuagugguaccgagauaugcauucgcaauggaaagaaaugcuggaucugguauuaucauuucagauacaccaguccacgauugcaauacaacuugucagacacccaagggugcuauaaacaccagccucccauuucagaauauacauccgaucacaauuggaaaauguccaaaauauguaaaaagcacaaaauugagacuggccacaggauugaggaaugucccgucuauucaaucuagaggccuauuuggggccauugccgguuucauugaagggggguggacagggaugguagauggaugguacgguuaucaccaucaaaaugagcaggggucaggauaugcagccgaccugaagagcacacagaaugccauugacaagauuacuaacaaaguaaauucuguuauugaaaagaugaauacacaguucacagcaguagguaaagaguucaaccaccuggaaaaaagaauagagaauuuaaauaaaaaaguugaugaugguuuccuggacauuuggacuuacaaugccgagcuguugguucuauuggaaaaugaaagaacuuuggacuaccacgauucaaaugugaagaacuuauaugaaaagguaagaagccaguuaaaaaacaaugccaaggaaauuggaaacggcugcuuugaauuuuaccacaaaugcgauaacacgugcauggaaagugucaaaaaugggacuuaugacuacccaaaauacucagaggaagcaaaauuaaacagagaagaaauagaugggguaaagcuggaaucaacaaggauuuaccagauuuuggcgaucuauucaacugucgccaguucauugguacugguagucucccugggggcaaucaguuucuggaugugcucuaaugggucucuacaguguagaauauguauuuaa

SEQ ID NO: 40404 - RNA, 1701 nt, Artificial Sequence; identical to SEQ ID NO: 32662
  derived and/or modified CDS sequence (wt) from hemagglutinin__InfluenzaA__AFE47624

SEQ ID NO: 40405 - RNA, 1701 nt, Artificial Sequence; identical to SEQ ID NO: 33412
  derived and/or modified CDS sequence (wt) from hemagglutinin__InfluenzaA__AFE47635

SEQ ID NO: 40406 - RNA, 1701 nt, Artificial Sequence; identical to SEQ ID NO: 40362
  derived and/or modified CDS sequence (wt) from hemagglutinin__InfluenzaA__AFF18506

SEQ ID NO: 40407 - RNA, 1701 nt, Artificial Sequence
  derived and/or modified CDS sequence (wt) from hemagglutinin__InfluenzaA__AFF57124
augaaggcaauacuaguaguucugcuauauacauuugcaaccgccaaugcagacacauuauguauagguuaucaugcgaacaauucaacagacacuguagacacaguacuagaaaagaauguaacaguaacacacucuguuaaccuucuagaagacaagcauaacgggaaacuaugcaaacuaagagggguagccccauugcauuuggguaaauguaacauugcuggcuggauccugggaaauccagagugugaaucacucuccacagcaagcucaugguccuacauuguggaaacaucuaguucagacaauggaacguguuacccaggagauuucaucaauuaugaggagcuaagagagcaauuaagcucagugucaucauuugaaagguuugagauauuccccaagacaaguucauggcccaaucaugacucgaacaaagguguaacggcagcauguccucaugcuggagcaaaaagcuucuacaaaaauuuaauauggcuaguuaaaaaagaaaauucauacccaaagcucagcaaauccuacauuaaugauaaagggaaagagguccucgugcuauggggcauucaccauccaucuacuaccgcugaccaacaacgucucuaucagaaugcagaugcauauguuuuuguggggacaucaagauacagcaagaaguucaagccggaaauagcaauaagacccaaagugagggaucaagaagggagaaugaacuauuacuggacacuaguagagccaggagacaaaauaacauucgaagcaacuggaaaucuagugguaccgagauaugcauuugcaauggaaagaaaugcuggaucugguauuaucauuucggauacaccaguccacgauugcaauacaacuugucagacacccaagggugcuauaaacaccagccucccauuucagaauauacauccgaucacaauuggaaaauguccaaaauauguaaaaagcacaaaauugagacuggccacaggauugaggaaugucccgucuauucaaucuagaggccuauuuggggccauugcaggcuucauugaagggggguggacagggaugguagauggaugguacgguuaucaccaucaaaaugagcaggggucaggauaugcagccgaccugaagagcacacagaaugccauugacaagauuacuaacaaaguaaauucuguuauugaaaagaugaauacacaguucacagcaguagguaaagaguucaaccaccuggaaaaaagaauagagaauuuaaauaaaaaaguugaugaugguuuccuggacauuuggacuuacaaugccgaacuguugguucuauuggaaaaugaaagaacuuuggacuaccacgauucaaaugugaagaacuuauaugaaaagguaagaaaccaguuaaaaaacaaugccaaggaaauuggaaacggcugcuuugaauuuuaccacaaaugcgauaacacgugcauggaaagugucaaaaaugggacuuaugacuacccaaaauacucagaggaagcaaaauuaaacagagaagaaauagauggaguaaagcuggaaucaacaaggauuuaccagauuuuggcgaucuauucaacugucgccaguucauugguacugguagucucccugggggcaaucaguuucuggaugugcucuaaugggucucuacaguguagaauauguauuuaa

SEQ ID NO: 40408 - RNA, 1701 nt, Artificial Sequence
  derived and/or modified CDS sequence (wt) from hemagglutinin__InfluenzaA__AFF57128
augaaggcaauacuaguaguucugcuauauacauuugcaaccgccaaugcagacacauuauguauagguuaucaugcgaacaauucaacagacacuguagacacaguacuagaaaagaauguaacaguaacacauucuguuaaccuucuagaagacaagcauaacgggaaacuaugcaaacuaagagggguagccccauugcauuuggguaaauguaacauugcuggcuggauccugggaaauccagagugugaaucacucuccacagcaagcucaugguccuacauuguggaaacaucuaguucagacaauggaacguguuacccaggagauuucaucaauuaugaggagcuaagagagcaauugagcucagugucaucauuugaaagguuugagauauuccccaagacaaguucauggcccaaucaugacucgaacaaagguguaacggcagcauguccucaugcuggagcaaaaagcuucuacaaaaauuuaauauggcuaguuaaaaaaggaaauucauacccaaagcucagcaaauccuacauuaaugauaaagggaaagaaguccucgugcuauggggcauucaccauccaucuacuaccgcugaccaacaaaguaucuaucagaaugcagaugcauauguuuuuguggggacaucaagauacagcaagaaguucaagccggaaauagcaauaagacccaaagugagggaucaagaagggagaaugaacuauuacuggacacuaguagagccgggagacaaaauaacauucgaagcaacuggaaaucuagugguaccgagauaugcauucgcaauggaaagaaaugcuggaucugguauuaucauuucggauacaccaguccacgauugcaauacaacuugucagacacccaagggugcuauaaacaccagccucccauuucagaauauacauccgaucacaauuggaaaauguccaaaauauguaaaaagcacaaaauugagacuggccacaggauugaggaaugucccgucuauucaaucuagaggccuauuuggggccauugccggcuucauugaagggggauggacagggaugguagauggaugguacgguuaucaccaucaaaaugagcaggggucaggauaugcagccgaccugaagagcacacagaaugccauugacaagauuacuaacaaaguaaauucuguuauugaaaagaugaauacacaguucacagcaguagguaaagaguucaaccaccuggaaaaaagaauagagaauuuaaauaaaaaaguugaugaugguuuccuggacauuuggacuuacaaugccgaacuguugguucuguuggaaaaugaaagaacuuuggacuaccacgauucaaaugugaagaacuuauaugaaaagguaagaaaccaguuaaaaaacaaugccaaggaaauugggaacggcugcuuugaauuuuaccacaaaugcgauaacacgugcauggaaagugucaaaaaugggacuuaugacuacccaaaauacucagaggaagcaaaauuaaacagagaagaaauagauggaguaaagcuggaaucaacaaggauuuaccagauuuuggcgaucuauucaacugucgccaguucauugguacugguagucucccugggggcaaucaguuucuggaugugcucuaaugggucucuacaguguagaauauguauuuaa

SEQ ID NO: 40409 - RNA, 1701 nt, Artificial Sequence
  derived and/or modified CDS sequence (wt) from hemagglutinin__InfluenzaA__AFF57132
augaaggcaauacuaguaguucugcuauauacauuugcaaccgcaaaugcagacacauuauguauagguuaccaugcgaacaauucaacagacacuguagacacaguacuagaaaagaauguaacaguaacacacucuguuaaucuucuagaagacaagcauaacgggaaacuaugcaaacuaagagggguagccccauugcauuuggguaaauguaacauugcuggcuggauccugggaaauccagagugugaaucacucuccacagcaagcucaugguccuacauuguggaaacaucuaguucagacaauggaacguguuacccaggagauuucaucgauuaugaggagcuaagagagcaauugagcucagugucaucauuugaaagguuugagauauuccccaagacaaguucauggcccaaucaugauucgaacaaagguguaacggcagcauguccucaugcuggagcaaaaggcuucuacaaaaauuuaauauggcuaguuaaaaaaggaaauucauacccaaagcucagcaaauccuacauuaaugauaaagggaaagaaguucucgugcuauggggcauucaccauccaucuacuacugcugaccaacaaaguaucuaucagaaugcagauacauauguuuuuguggggacaucaagauacagcaagaaguucaagccggaaauagcaauaagacccaaagugagggaucaagaagggagaaugaacuauuacuggacacuaguagagccgggagacaaaauaacauucgaagcaacuggaaaucuagugguaccgagauaugcauucgcaauggaaagaaaugcuggaucugguauuaucauuucagauacaccaguccacgauugcaauacaacuugucagacacccaagggugcuauaaacaccagccucccauuucagaauauacauccgaucacaauuggaaaauguccaaaauauguaaaaagcacaaaauugagacuggccacaggauugaggaaugucccgucuauucaaucuagaggccuauuuggggccauugccggcuucauugaagggggguggacagggaugguagauggaugguacgguuaucaccaucaaaaugagcaggggucaggauaugcagccgaccugaagagcacacagaaugccauugacaagauuacuaacaaaguaaauucuguuauugaaaagaugaauacacaguucacagcaguagguaaagaguucaaccaccuggaaaaaagaauagagaauuuaaauaaaaaaguugaugaugguuuccuggacauuuggacuuacaaugccgaacuguugguucuauuggaaaaugaaagaacuuuggacuaccacgauucaaaugugaagaacuuauaugaaaagguaagaaaccaguuaaaaaacaaugccaaggaaauuggaaauggcugcuuugaauuuuaccacaaaugcgauaacacgugcauggaaagugucaaaaaugagacuuaugacuacccaaaauacucagaggaagcaaaauuaaacagagaagaaauagaugggguaaagcuggaaucaacaaggauuuaccagauuuuggcgaucuauucaacugucgccaguucauugguacugguagucucccugggggcaaucaguuuuuggaugugcucuaaugggucucuacaguguagaauauguauuuaa

SEQ ID NO: 40410 - RNA, 1701 nt, Artificial Sequence
  derived and/or modified CDS sequence (wt) from hemagglutinin__InfluenzaA__AFF57136
augaaggcaauacuaguaguucugcuauauacauuugcaaccgcaaaugcagacacauuauguauagguuaucaugcgaacaauucaacagacacuguagacacaguacuagaaaagaauguaacaguaacacacucuguuaaccuucuagaagacaagcauaacgggaaacuaugcaaacuaagagggguagccccauugcauuuggguaaauguaacauugcuggcuggauccugggaaauccagagugugaaucacucuccacagcaagcucaugguccuacauuguggaaacaucuaguucagacaauggaacguguuacccaggagauuucaucgauuaugaggagcuaagagagcaauugagcucagugucaucauuugaaagguuugagauauuccccaagacaaguucauggcccaaucaugacucgaacaaagguguaacggcagcauguccucaugcuggagcaaaaagcuucuacaaaaauuuaauauggcuaguuaaaaaaggaaauucauacccaaagcucagcaaauccuacauuaaugauaaagggaaagaaguccucgugcuauggggcauucaccauccaucuacuagugcugaccaacaaagucucuaucagaaugcagaugcauauguuuuuguggggucaucaagauacagcaagaaguucaagccggaaauagcaauaagacccaaagugagggaucgagaagggagaaugaacuauuacuggacacuaguagagccgggagacaaaauaacauucgaagcaacuggaaaucuagugguaccgagauaugcauucgcaauggaaagaaaugcuggaucugguauuaucauuucagauacaccagucuacgauugcaauacaacuugucagacacccaagggugcuauaaacaccagccucccauuucagaauauacauccgaucacaauuggaaaauguccaaaauauguaaaaagcacaaaauugagacuggccacaggauugaggaaugucccgucuauucaaucuagaggccuauuuggggccauugccgguuucauugaagggggguggacagggaugguagauggaugguacgguuaucaccaucaaaaugagcaggggucaggauaugcagccgaccugaagagcacacagaaugccauugacgagauuacuaacaaaguaaauucuguuauugaaaagaugaauacacaguucacagcaguagguaaagaguucaaccaccuggaaaaaagaauagagaauuuaaauaaaaaaguugaugaugguuuccuggacauuuggacuuacaaugccgaacuguugguucuauuggaaaaugaaagaacuuuggacuaccacgauucaaaugugaagaacuuauaugaaaagguaagaagccagcuaaaaaacaaugccaaggaaauuggaaacggcugcuuugaauuuuaccacaaaugcgauaacacgugcauggaaagugucaaaaaugggacuuaugacuacccaaaauacucagaggaagcaaaauuaaacagagaagaaauagaugggguaaagcuggaaucaacaaggauuuaccagauuuuggcgaucuauucaacugucgccaguucauugguacugguagucucccugggggcaaucaguuucuggaugugcucuaaugggucucuacaguguagaauauguauuuaa

SEQ ID NO: 40411 - RNA, 1701 nt, Artificial Sequence
  derived and/or modified CDS sequence (wt) from hemagglutinin__InfluenzaA__AFF57144
augaaggcaauacuaguaguucugcuauauacauuugcaaccgcaaaugcagacacauuauguauagguuaucaugcgaacaauucaacagacacuguagacacaguacuagaaaagaauguaacaguaacacacucuguuaaccuucuagaagacaagcauaacgggaaacuaugcaaacuaagagggguagccccauugcauuuggguaaauguaacauugcuggcuggauccugggaaauccagagugugaaucacucuccacagcaagcucaugguccuacauuguggaaacaucuaguucagacaauggaacguguuacccaggagauuucaucgauuaugaggagcuaagagagcaauugagcucagugucaucauuugaaagguuugagauauuccccaagacaaguucauggcccaaucaugacucgaacaaagguguaacggcagcauguccucaugcuggagcaaaaagcuucuacaaaaauuuaauauggcuaguuaaaaaaggaaauucauacccaaagcucagcaaauccuacauuaaugauaaagggaaagaaguccucgugcuauggggcauucaccauccaucuacuagugaugaccaacaaagucucuaucagaaugaagaugcauauguuuuuguggggucaucaagauacagcaagaaguucaagccggaaauagcaauaagacccaaagugagggaucgagaagggagaaugaacuauuacuggacacuaguagagccgggagacaaaauaacauucgaagcaacuggaaaucuagugguaccgagauaugcauucgcaauggaaagaaaugcuggaucugguauuaucauuucagauacaccaguccacgauugcaauacaacuugucagacacccaagggugcuauaaacaccagccucccauuucagaauauacauccgaucacaauuggaaaauguccaaaauauguaaaaagcacaaaauugagacuggccacaggauugaggaaugucccgucuauucaaucuagaggccuauuuggggccauugccgguuucauugaagggggguggacagggaugguagauggaugguacgguuaucaccaucaaaaugagcaggggucaggauaugcagccgaccugaagagcacacagaaugccauugacgagauuacuaacaaaguaaauucuguuauugaaaagaugaauacacaguucacagcaguagguaaagaguucaaccaccuggaaaaaagaauagagaauuuaaauaaaaaaguugaugaugguuuccuggacauuuggacuuacaaugccgaacuguugguucuauuggaaaaugaaagaacuuuggacuaccacgauucaaaugugaagaacuuauaugaaaagguaagaagccagcuaaaaaacaaugccaaggaaauuggaaacggcugcuuugaauuuuaccacaaaugcgauaacacgugcauggaaagugucaaaaaugggacuuaugacuacccaaaauacucagaggaagcaaaauuaaacagagaagaaauagaugggguaaagcuggaaucaacaaggauuuaccagauuuuggcgaucuauucaacugucgccaguucauugguacugguagucucccugggggcaaucaguuucuggaugugcucuaaugggucucuacaguguagaauauguauuuaa

SEQ ID NO: 40412 - RNA, 1701 nt, Artificial Sequence
  derived and/or modified CDS sequence (wt) from hemagglutinin__InfluenzaA__AFF57148
augaaggcaauacuaguaguucugcuauauacauuugcaaccgcaaaugcagacacauuauguauagguuaucaugcgaacaauucaacagacacuguagacacauuacuagaaaagaauguaacaguaacacacucuguuaaccuucuagaagacaagcauaacgggaaacuaugcaaacuaagagggguagccccauugcauuuggguaaauguaacauugcuggcuggauccugggaaauccagagugugaaucacucuccacagcaagcucaugguccuacauuguggaaacaucuaguucagacaauggaacguguuacccaggagauuucaucgauuaugaggagcuaagagagcaauugagcucagugucaucauuugaaagguuugagauauuccccaagacaaguucauggcccaaucaugacucgaacaaagguguaacggcagcauguccucaugcuggagcaaaaagcuucuacaaaaauuuaauauggcuaguuaaaaaaggaaauucauacccaaagcucagcaaauccuacauuaaugauaaagggaaagaaguccucgugcuauggggcauucaccauccaucuacuagugaugaccaacaaagucucuaucagaaugaagaugcauauguuuuuguggggucaucaagauacagcaagaaguucaagccggaaauagcaauaagacccaaagugagggaucgagaagggagaaugaacuauuacuggacacuaguagagccgggagacaaaauaacauucgaagcaacuggaaaucuagugguaccgagauaugcauucgcaauggaaagaaaugcuggaucugguauuaucauuucagauacaccaguccacgauugcaauacaacuugucagacacccaagggugcuauaaacaccagccucccauuucagaauauacauccgaucacaauuggaaaauguccaaaauauguaaaaagcacaaaauugagacuggccacaggauugaggaaugucccgucuauucaaucuagaggccuauuuggggccauugccgguuucauugaagggggguggacagggaugguagauggaugguacgguuaucaccaucaaaaugagcaggggucaggauaugcagccgaccugaagagcacacagaaugccauugacgagauuacuaacaaaguaaauucuguuauugaaaagaugaauacacaguucacagcaguagguaaagaguucaaccaccuggaaaaaagaauagagaauuuaaauaaaaaaguugaugaugguuuccuggacauuuggacuuacaaugccgaacuguugguucuauuggaaaaugaaagaacuuuggacuaccacgauucaaaugugaagaacuuauaugaaaagguaagaagccagcuaaaaaacaaugccaaggaaauuggaaacggcugcuuugaauuuuaccacaaaugcgauaacacgugcauggaaagugucaaaaaugggacuuaugacuacccaaaauacucagaggaagcaaaauuaaacagagaagaaauagaugggguaaagcuggaaucaacaaggauuuaccagauuuuggcgaucuauucaacugucgccaguucauugguacugguagucucccugggggcaaucaguuucuggaugugcucuaaugggucucuacaguguagaauauguauuuaa

SEQ ID NO: 40413 - RNA, 1701 nt, Artificial Sequence
  derived and/or modified CDS sequence (wt) from hemagglutinin__InfluenzaA__AFF57160
augaaggcaauacuaguaguucugcuauauacauuugcaaccgcaaaugcagacacauuauguauagguuaucaugcgaacaauucaacagacacuguagacacaguacuagaaaagaauguaacaguaacacacucuguuaaccuucuagaagacaagcauaacgggaaacuaugcaaacuaagagggguagccccauugcauuuggguaaauguaacauugcuggcuggauccugggaaauccagagugugaaucacucuccacagcaagcucaugguccuacauuguggaaacaucuaguucagacaauggaacguguuacccaggagauuucaucgauuaugaggagcuaagagagcaauugagcucagugucaucauuugaaagguuugagauauuccccaagacaaguucauggcccaaucaugacucgaacaaagguguaacggcagcauguccucaugcuggagcaaaaagcuucuacaaaaauuuaauauggcuaguuaaaaaaggaaauucauacccaaagcucagcgaauccuacauuaaugauaaagggaaagaaguccucgugcuauggggcauucaccauccaucuacuagugcugaccaacaaagucucuaucagaaugaagaugcauauguuuuuguggggucaucaagauacagcaagaaguucaagccggaaauagcaauaagacccaaagugagggaucgagaagggagaaugaacuauuacuggacacuaguagagccgggagacaaaauaacauucgaagcaacuggaaaucuagugguaccgagauaugcauucgcaauggaaagaaaugcuggaucugguauuaucauuucagauacaccaguccacgauugcaauacaacuugucagacacccaagggugcuauaaacaccagccucccauuucagaauauacauccgaucacaauuggaaaauguccaaaauauguaaaaagcacaaaauugagacuggccacaggauugaggaaugucccgucuauucaaucuagaggccuauuuggggccauugccgguuucauugaagggggguggacagggaugguagauggaugguacgguuaucaccaucaaaaugagcaggggucaggauaugcagccgaccugaagagcacacagaaugccauugacgagauuacuaacaaaguaaauucuguuauugaaaagaugaauacacaguucacagcaguagguaaagaguucaaccaccuggaaaaaagaauagagaauuuaaauaaaaaaguugaugaugguuuccuggacauuuggacuuacaaugccgaacuguugguucuauuggaaaaugaaagaacuuuggacuaccacgauucaaaugugaagaacuuauaugaaaagguaagaagccagcuaaaaaacaaugccaaggaaauuggaaacggcugcuuugaauuuuaccacaaaugcgauaacacgugcauggaaaguguaaaaaaugggacuuaugacuacccaaaauacucagaggaagcaaaauuaaacagagaagaaauagaugggguaaagcuggaaucaacaaggauuuaccagauuuuggcgaucuauucaacugucgccaguucauugguacugguagucucccugggggcaaucaguuucuggaugugcucuaaugggucucuacaguguagaauauguauuuaa

SEQ ID NO: 40414 - RNA, 1701 nt, Artificial Sequence
  derived and/or modified CDS sequence (wt) from hemagglutinin__InfluenzaA__AFF57164
augaaggcaauacuaguaguucugcuauauacauuugcaaccgcaaaugcagacacauuauguauagguuaucaugcgaacaauucaacagacacuguagacacaguacuagaaaagaauguaacaguaacacacucuguuaaccuucuagaagacaagcauaacgagaaacuaugcaaacuaagagggguagccccauugcauuuggguaaauguaacauugcuggcuggauccugggaaauccagagugugaaucacucuccacagcaagcucaugguccuacauuguggaaacaucuaguucagacaauggaacguguuacccaggagauuucaucgauuaugaggagcuaagagagcaauugagcucagugucaucauuugaaagguuugagauauuccccaagacaaguucauggcccaaucaugacucgaacaaagguguaacggcagcauguccucaugcuggagcaaaaagcuucuacaaaaauuuaauauggcuaguuaaaaaaggaaauucauacccaaagcucagcaaauccuacauuaaugauaaagggaaagaaguccucgugcuauggggcauucaccauccaucuacuagugcugaccaacaaagucucuaucagaaugcagaugcauauguuuuuguggggucaucaagauacagcaagaaguucaagccggaaauagcaauaagacccaaagugagggaucgagaagggagaaugaacuauuacuggacacuaguagagccgggagacaaaauaacauucgaagcaacuggaaaucuagugguaccgagauaugcauucgcaauggaaagaaaugcuggaucugguauuaucauuucagauacaccaguccacgauugcaauacaacuugucagacacccaagggugcuauaaacaccagccucccauuucagaauauacauccgaucacaauuggaaaauguccaaaauauguaaaaagcacaaaauugagacuggccacaggauugaggaaugucccgucuauucaaucuagaggccuauuuggggccauugccgguuucauugaagggggguggacagggaugguagauggaugguacgguuaucaccaucaaaaugagcaggggucaggauaugcagccgaccugaagagcacacagaaugccauugacgagauuacuaacaaaguaaauucuguuauugaaaagaugaauacacaguucacagcaguagguaaagaguucaaccaccuggaaaaaagaauagagaauuuaaauaaaaaaguugaugaugguuuccuggacauuuggacuuacaaugccgaacuguugguucuauuggaaaaugaaagaacuuuggacuaccacgauucaaaugugaagaacuuauaugaaaagguaagaagccagcuaaaaaacaaugccaaggaaauuggaaacggcugcuuugaauuuuaccacaaaugcgauaacacgugcauggaaagugucaaaaaugggacuuaugacuacccaaaauacucagaggaagcaaaauuaaacagagaagaaauagaugggguaaagcuggaaucaacaaggauuuaccagauuuuggcgaucuauucaacugucgccaguucauugguacugguagucucccugggggcaaucaguuucuggaugugcucuaaugggucucuacaguguagaauauguauuuaa

SEQ ID NO: 40415 - RNA, 1701 nt, Artificial Sequence; identical to SEQ ID NO: 40414
  derived and/or modified CDS sequence (wt) from hemagglutinin__InfluenzaA__AFF57168

SEQ ID NO: 40416 - RNA, 1701 nt, Artificial Sequence
  derived and/or modified CDS sequence (wt) from hemagglutinin__InfluenzaA__AFF57172
augaaggcaauacuaguaguucugcuauauacauuugcaaccgcaaaugcagacacauuauguauagguuaucaugcgaacaauucaacagacacuguagacacaguacuagaaaagaauguaacaguaacacacucuguuaaccuucuagaagacaagcauaacgggaaacuaugcaaacuaagagggguagccccauugcauuuggguaaauguaacauugcuggcuggauccugggaaauccagagugugaaucacucuccacagcaagcucaugguccuacauuguggaaacaucuaguucagacaauggaacguguuacccaggagauuucaucgauuaugaggagcuaagagagcaauugagcucagugucaucauuugaaagguuugagauauuccccaagacaaguucauggcccaaucaugacucgaacaaagguguaacggcagcauguccucaugcuggagcaaaaagcuucuacaaaaauuuaauauggcuaguuaaaaaaggaaauucauacccaaagcucagcaaauccuacauuaaugauaaagggaaagaaguccucgugcuauggggcauucaccauccaucuacuagugcugaccaacaaagucucuaucagaaugaagaugcauauguuuuuguggggucaucaagauacagcaagaaguucaagccggaaauagcaauaagacccaaagugagggaucgagaagggagaaugaacuauuacuggacacuaguagagccgggagacaaaauaacauucgaagcaacuggaaaucuagugguaccgagauaugcauucgcaauggaaagaaaugcuggaucugguauuaucauuucagauacaccaguccacgauugcaauacaacuugucagacacccaagggugcuauaaacaccagccucccauuucagaauauacauccgaucacaauuggaaaauguccaaaauauguaaaaagcacaaaauugagacuggccacaggauugaggaaugucccgucuauucaaucuagaggccuauuuggggccauugccgguuucauugaagggggguggacagggaugguagauggaugguacgguuaucaccaucaaaaugagcaggggucaggauaugcagccgaccugaagagcacacagaaugccauugacgagauuacuaacaaaguaaauucuguuauugaaaagaugaauacacaguucacagcaguagguaaagaguucaaccaccuggaaaaaagaauagagaauuuaaauaaaaaaguugaugaugguuuccuggacauuuggacuuacaaugccgaacuguugguucuauuggaaaaugaaagaacuuuggacuaccacgauucaaaugugaagaacuuauaugaaaagguaagaagccagcuaaaaaacaaugccaaggaaauuggaaacggcugcuuugaauuuuaccacaaaugcgauaacacgugcauggaaagugucaaaaaugggacuuaugacuacccaaaauacucagaggaagcaaaauuaaacagagaagaaauagaugggguaaagcuggaaucaacaaggauuuaccagauuuuggcgaucuauucaacugucgccaguucauugguacugguagucucccugggggcaaucaguuucuggaugugcucuaaugggucucuacaguguagaauauguauuuaa

SEQ ID NO: 40417 - RNA, 1701 nt, Artificial Sequence
  derived and/or modified CDS sequence (wt) from hemagglutinin__InfluenzaA__AFF57176
augaaggcaauacuaguaguucugcuauauacauuugcaaccgcaaaugcagacacauuauguauagguuaucaugcgaacaauucaacagacacuguagacacaguacuagaaaagaauguaacaguaacacacucuguuaaccuucuagaagacaagcauaacgggaaacuaugcaaacuaagagggguagccccauugcauuuggguaaauguaacauugcuggcuggauccugggaaauccagagugugaaucacucuccacagcaagcucaugguccuacauuguggaaacaucuaguucagacaauggaacguguuacccaggagauuucaucgauuaugaggagcuaagagagcaauugagcucagugucaucauuugaaagguuugagauauuccccaagacaaguucauggcccaaucaugacucgaacaaagguguaacggcagcauguccucaugcuggagcaaaaagcuucuacaaaaauuuaauauggcuaguuaaaaaagaaaauucauacccaaagcucagcaaauccuacauuaaugauaaagggaaagaaguccucgugcuauggggcauucaccauccaucuacuagugcugaccaacaaagucucuaucagaaugcagaugcauauguuuuuguggggucaucaagauacagcaagaaguucaagccggaaauagcaauaagacccaaagugagggaucgagaagggagaaugaacuauuacuggacacuaguagagccgggagacaaaauaacauucgaagcaacuggaaaucuagugguaccgagauaugcauucgcaauggaaagaaaugcuggaucugguauuaucauuucagauacaccaguccacgauugcaauacaacuugucagacacccaagggugcuauaaacaccagccucccauuucagaauauacauccgaucacaauuggaaaauguccaaaauauguaaaaagcacaaaauugagacuggccacaggauugaggaaugucccgucuauucaaucuagaggccuauuuggggccauugccgguuucauugaagggggguggacagggaugguagauggaugguacgguuaucaccaucaaaaugagcaggggucaggauaugcagccgaccugaagagcacacagaaugccauugacgagauuacuaacaaaguaaauucuguuauugaaaagaugaauacacaguucacagcaguagguaaagaguucaaccaccuggaaaaaagaauagagaauuuaaauaaaaaaguugaugaugguuuccuggacauuuggacuuacaaugccgaacuguugguucuauuggaaaaugaaagaacuuuggacuaccacgauucaaaugugaagaacuuauaugaaaagguaagaagccagcuaaaaaacaaugccaaggaaauuggaaacggcugcuuugaauuuuaccacaaaugcgauaacacgugcauggaaagugucaaaaaugggacuuaugacuacccaaaauacucagaggaagcaaaauuaaacagagaagaaauagaugggguaaagcuggaaucaacaaggauuuaccagauuuuggcgaucuauucaacugucgccaguucauugguacugguagucucccugggggcaaucaguuucuggaugugcucuaaugggucucuacaguguagaauauguauuuaa

SEQ ID NO: 40418 - RNA, 1701 nt, Artificial Sequence
  derived and/or modified CDS sequence (wt) from hemagglutinin__InfluenzaA__AFF57184
augaaggcaauacuaguaguucugcuauauacauuugcaaccgcaaaugcagacacauuauguauagguuaucaugcgaacaauucaacagacacuguagacacaguacuagaaaagaauguaacaguaacacacucuguuaaccuucuagaagacaagcauaacgggaaacuaugcaaacuaagagggguagccccauugcauuuggguaaauguaacauugcuggcuggauccugggaaauccagagugugaaucacucuccacagcaagcucaugguccuacauuguggaaacaucuaguucagacaauggaacguguuacccaggagauuucaucgauuaugaggagcuaagagagcaauugagcucagugucaucauuugaaagguuugagauauuccccaagacaaguucauggcccaaucaugacucgaacaaagguguaacggcagcauguccucaugcuggagcaaaaagcuucuacaaaaauuuaauauggcuaguuaaaaaagaaaauucauaccaaaagcucagcaaauccuacauuaaugauaaagggaaagaaguccucgugcuauggggcauucaccauccaucuacuagugcugaccaacaaagucucuaucagaaugcagaugcauauguuuuuguggggucaucaagauacagcaagaaguucaagccggaaauagcaauaagacccaaagugagggaucgagaagggagaaugaacuauuacuggacacuaguagagccgggagacaaaauaacauucgaagcaacuggaaaucuagugguaccgagauaugcauucgcaauggaaagaaaugcuggaucugguauuaucauuucagauacaccaguccacgauugcaauacaacuugucagacacccaagggugcuauaaacaccagccucccauuucagaauauacauccgaucacaauuggaaaauguccaaaauauguaaaaagcacaaaauugagacuggccacaggauugaggaaugucccgucuauucaaucuagaggccuauuuggggccauugccgguuucauugaagggggguggacagggaugguagauggaugguacgguuaucaccaucaaaaugagcaggggucaggauaugcagccgaccugaagagcacacagaaugccauugacgagauuacuaacaaaguaaauucuguuauugaaaagaugaauacacaguucacagcaguagguaaagaguucaaccaccuggaaaaaagaauagagaauuuaaauaaaaaaguugaugaugguuuccuggacauuuggacuuacaaugccgaacuguugguucuauuggaaaaugaaagaacuuuggacuaccacgauucaaaugugaagaacuuauaugaaaagguaagaagccagcuaaaaaacaaugccaaggaaauuggaaacggcugcuuugaauuuuaccacaaaugcgauaacacgugcauggaaagugucaaaaaugggacuuaugacuacccaaaauacucagaggaagcaaaauuaaacagagaagaaauagaugggguaaagcuggaaucaacaaggauuuaccagauuuuggcgaucuauucaacugucgccaguucauugguacugguagucucccugggggcaaucaguuucuggaugugcucuaaugggucucuacaguguagaauauguauuuaa

SEQ ID NO: 40419 - RNA, 1701 nt, Artificial Sequence; identical to SEQ ID NO: 40411
  derived and/or modified CDS sequence (wt) from hemagglutinin__InfluenzaA__AFF57188

SEQ ID NO: 40420 - RNA, 1707 nt, Artificial Sequence
  derived and/or modified CDS sequence (wt) from hemagglutinin__InfluenzaA__AFF60787
auggagaaaauagugcuucuuuuugcaauagucagucuuguuaaaagugaucagauuugcauugguuaccaugcaaacaacucgacagagcagguugacacaauaauggaaaagaacguuacuguuacacaugcccaagacauacuggaaaagacacacaacgggaagcucugcgaucuagauggagugaagccucuaauuuugagagauuguaguguagcuggauggcuccucggaaacccaaugugugacgaauucaucaaugugccggaaugguccuacauaguggagaaggccaauccagucaaugaccucuguuacccaggggauuucaaugacuaugaagaauugaaacaccuauugagcagaauaaaccauuuugagaaaauucagaucauccccaaaaguucuugguccagucaugaagccucauuaggggugagcucagcauguccauaccagggaaaguccuccuuuuucagaaaugugguauggcuuaucaaaaagaacaguacauacccaacaauaaagaggagcuacaauaauaccaaccaagaagaucuuuugguacugugggggauucaccauccuaaugaugcggcagagcagacaaagcucuaucaaaacccaaccaccuauauuuccguugggacaucaacacuaaaccagagauugguaccaagaauagcuacuagauccgaaguaaacgggcaaaguggaaggauggaguucuucuggacaauuuuaaaaccgaaugaugcaaucaacuucgagaguaauggaaauuucauugcuccagaauaugcauacaaaauugucaagaaaggggacucaacaauuaugaaaagugaauuggaauaugguaacugcaacaccaagugucaaacuccaaugggggcgauaaacucuaguaugccauuccacaauauacacccucucaccaucggggaaugccccaaauaugugaaaucaaacagauuaguccuugcgacugggcucagaaauagcccucaaagagagagaagaagaaaaaagagaggauuauuuggagcuauagcagguuuuauagagggaggauggcagggaaugguagaugguugguauggguaccaccauagcaaugagcaggggaguggguacgcugcagacaaagaauccacucaaaaggcaauagauggagucaccaauaaggucaacucgaucauugacaaaaugaacacucaguuugaggccguuggaagggaauuuaacaacuuagaaaggagaauagagaauuuaaacaagaagauggaagacggguuccuagaugucuggacuuauaaugcugaacuucugguucucauggaaaaugagagaacucuagacuuucaugacucaaaugucaagaaccuuuacgacaagguccgacuacagcuuagggauaaugcaaaggaacuggguaacgguuguuucgaguucuaucauaaaugugauaaugaauguauggaaaguguaagaaacggaacguaugacuacccgcaguauucagaagaagcaagacuaaaaagagaggaaauaaguggaguaaaauuggaaucaauaggaauuuaccaaauacugucaauuuauucuacaguggcgaguucccuagcacuggcaaucaugguagcuggucuauccuuauggaugugcuccaaugggucguuacaaugcagaauuugcauuuaa

SEQ ID NO: 40421 - RNA, 1701 nt, Artificial Sequence
  derived and/or modified CDS sequence (wt) from hemagglutinin__InfluenzaA__AFG29042
augaaggcaauacuaguaguucugcuauauacauuugcaaccgcaaaugcagacacauuauguauagguuaucaugcgaacaauucaacagacacuguagacacaguacuagaaaagaauguaacaguaacacacucuguuaaccuucuagaagacaagcauaacgggaaacuaugcaaacuaagagggguagccccauugcauuuggguaaauguaacauugcuggcuggauccugggaaauccagagugugaaucacucuccacagcaagcucaugguccuacauuguggaaacauuuaguucagacaauggaacguguuacccaggagauuucaucgauuaugaggagcuaagagagcaauugagcucagugucaucauuugaaagguuugagauauuccccaagacaaguucauggcccaaucaugacucgaacaaagguguaacggcagcauguccucaugcuggagcaaaaagcuucuacaaaaauuuaauauggcuaguuaaaaaaggaaauucauacccaaagcucagcaaauccuacauuaaugauaaagggaaagaaguccucgugcuauggggcauucaccauccaucuacuagugcugaccaacaaagucucuaucagaaugcagaugcauauguuuuuguggggacaucaagauacagcaagaaguucaagccggaaauagcaauaagacccaaagugagggaucaagaagggagaaugaacuauuacuggacacuaauagagccgggagacaaaauaacauucgaagcaacuggaaaucuagugguaccgagauaugcauucgcaauggaaagaaaugcuggaucugguauuaucauuucagauacaccaguccacgauugcaauacaacuugucagacacccaagggugcuauaaacaccagccucccauuucagaauauacauccgaucacaauuggaaaauguccaaaauauguaaaaagcacaaaauugagacuggccacaggauugaggaaugucccgucuauucaaucuagaggccuauuuggggccauugccgguuucauugaagggggguggacagggaugguagauggaugguacgguuaucaccaucaaaaugagcaggggucaggauaugcagccgaccugaagagcacacagaaugccauugacgagauuacuaacaaaguaaauucuguuauugaaaagaugaauacacaguucacagcaguagguaaagaguucaaccaccuggaaaaaagaauagagaauuuaaauaaaaaaguugaugaugguuuccuggacauuuggacuuacaaugccgaauuguuggugcuauuggaaaaugaaagaacuuuggacuaccacgauucaaaugugaagaacuuauaugaaaagguaagaagccaguuaaaaaacaaugccaaggaaauuggaaacggcugcuuugaauuuuaccacaaaugcgauaacacgugcauggaaagugucaaaaaugggacuuaugacuacccaaaauacucagaggaagcaaaauuaaacagagaagaaauagaugggguaaagcuggaaucaacaaggauuuaccagauuuuggcgaucuauucaacugucgccaguucauugguacugguagucucccugggggcaaucaguuucuggaugugcucuaaugggucucuacaguguagaauauguauuuaa

SEQ ID NO: 40422 - RNA, 1701 nt, Artificial Sequence
  derived and/or modified CDS sequence (wt) from hemagglutinin__InfluenzaA__AFG29044
augaaggcaauacuaguaguucugcuauauacauuugcaaccgcaaaugcagacacauuauguauagguuaucaugcgaacaauucaacagacacuguagacacaguacuagaaaagaauguaacaguaacacacucuguuaaccuucuagaagacaagcauaacgggaaacuaugcaaacuaagagggguagccccauugcauuuggguaaauguaacauugcuggcuggauccugggaaauccagagugugaaucacucuccacagcaagcucaugguccuacauuguggaaacaccuaauucagacaauggaacguguuacccaggagauuucaucgauuaugaggagcuaagagagcaauugagcucagugucaucauuugaaagguuugagauauuccccaagacaaguucauggcccaaucaugacucgaacaaagguguaacggcagcauguccucaugcuggagcaaaaagcuucuacaaaaauuugauauggcuaguuaaaaaaggaaauucauacccaaagcucagcaaauccuacauuaaugauaaagggaaagaaguccucgugcuauggggcauucaccauccaccuacuaguacugaccaacaaagucucuaucagaaugcagaugcauauguuuuuguggggacaucaagauacagcaagaaguucaagccggaaauagcaauaagacccaaagugaggggucaagaagggagaaugaacuauuacuggacacuaguagagccgggagacaaaauaacauucgaagcaacuggaaaucuagugguaccgagauaugcauucgcaauggaaagaaaugcuggaucugguauuaucauuucagauacaccaguccacgauugcaauacaacuugucagacacccaagggugcuauaaacaccagccucccauuucagaauauacauccgaucacaauuggaaaauguccaaaauauguaaaaagcacaaaauugagacuggccacaggauugaggaaugucccgucuauucaaucuagaggccuauuuggggccauugccgguuucauugaagggggguggacagggaugguagauggaugguacgguuaucaccaucaaaaugagcaggggucaggauaugcagccgaccugaagagcacacagaaugccauugacaagauuacuaacaaaguaaauucuguuauugaaaagaugaauacacaguucacagcaguagguaaagaguucaaccaccuggaaaaaagaauagagaauuuaaauaaaaaaguugaugaugguuuccuggacauuuggacuuacaaugccgaacuguugguucuauuggaaaaugaaagaacuuuggacuaccacgauucaaaugugaagaacuuauaugaaaagguaagaagccaguuaaaaaacaaugccaaggaaauuggaaacggcugcuuugaauuuuaccacaaaugcgauaacacgugcauggaaagugucaaaaaugggacuuaugacuacccaaaauacucagaggaagcaaaauuaaacagagaagaaauagaugggguaaagcuggaaucaacaaggauuuaccagauuuuggcgaucuauucaacugucgccaguucauugguacugguagucucccugggggcaaucaguuucuggaugugcucuaaugggucucuacaguguagaauauguauuuaa

SEQ ID NO: 40423 - RNA, 1701 nt, Artificial Sequence; identical to SEQ ID NO: 35311
  derived and/or modified CDS sequence (wt) from hemagglutinin__InfluenzaA__AFG31060

SEQ ID NO: 40424 - RNA, 1701 nt, Artificial Sequence; identical to SEQ ID NO: 39118
  derived and/or modified CDS sequence (wt) from hemagglutinin__InfluenzaA__AFG31070

SEQ ID NO: 40425 - RNA, 1701 nt, Artificial Sequence
  derived and/or modified CDS sequence (wt) from hemagglutinin__InfluenzaA__AFG31080
augaaggcaauacuaguaguucugcuauauacauuugcaaccgcaaaugcagacacauuauguauagguuaucaugcgaacaauucaacagacacuguagacacaguacuagaaaagaauguaacaguaacacacucuguuaaccuucuagaagacaagcauaacgggaaacuaugcaaacuaagagggguagccccauugcauuuggguaaauguaacauugcuggcuggauccugggaaauccagagugugaaucacucuccacagcaagcucaugguccuacauuguggaaacaucuaguucagacaauggaacguguuacccaggagauuucaucgauuaugaggagcuaagagagcaauugagcucagugucaucauuugaaagguuugagauauuccccaagacaaguucauggcccaaucaugacucgaacaaagguguaacggcagcauguccucaugcuggagcaaaaagcuucuacaaaaauuuaauauggcuaguuaaaaaaggaaauucauacccaaagcucagcaaauccuacauuaaugauaaagggaaagaaguccucgugcuauggggcauucaccauccaucuacuagugcugaccaacaaagucucuaucagaaugcagaugcauauguuuuuguggggucaucaagauacagcaagaaguucaagccggaaauagcaauaagacccaaagugagggaucaagaagggagaaugaacuauuacuggacacuaguagagccgggagacaaaauaacauucgaagcaacuggaaaucuagugguaccgagauaugcauucgcaauggaaagaaaugcuggaucugguauuaucauuucagauacaccaguccacgauugcaauacaacuugucagacacccaagggugcuauaaacaccagccucccauuucagaauauacauccgaucacaauuggaaaauguccaaaauauguaaaaagcacaaaauugagacuggccacaggauugaggaaugucccgucuauucaaucuagaggccuauuuggggccauugccgguuucauugaagggggguggacagggaugguagauggaugguacgguuaucaccaucaaaaugagcaggggucaggauaugcagccgaccugaagagcacacagaaugccauugacgagauuacuaacaaaguaaauucuguuauugaaaagaugaauacacaguucacagcaguagguaaagaguucaaccaccuggaaaaaagaauagagaauuuaaauaaaaaaguugaugaugguuuccuggacauuuggacuuacaaugccgaacuguugguucuauuggaaaaugaaaggacuuuggacuaccacgauucaaaugugaagaacuuauaugaaaagguaagaagccagcuaaaaaacaaugccaaggaaauuggaaacggcugcuuugaauuuuaccacaaaugcgauaacacgugcauggaaagugucaaaaaugggacuuaugacuacccaaaauacucagaggaagcaaaauuaaacagagaagaaauagaugggguaaagcuggaaucaacaaggauuuaccagauuuuggcgaucuauucaacugucgccaguucauugguacugguagucucccugggggcaaucaguuucuggaugugcucuaaugggucucuacaguguagaauauguauuuaa

SEQ ID NO: 40426 - RNA, 1701 nt, Artificial Sequence
  derived and/or modified CDS sequence (wt) from hemagglutinin__InfluenzaA__AFG31100
augaaggcaauacuaguaguucugcuauauacauuugcaaccgcaaaugcagacacauuauguauagguuaucaugcgaacaauucaacagacacuguagacacaguacuagaaaagaauguaacaguaacacacucuguuaaccuucuagaagacaagcauaacgggaaacuaugcaaacuaagagggguagccccauugcauuuggguaaauguaacauugcuggcuggauccugggaaauccagagugugaaucacucuccacagcaagcucaugguccuacauuguggaaacaucuaguucagacaauggaacguguuacccaggagauuucaucgauuaugaggagcuaagagagcaauugagcucagugucaucauuugaaagguuugagauauuccccaagacaaguucauggcccaaucaugacuugaacaaagguguaacggcagcauguccucaugcuggagcaaaaagcuucuacaaaaauuuaauauggcuaguuaaaaaaggaaauucauacccaaagcucagcaaauccuacauuaaugauaaagggaaagaaguccucgugcuauggggcauucaccauccaucuacuagugcugaccaacaaagucucuaucagaaugcagaugcauauguuuuuguggggacaucaagauacagcaagaaguucaagccggaaauagcaauaagacccaaagugagggaucaagaagggagaaugaacuauuacuggacacuaguagagccgggagacaaaauaacauucgaagcaacuggaaaucuagugguaccgagauaugcauucgcaauggaaagaaaugcuggaucugguauuaucauuucagauacaccaguccacgauugcaauacaacuugucagacacccaagggugcuauaaacaccagccucccauuucagaauauacauccgaucacaauuggaaaauguccaaaauauguaaaaagcacaaaauugagacuggccacaggauugaggaaugucccgucuauucaaucuagaggccuauuuggggccauugccgguuucauugaagggggguggacagggaugguagauggaugguacgguuaucaccaucaaaaugagcaggggucaggauaugcagccgaccugaagagcacacagaaugccauugacgagauuacuaacaaaguaaauucuguuauugaaaagaugaauacacaguucacagcaguagguaaagaguucaaccaccuggaaaaaagaauagagaauuuaaauaaaaagguugaugaugguuuccuggacauuuggacuuacaaugccgaacuguugguucuauuggaaaaugaaagaacuuuggacuaccacgauucaaaugugaagaacuuauaugaaaagguaagaagccaguuaaaaaacaaugccaaggaaauuggaaacggcugcuuugaauuuuaccacaaaugcgauaacacgugcauggaaagugucaaaaaugggacuuaugacuacccaaaauacucagaggaagcaaaauuaaacagagaagaaauagaugggguaaagcuggaaucaacaaggauuuaccagauuuuggcgaucuauucaacugucgccaguucauugguacugauagucucccugggggcaaucaguuucuggaugugcucuaaugggucucuacaguguagaauauguauuuaa

SEQ ID NO: 40427 - RNA, 1701 nt, Artificial Sequence; identical to SEQ ID NO: 35311
  derived and/or modified CDS sequence (wt) from hemagglutinin__InfluenzaA__AFG31110

SEQ ID NO: 40428 - RNA, 1701 nt, Artificial Sequence
  derived and/or modified CDS sequence (wt) from hemagglutinin__InfluenzaA__AFG31120
auggaggcaauacuaguaguucugcuauauacauuugcaaccgcaaaugcagacacauuauguauagguuaucaugcgaacaauucaacagacacuguagacacaguacuagaaaagaauguaacaguaacacacucuguuaaccuucuagaagacaagcauaacgggaaacuaugcaaacuaagagggguagccccauugcauuuggguaaauguaacauugcuggcuggauccugggaaauccagagugugaaucacucuccacagcaagcucaugguccuacauuguggaaacaucuaguucagacaauggaacguguuacccaggagauuucaucgauuaugaggagcuaagagagcaauugagcucagugucaucauuugaaagguuugagauauuccccaagacaaguucauggcccaaucaugacucgaacaaagguguaacggcagcauguccucaugcuggagcaaaaagcuuuuacaaaaauuuaauauggcuaguuaaaaaaggaaauucauacccaaagcucagcaaauccuacauuaaugauaaagggaaagaaguccucgugcuauggggcauucaccauccaucuacuagugcugaccaacaaagucucuaucagaaugcagaugcauauguuuuuguggggucaucaagauacagcaagaaguucaagccggaaauagcaauaagacccaaagugagggaucaagaagggagaaugaacuauuacuggacacuaguagagccgggagacaaaauaacauucgaagcaacuggaaaucuagugguaccgagauaugcauucgcaauggaaagaaaugcuggaucugguauuaucauuucagauacaccaguccacgauugcaauacaacuugucagacacccaagggugcuauaaacaccagccucccauuucauaauauacauccgaucacaauuggaaaauguccaaaauauguaaaaagcacaaaauugagacuggccacaggauugaggaaugucccgucuauucaaucuagaggccuauuuggggccauugccgguuucauugaagggggguggacagggaugguggauggaugguacgguuaucaccaucaaaaugagcaggggucaggauaugcagccgaccugaagagcacacagaaugccauugacgagauuacuaacaaaguaaauucuguuauugaaaagaugaauacacaguucacagcaguagguaaagaguucaaccaccuggaaaaaagaauagagaauuuaaauaaaaaaguugaugaugguuuccuggacauuuggacuuacaaugccgaacuguugguucuauuggaaaaugaaagaacuuuggacuaccacgauucaaaugugaagaacuuauaugaaaagguaagaagccaguuaaaaaacaaugccaaggaaauuggaaacggcugcuuugaauuuuaccacaaaugcgauaacacgugcauggaaagugucaaaaaugggacuuaugacuacccaaaauacucagaggaagcaaaauuaaacagagaagaaauagaugggguaaagcuggaaucaacaaggauuuaccagauuuuggcgaucuauucaacugucgccaguucauugguacugguagucucccugggggcaaucaguuucuggaugugcucuaaugggucucuacaguguagaauauguauuuaa

SEQ ID NO: 40429 - RNA, 1701 nt, Artificial Sequence; identical to SEQ ID NO: 40428
  derived and/or modified CDS sequence (wt) from hemagglutinin__InfluenzaA__AFG31130

SEQ ID NO: 40430 - RNA, 1701 nt, Artificial Sequence; identical to SEQ ID NO: 40428
  derived and/or modified CDS sequence (wt) from hemagglutinin__InfluenzaA__AFG31140

SEQ ID NO: 40431 - RNA, 1701 nt, Artificial Sequence; identical to SEQ ID NO: 36187
  derived and/or modified CDS sequence (wt) from hemagglutinin__InfluenzaA__AFG31150

SEQ ID NO: 40432 - RNA, 1701 nt, Artificial Sequence; identical to SEQ ID NO: 36187
  derived and/or modified CDS sequence (wt) from hemagglutinin__InfluenzaA__AFG31160

SEQ ID NO: 40433 - RNA, 1701 nt, Artificial Sequence
  derived and/or modified CDS sequence (wt) from hemagglutinin__InfluenzaA__AFG31170
augaaggcaauacuaguaguucugcuauauacauuugcaaccgcaaaugcagacacauuauguauagguuaucaugcgaacaauucaacagacacuguagacacaguacuagaaaagaauguaacaguaacacacucuguuaaccuucuagaagacaagcauaacgggaaacuaugcaaacuaagagggguagccccauugcauuuggguaaauguaacauugcuggcuggauccugggaaauccagagugugaaucacucuccacagcaagcucaugguccuacauuguggaaacaucuaguucagacaauggaacguguuacccaggagauuucaucgauuaugaggagcuaagagagcaauugagcucagugucaucauuugaaagguuugagauauuccccaagacaaguucauggcccaaucaugacucgaacaaagguguaacggcagcauguccucaugcuggagcaaaaagcuucuacaaaaauuuaauauggcuaguuaaaaaaggaaauucauacccaaagcucagcaaauccuacauuaaugauaaagggaaagaaguccucgugcuauggggcauucaccauccaucuacuagugcugaccaacaaagucucuaucagaaugcagaugcauauguuuuuguggggacaucaagauacagcaagaaguucaagccggaaauagcaauaagacccaaagugagggaucaagaagggagaaugaacuauuacuggacacuaguagagccgggagacaaaauaacauucgaagcaacuggaaaucuagugguaccgagauaugcauucgcaauggaaagaaaugcuggaucugguauuaucauuucagauacaccaguccacgauugcaauacaacuugucagacacccaagggugcuauaaacaccagccucccauuucagaauauacauccgaucacaauuggaaaauguccaaaauauguaaaaagcacaaaauugagacuggcuacaggauugaggaaugucccuucuauucaaucuagaggccuauuuggggccauugccgguuucauugaagggggguggacagggaugguagauggaugguacgguuaucaccaucaaaaugagcaggggucaggauaugcagccgaccugaagagcacacagaaugccauugacgagaucacuaacaaaguaaauucuguuauugaaaagaugaauacacaguucacagcaguagguaaagaguucaaccaccuggaaaaaagaauagagaauuuaaauaaaaaaguugaugaugguuuccuggacauuuggacuuacaaugccgaacuguugguucuauuggaaaaugaaagaacuuuggacuaccacgauucaaaugugaagaacuuauaugaaaagguaagaagccaguuaaaaaacaaugccaaggaaauuggaaacggcugcuuugaauuuuaccacaaaugcgauaacacaugcauggaaagugucaaaaaugggacuuaugacuacccaaaauacucagaggaagcaaaauuaaacagagaagaaauagaugggguaaagcuggaaucaacaaggauuuaccagauuuuggcgaucuauucaacugucgccaguucauugguacugguagucucccugggggcaaucaguuucuggaugugcucuaaugggucucuacaguguagaauauguauuuaa

SEQ ID NO: 40434 - RNA, 1701 nt, Artificial Sequence; identical to SEQ ID NO: 40433
  derived and/or modified CDS sequence (wt) from hemagglutinin__InfluenzaA__AFG31180

SEQ ID NO: 40435 - RNA, 1701 nt, Artificial Sequence; identical to SEQ ID NO: 34681
  derived and/or modified CDS sequence (wt) from hemagglutinin__InfluenzaA__AFG31190

SEQ ID NO: 40436 - RNA, 1701 nt, Artificial Sequence; identical to SEQ ID NO: 34681
  derived and/or modified CDS sequence (wt) from hemagglutinin__InfluenzaA__AFG31200

SEQ ID NO: 40437 - RNA, 1701 nt, Artificial Sequence
  derived and/or modified CDS sequence (wt) from hemagglutinin__InfluenzaA__AFG31210
augaaggcaauacuaguaguucugcuauauacauuugcaaccgcaaaugcagacacauuauguauagguuaucaugcgaacaauucaacagacacuguagacacaguacuagaaaagaauguaacaguaacacacucuguuaaccuucuagaagacaagcauaacgggaaacuaugcaaacuaagagggguagccccauugcauuuggguaaauguaacauugcuggcuggauccugggaaauccagagugugaaucacucuccacagcaagcucaugguccuacauuguggaaacaucuaguucagacaauggaacguguuacccaggagauuucaucgauuaugaggagcuaagagagcaauugagcucagugucaucauuugaaagguuugagauauuccccaagacaaguucauggcccaaucaugacucgaacaaagguguaacggcagcauguccucaugcuggagcaaaaagcuucuacaaaaauuuaauauggcuaguuaaaaaaggaaauucauacccaaagcucagcaaauccuacauuaaugacaaagggaaagaaguccucgugcuauggggcauucaccauccaucuacuagugcugaccaacaaagucucuaucagaaugcagaugcauauguuuuuguggggacaucaagauacagcaagaaguucaagccggaaauagcaauaagacccaaagugagggaucaagaagggagaaugaacuauuacuggacacuaguagagccgggagacaaaauaacauucgaagcaacuggaaaucuagugguaccgagauaugcauucgcaauggaaagaaaugcuggaucugguauuaucauuucagauacaccaguccacgauugcaauacaacuugucagacacccaagggugcuauaaacaccagccucccauuucagaauauacauccgaucacaauuggaaaauguccaaaauauguaaaaagcacaaaauugagacuggccacaggauugaggaaugucccgucuauucaaucuagaggccuauuuggggccauugccgguuucauugaagggggguggacagggaugguagauggaugguacgguuaucaccaucaaaaugagcaggggucaggauaugcagccgaccugaaaagcacacagaaugccauugacgagauuacuaacaaaguaaauucuguuauugaaaagaugaauacacaguucacagcaguagguaaagaguucaaccaccuggaaaaaagaauagagaauuuaaauaaaaaaguugaugaugguuuccuggacauuuggacuuacaaugccgaacuguugguucuauuggaaaaugaaagaacuuuggacuaccacgauucaaaugugaagaacuuauaugaaaagguaagaagccaguuaaaaaacaaugccaaggaaauuggaaacggcugcuuugaauuuuaccacaaaugcgauaacacgugcauggaaagugucaaaaaugggacuuaugacuacccaaaauacucagaggaagcaaaauuaaacagagaagaaauagaugggguaaagcuggaaucaacaaggauuuaccagauuuuggcgaucuauucaacugucgccaguucauugguacugguagucucccugggggcaaucaguuucuggaugugcucuaaugggucucuacaguguagaauauguauuuaa

SEQ ID NO: 40438 - RNA, 1701 nt, Artificial Sequence; identical to SEQ ID NO: 40437
  derived and/or modified CDS sequence (wt) from hemagglutinin__InfluenzaA__AFG31220

SEQ ID NO: 40439 - RNA, 1701 nt, Artificial Sequence; identical to SEQ ID NO: 39118
  derived and/or modified CDS sequence (wt) from hemagglutinin__InfluenzaA__AFG31230

SEQ ID NO: 40440 - RNA, 1701 nt, Artificial Sequence
  derived and/or modified CDS sequence (wt) from hemagglutinin__InfluenzaA__AFG31240
augaaggcaauacuaguaguucugcuauauacauuugcaaccgcaaaugcagacacauuauguauagguuaucaugcgaacaauucaacagacacuguagacacaguacuagaaaagaauguaacaguaacacacucuguuaaccuucuagaagacaagcauaacgggaaacuaugcaaacuaagagggguagccccauugcauuuggguaaauguaacauugcuggcuggauccugggaaauccagagugugaaucacucuccacagcaagcucaugguccuacauuguggaaacaucuaguucagacaauggaacguguuacccaggagauuucaucgauuaugaggagcuaagagagcaauugagcucagugucaucauuugaaagguuugagauauuccccaagacaaguucauggcccaaucaugacucgaacaaagguguaacggcagcauguccucaugcuggagcaaaaagcuucuacaaaaauuuaauauggcuaguuaaaaaaggaaauucauacccaaagcucagcaaauccuacauuaaugauaaagggaaagagguccucgugcuauggggcauucaccauccaucuacuagugcugaccaacaaagucucuaucagaaugcagaugcauauguuuuuguggggacaucaagauacagcaagaaguucaagccggaaauagcaauaagacccaaagugagggaucaagaagggagaaugaacuauuacuggacacuaguagagccgggagacaaaauaacauucgaagcaacuggaaaucuagugguaccgagauaugcauucgcaauggaaagaaaugcuggaucugguauuaucauuucagauacaccaguccacgauugcaauacaacuugucagacacccaagggugcuauaaacaccagccucccauuucagaauauacauccgaucacaauuggaaaauguccaaaauauguaaaaagcacaaaauugagacuggccacaggauugaggaaugucccgucuauucaaucuagaggccuauuuggggccauugccgguuucauugaagggggguggacagggaugguagauggaugguacgguuaucaccaucaaaaugagcaggggucaggauaugcagccgaccugaagagcacacagaaugccauugacgagauuacuaacaaaguaaauucuguuauugaaaagaugaauacacaguucacagcaguagguaaagaguucaaccaccuggagaaaagaauagagaauuuaaauaaaaaaguugaugaugguuuccuggacauuuggacuuacaaugccgaacuguugguucuauuggaaaaugaaagaacuuuggacuaccacgauucaaaugugaagaacuuauaugaaaagguaagaagccaguuaaaaaacaaugccaaggaaauuggaaacggcugcuuugaauuuuaccacaaaugcgauaacacgugcauggaaagugucaaaaaugggacuuaugacuacccaaaauacucagaggaagcaaaauuaaacagagaagaaauagaugggguaaagcuggaaucaacaaggauuuaccagauuuuggcgaucuauucaacugucgccaguucauugguacugguagucucccugggggcaaucaguuucuggaugugcucuaaugggucucuacaguguagaauauguauuuaa

SEQ ID NO: 40441 - RNA, 1701 nt, Artificial Sequence
  derived and/or modified CDS sequence (wt) from hemagglutinin__InfluenzaA__AFG31250
augaaggcaauacuaguaguucugcuauauacauuugcaaccgcaaaugcagacacauuauguauagguuaucaugcgaacaauucaacagacacuguagacacaguacuagaaaagaauguaacaguaacacacucuguuaaccuucuagaagacaagcauaacgggaaacuaugcaaacuaagagggguagccccauugcauuuggguaaauguaacauugcuggcuggauccugggaaauccagagugugaaucacucuccacagcaagcucaugguccuacauuguggaaacaucuaguucagacaauggaacguguuacccaggagauuucaucgauuaugaggagcuaagagagcaauugagcucagugucaucauuugaaagguuugagauauuccccaagacaaguucauggcccaaucaugacucgaacaaagguguaacggcagcauguccucaugcuggagcaaaaagcuucuacaaaaauuuaauauggcuaguuaaaaaaggaaauucauacccaaagcucagcaaauccuacauuaacgauaaagggaaagaaguccucgugcuauggggcauucaccauccaucuacuagugcugaccaacaaagucucuaucagaaugcagaugcauauguuuuuguggggacaucaagauacagcaagaaguucaagccggaaauagcaauaagacccaaagugagggaucaagaagggagaaugaacuauuacuggacacuaguagagccgggagacaaaauaacauucgaagcaacuggaaaucuagugguaccgagauaugcauucgcaauggaaagaaaugcuggaucugguauuaucauuucagauacaccaguccacgauugcaauacaacuugucagacacccaagggugcuauaaacaccagccucccauuucagaauauacauccgaucacaauuggaaaauguccaaaauauguaaaaagcacaaaauugagacuggccacaggauugaggaaugucccuucuauucaaucuagaggccuauuuggggccauugccgguuucauugaagggggguggacagggaugguagauggaugguacgguuaucaccaucaaaaugagcaggggucaggauaugcagccgaccugaagagcacacagaaugccauugacgagauuacuaacaaaguaaauucuguuauugaaaagaugaauacacaguucacagcaguagguaaagaguucaaccaccuggaaaaaagaauagagaauuuaaauaaaaaaguugaugaugguuuccuggacauuuggacuuacaaugccgaacuguugguucuauuggaaaaugaaagaacuuuggacuaccacgauucaaaugugaagaacuuauaugaaaagguaagaagccaguuaaaaaacaaugccaaggaaauuggaaacggcugcuuugaauuuuaccacaaaugcgauaacacgugcauggaaagugucaaaaaugggacuuaugacuacccaaaauacucagaggaagcaaaauuaaacagagaagaaauagaugggguaaagcuggaaucaacaaggauuuaccagaucuuggcgaucuauucaacugucgccaguucauugguacugguagucucccugggggcaaucaguuucuggaugugcucuaaugggucucuacaguguagaauauguauuuaa

SEQ ID NO: 40442 - RNA, 1701 nt, Artificial Sequence; identical to SEQ ID NO: 35498
  derived and/or modified CDS sequence (wt) from hemagglutinin__InfluenzaA__AFG31260

SEQ ID NO: 40443 - RNA, 1701 nt, Artificial Sequence; identical to SEQ ID NO: 35498
  derived and/or modified CDS sequence (wt) from hemagglutinin__InfluenzaA__AFG31270

SEQ ID NO: 40444 - RNA, 1701 nt, Artificial Sequence
  derived and/or modified CDS sequence (wt) from hemagglutinin__InfluenzaA__AFG31280
augaaggcaauacuaguaguucugcuauauacauuugcaaccgcaaaugcagacacauuauguauagguuaucaugcgaacaauucaacagacacuguagacacaguacuagaaaagaauguaacaguaacacacucuguuaaccuucuagaagacaagcauaacgggaaacuaugcaaacuaagagggguagccccauugcauuuggguaaauguaacauugcuggcuggauccugggaaauccagagugugaaucacucuccacagcaagcucaugguccuacauuguggaaacaucuaguucagacaauggaacguguuacccaggagauuucaucgauuaugaggagcuaagagagcaauugagcucagugucaucauuugaaagguuugagauauuccccaagacaaguucauggcccaaucaugacucgaacaaagguguaacggcagcauguccucaugcuggagcaaaaagcuucuacaaaaauuuaauauggcuaguuaaaaaaggaaauucauacccaaagcucagcaaauccuacauuaaugauaaagggaaagagguccucgugcuauggggcauucaccauccaucuacuagugcugaccaacaaagucucuaucagaaugcagaugcauauguuuuuguggggacaucaagauacagcaagaaguucaagccggaaauagcaauaagacccaaagugagggaucaagaagggagaaugaacuauuacuggacacuaguagagccgggagacaaaauaacauucgaagcaacuggaaaucuagugguaccgagauaugcauucgcaauggaaagaaaugcuggaucugguauuaucauuucagauacaccaguccacgauugcaauacaacuugucagacacccaagggugcuauaaacaccagccucccauuucagaauauacauccgaucacaauuggaaaauguccaaaauauguaaaaagcacaaaauugagacuggccacaggauugaggaaugucccgucuauucaaucuagaggccuauuuggggccauugccgguuucauugaagggggguggacagggaugguagauggaugguacgguuaucaccaucaaaaugagcaggggucaggauaugcagccgaccugaagagcacacagaaugccauugacgagauuacuaacaaaguaaauucuguuauugaaaagaugaauacacaguucacagcaguagguaaagaguucaaccaccuggaaaaaagaauagagaauuuaaauaaaaaaguugaugaugguuuccuggacauuuggacuuacaaugccgaacuguugguucuauuggaaaaugaaagaaccuuggacuaccacgauucaaaugugaagaacuuauaugaaaagguaagaagccaguuaaaaaacaaugccaaggaaauuggaaacggcugcuuugaauuuuaccacaaaugcgauaacacgugcauggaaagugucaaaaaugggacuuaugacuacccaaaauacucagaggaagcaaaauuaaacagagaagaaauagaugggguaaagcuggaaucaacaaggauuuaccagauuuuggcgaucuauucaacugucgccaguucauugguacugguagucucccugggggcaaucaguuucuggauguguucuaaugggucucuacaguguagaauauguauuuaa

SEQ ID NO: 40445 - RNA, 1701 nt, Artificial Sequence; identical to SEQ ID NO: 35498
  derived and/or modified CDS sequence (wt) from hemagglutinin__InfluenzaA__AFG31290

SEQ ID NO: 40446 - RNA, 1701 nt, Artificial Sequence
  derived and/or modified CDS sequence (wt) from hemagglutinin__InfluenzaA__AFG31300
augaaggcaauacuaguaguucugcuauauacauuugcaaccgcaaaugcagacacauuauguauagguuaucaugcgaacaauucaacagacacuguagacacaguacuagaaaagaauguaacaguaacacacucuguuaaccuucuagaagacaagcauaacgggaaacuaugcaaacuaagagggguagccccauugcauuuggguaaauguaacauugcuggcuggauccugggaaauccagagugugaaucacucuccacagcaagcucaugguccuacauuguggaaacaucuaguucagacaauggaacguguuacccaggagauuucaucgauuaugaggagcuaagagagcaauugagcucagugucaucauuugaaagguuugagauauuccccaagacaaguucauggcccaaucaugacucgaacaaagguguaacggcagcauguccucaugcuggagcaaaaagcuucuacaaaaauuuaauauggcuaguuaaaaaaggaaauucauacccaaagcucagcaaauccuacauuaaugacaaagggaaagaaguccucgugcuauggggcauucaccauccaucuacuagugcugaccaacaaagucucuaucagaaugcagaugcauauguuuuuguggggacaucaagauacagcaagaaguucaagccggaaauagcaauaagacccaaagugagggaucaagaagggagaaugaacuauuacuggacacuaguagagccgggagacaaaauaacauucgaagcaacuggaaaucuagugguaccgagauaugcauucgcaauggaaagaaaugcuggaucugguauuaucauuucagauacaccaguccacgauugcaauacaacuugucagacacccaagggugcuauaaacaccagccucccauuucagaauauaaauccgaucacaauuggaaaauguccaaaauauguaaaaagcacaaaauugagacuggccacaggauugaggaaugucccgucuauucaaucuagaggccuauuuggggccauugccgguuucauugaagggggguggacagggaugguagauggaugguacgguuaucaccaucaaaaugagcaggggucaggauaugcagccgaccugaaaagcacacagaaugccauugacgagauuacuaacaaaguaaauucuguuauugaaaagaugaauacacaguucacagcaguagguaaagaguucaaccaccuggaaaaaagaauagagaauuuaaauaaaaaaguugaugaugguuuccuggacauuuggacuuacaaugccgaacuguugguucuauuggaaaaugaaagaacuuuggacuaccacgauucaaaugugaagaacuuauaugaaaagguaagaagccaguuaaaaaacaaugccaaggaaauuggaaacggcugcuuugaauuuuaccacaaaugcgauaacacgugcauggaaagugucaaaaaugggacuuaugacuacccaaaauacucagaggaagcaaaauuaaacagagaagaaauagaugggguaaagcuggaaucaacaaggauuuaccagauuuuggcgaucuauucaacugucgccaguucauugguacugguagucucccugggggcaaucaguuucuggaugugcucuaaugggucucuacaguguagaauauguauuuaa

SEQ ID NO: 40447 - RNA, 1701 nt, Artificial Sequence
  derived and/or modified CDS sequence (wt) from hemagglutinin__InfluenzaA__AFG31310
augaaggcaauacuaguaguucugcuauauacauuugcaaccgcaaaugcagacacauuauguauagguuaucaugcgaacaauucaacagacacuguagacacaguacuagaaaagaauguaacaguaacacacucuguuaaccuucuagaagacaagcauaacgggaaacuaugcaaacuaagagggguagccccauugcauuuggguaaauguaacauugcuggcuggauccugggaaauccagagugugaaucacucuccacagcaagcucaugguccuacauuguggaaacaucuaguucagacaauggaacguguuacccaggagauuucaucgauuaugaggagcuaagagagcaauugagcucagugucaucauuugaaagguuugagauauuccccaagacaaguucauggcccaaucaugacucgaacaaagguguaacggcagcauguccucaugcuggagcaaaaagcuucuacaaaaauuuaauauggcuaguuaaaaaaggaaauucauacccaaagcucagcaaauccuacauuaaugauaaagggaaagaaguccucgugcuauggggcauucaccauccaucuacuagugcugaccaacaaagucucuaucagaaugcagaugcauauguuuuuguggggacaucaaaauacagcaagaaguucaagccggaaauagcaauaagacccaaagugagggaucaagaagggagaaugaacuauuacuggacacuaguagagccgggagacaaaauaacauucgaagcaacuggaaaucuagugguaccgagauaugcauucgcaauggaaagaaaugcuggaucugguauuaucauuucagauacaccaguccacgauugcaauacaacuugucagacacccaagggugcuauaaacaccagccucccauuucagaauauacauccgaucacaauuggaaaauguccaaaauauguaaaaagcacaaaauugagacuggccacaggauugaggaaugucccgucuauucaaucuagaggccuauuuggggccauugccgguuucauugaagggggguggacagggaugguagauggaugguacgguuaucaccaucaaaaugagcaggggucaggauaugcagccgaccugaagagcacacagaaugccauugacgagauuacuaacaaaguaaauucuguuauugaaaagaugaauacacaguucacagcaguagguaaagaguucaaccaccuggaaaaaagaauagagaauuuaaauaaaaaaguugaugaugguuuccuggacauuuggacuuacaaugccgaacuguugguucuauuggaaaaugaaagaacuuuggacuaccacgauucaaaugugaagaacuuauaugaaaagguaagaagccaguuaaaaaacaaugccaaggaaauuggaaacggcugcuuugaauuuuaccacaaaugcgauaacacgugcauggaaagugucaaaaaugggacuuaugacuacccaaaauacucagaggaagcaaaauuaaacagagaagaaauagaugggguaaagcuggaaucaacaaggauuuaccagauuuuggcgaucuauucaacugucgccaguucauugguacugguagucucccugggggcaaucaguuucuggaugugcucuaaugggucucuacaguguagaauauguauuuaa

SEQ ID NO: 40448 - RNA, 1701 nt, Artificial Sequence; identical to SEQ ID NO: 40437
  derived and/or modified CDS sequence (wt) from hemagglutinin__InfluenzaA__AFG31323

SEQ ID NO: 40449 - RNA, 1701 nt, Artificial Sequence; identical to SEQ ID NO: 40437
  derived and/or modified CDS sequence (wt) from hemagglutinin__InfluenzaA__AFG31333

SEQ ID NO: 40450 - RNA, 1701 nt, Artificial Sequence; identical to SEQ ID NO: 36261
  derived and/or modified CDS sequence (wt) from hemagglutinin__InfluenzaA__AFG31343

SEQ ID NO: 40451 - RNA, 1701 nt, Artificial Sequence; identical to SEQ ID NO: 36261
  derived and/or modified CDS sequence (wt) from hemagglutinin__InfluenzaA__AFG31353

SEQ ID NO: 40452 - RNA, 1701 nt, Artificial Sequence; identical to SEQ ID NO: 36261
  derived and/or modified CDS sequence (wt) from hemagglutinin__InfluenzaA__AFG31363

SEQ ID NO: 40453 - RNA, 1701 nt, Artificial Sequence; identical to SEQ ID NO: 36261
  derived and/or modified CDS sequence (wt) from hemagglutinin__InfluenzaA__AFG31376

SEQ ID NO: 40454 - RNA, 1701 nt, Artificial Sequence; identical to SEQ ID NO: 36261
  derived and/or modified CDS sequence (wt) from hemagglutinin__InfluenzaA__AFG31386

SEQ ID NO: 40455 - RNA, 1701 nt, Artificial Sequence; identical to SEQ ID NO: 36261
  derived and/or modified CDS sequence (wt) from hemagglutinin__InfluenzaA__AFG31396

SEQ ID NO: 40456 - RNA, 1701 nt, Artificial Sequence; identical to SEQ ID NO: 36261
  derived and/or modified CDS sequence (wt) from hemagglutinin__InfluenzaA__AFG31406

SEQ ID NO: 40457 - RNA, 1701 nt, Artificial Sequence
  derived and/or modified CDS sequence (wt) from hemagglutinin__InfluenzaA__AFG31416
augaaggcaauacuaguaguucugcuauauacauuugcaaccgcaaaugcagacacauuauguauagguuaucaugcgaacaauucaacagacacuguagacacaguacuagaaaagaauguaacaguaacacacucuguuaaccuucuagaagacaagcauaacgggaaacuaugcaaacuaagagggguagccccauugcauuuggguaaauguaacauugcuggcuggauccugggaaauccagagugugaaucacucuccacagcaagcucaugguccuacauuguggaaacaucuaguucagacaauggaacguguuacccaggagauuucaucgauuaugaggagcuaagagagcaauugagcucagugucaucauuugaaagguuugagauauuccccaagacaaguucauggcccaaucaugacucgaacaaagguguaacggcagcauguccucaugcuggagcaaaaagcuucuacaaaaauuuaauauggcuaguuaaaaaaggaaauucauacccaaagcucagcaaauccuacauuaaugauaaagggaaagaaguccucgugcuauggggcauucaccauccaucuacuagugcugaccaacaaagucucuaucagaaugcagaugcauauguuuuuguggggacaucaagauacagcaagaaguucaagccggaaauagcaauaagacccaaagugagggaucaagaagggagaaugaacuauuacuggacacuaguagagccgggagacaaaauaacauucgaagcaacuggaaaucuagugguaccgagauaugcauucgcaauggaaagaaaugcuggaucugguauuaucauuucagauacaccgguccacgauugcaauacaacuugucagacacccaagggugcuauaaacaccagccucccauuucagaauauacauccgaucacaauuggaaaauguccaaaauauguaaaaagcacaaaauugagacuggccacaggauugaggaaugucccuucuauucaaucuagaggccuauuuggggccauugccgguuucauugaagggggguggacagggaugguagauggaugguacgguuaucaccaucaaaaugagcaggggucaggauaugcagccgaccugaagagcacacagaaugccauugacgagauuacuaacaaaguaaauucuguuauugaaaagaugaauacacaguucacagcaguagguaaagaguucaaccaccuggaaaaaagaauagagaauuuaaauaaaaaaguugaugaugguuuccuggacauuuggacuuacaaugccgaacuguugguucuauuggaaaaugaaagaacuuuggacuaccacgauucaaaugugaagaacuuauaugaaaagguaagaagccaguuaaaaaacaaugccaaggaaauuggaaacggcugcuuugaauuuuaccacaaaugcgauaacacgugcauggaaagugucaaaaaugggacuuaugacuacccaaaauacucagaggaagcaaaauuaaacagagaagaaauagaugggguaaaacuggaaucaacaaggauuuaccagauuuuggcgaucuauucaacugucgccaguucauugguacugguagucucccugggggcaaucaguuucuggaugugcucuaaugggucucuacaguguagaauauguauuuaa

SEQ ID NO: 40458 - RNA, 1701 nt, Artificial Sequence; identical to SEQ ID NO: 40457
  derived and/or modified CDS sequence (wt) from hemagglutinin__InfluenzaA__AFG31426

SEQ ID NO: 40459 - RNA, 1701 nt, Artificial Sequence; identical to SEQ ID NO: 40457
  derived and/or modified CDS sequence (wt) from hemagglutinin__InfluenzaA__AFG31436

SEQ ID NO: 40460 - RNA, 1701 nt, Artificial Sequence; identical to SEQ ID NO: 40457
  derived and/or modified CDS sequence (wt) from hemagglutinin__InfluenzaA__AFG31446

SEQ ID NO: 40461 - RNA, 1701 nt, Artificial Sequence; identical to SEQ ID NO: 40457
  derived and/or modified CDS sequence (wt) from hemagglutinin__InfluenzaA__AFG31456

SEQ ID NO: 40462 - RNA, 1701 nt, Artificial Sequence; identical to SEQ ID NO: 40457
  derived and/or modified CDS sequence (wt) from hemagglutinin__InfluenzaA__AFG31466

SEQ ID NO: 40463 - RNA, 1701 nt, Artificial Sequence; identical to SEQ ID NO: 36080
  derived and/or modified CDS sequence (wt) from hemagglutinin__InfluenzaA__AFG31486

SEQ ID NO: 40464 - RNA, 1701 nt, Artificial Sequence
  derived and/or modified CDS sequence (wt) from hemagglutinin__InfluenzaA__AFG31496
augaaggcaauacuaguaguucugcuauauacauuugcaaccgcaaaugcagacacauuauguauagguuaucaugcgaacaauucaacagacacuguagacacaguacuagaaaagaauguaacaguaacacacucuguuaaccuucuagaagacaagcauaacgggaaacuaugcaaacuaagagggguagccccauugcauuuggguaaauguaacauugcuggcuggauccugggaaauccagagugugaaucacucuccacagcaagcucaugguccuacauuguggaaacaucuaguucagacaauggaacguguuacccaggagauuucaucgauuaugaggagcuaagagagcaauugagcucagugucaucauuugaaagguuugagauauuccccaagacaaguucauggcccaaucaugacucgaacaaagguguaacggcagcauguccucaugcuggagcaaaaagcuucuacaaaaauuuaauauggcuaguuaaaaaaggaaauucauacccaaagcucagcaaauccuacauuaaugauaaagggaaagaaguccucgugcuauggggcauucaccauccaucuacuagugcugaccaacaaagucucuaucagaaugcagaugcauauguuuuuguggggacaucaagauacagcaagaaguucaagccggaaauagcaauaagacccaaagugagggaucaagaagggagaaugaacuauuacuggacacuaguagagccgggagacaaaauaacauucgaagcaacuggaaaucuagugguaccgagauaugcauucgcaauggaaagaaaugcuggaucugguauuaucauuucagauacaccaguccacgauugcaauacaacuugucagacacccaagggugcuauaaacaccagccucccauuucagaauauacauccgaucacaauuggaaaauguccaaaauauguaaaaagcacaaaauugagacuggccacaggauugaggaaugucccuucuauucaaucuagaggccuauuuggggccauugccgguuucauugaagggggguggacagggaugguagauggaugguacgguuaucaccaucaaaaugagcaggggucaggauaugcagccgaccugaagagcacacagaaugccauugacgagauuacuaacaaaguaaauucuguuauugaaaagaugaauacacaguucacagcaguagguaaagaguucaaccaccuggaaaaaagaauagagaauuuaaauaaaaaaguugaugaugguuuccuggacauuuggacuuacaaugccgaacuguugguucuauuggaaaaugaaagaacuuuggacuaccacgauucaaaugugaagaacuuauaugaaaagguaagaagccaguuaaaaaacaaugccaaggaaauuggaaacggcugcuuugaauuuuaccacaaaugcgauaacacgugcauggaaagugucaaaaaugggacuuaugacuacccaaaauacucagaggaagcaaaauuaaacagagaagaaauagaugggguaaaacuggaaucaacaaggauuuaccagauuuuggcgaucuauucaacugucgccaguucauugguacugguagucucccugggggcaaucaguuucuggaugugcucuaaugggucucuacaguguagaauauguauuuaa

SEQ ID NO: 40465 - RNA, 1701 nt, Artificial Sequence
  derived and/or modified CDS sequence (wt) from hemagglutinin__InfluenzaA__AFG31506
augaaggcaauacuaguaguucugcuauauacauuugcaaccgcaaaugcagacacauuauguauagguuaucaugcgaacaauucaacagacacuguagacacaguacuagaaaagaauguaacaguaacacacucuguuaaccuucuagaagacaagcauaacgggaaacuaugcaaacuaagagggguagccccauugcauuuggguaaauguaacauugcuggcuggauccugggaaauccagagugugaaucacucuccacagcaagcucaugguccuacauuguggaaacaucuaguucagacaauggaacguguuacccaggagauuucaucgauuaugaggagcuaagagagcaauugagcucagugucaucauuugaaagguuugagauauuccccaagacaaguucauggcccaaucaugacucgaacaaagguguaacggcagcauguccucaugcuggagcaaaaagcuucuacaaaaauuuaauauggcuaguuaaaaaaggaaauucauacccaaagcucagcaaauccuacauuaaugauaaagggaaagaaguccucgugcuauggggcauucaccauccaucuacuagugcugaccaacaaagucucuaucagaaugcagaugcauauguuuuuguggggacaucaagauacagcaagaaguucaagccggaaauagcaauaagacccaaagugagggaucaagaagggagaaugaacuauuacuggacacuaguagagccgggagacaaaauaacauucgaagcaacuggaaaucuagugguaccgagauaugcauucgcaauggaaagaaaugcuggaucugguauuaucauuucagauacaccaguccacgauugcaauacaacuugucagacacccaagggugcuauaaacaccagccucccauuucagaauauacauccgaucacaauuggaaaauguccaaaauauguaaaaagcacaaaauugagacuggccacaggauugaggaaugucccgucuauucaaucuagaggccuauuuggggccauugccgguuucauugaagggggguggacagggaugguagauggaugguacgguuaucaccaucaaaaugagcaggggucaggauaugcagccgaccugaagagcacacagaaugccauugacgagauuacuaacaaaguaaauucuguuauugaaaagaugaauacacaguucacagcaguagguaaagaguucaaccaccuggaaaaaagaauagagaauuuaaauaaaaaaguugaugaugguuuucuggacauuuggacuuacaaugccgaacuguugguucuauuggaaaaugaaagaacuuuggacuaccacgauucaaaugugaagaacuuauaugaaaagguaagaagccaguuaaaaaacaaugccaaggaaauuggaaacggcugcuuugaauuuuaccacaaaugcgauaacacgugcauggaaagugucaaaaaugggacuuaugacuacccaaaauacucagaggaagcaaaauuaaacagagaagaaauagaugggguaaagcuggaaucaacaaggauuuaccagauuuuggcgaucuauucaacugucgccaguucauugguacugguagucucccugggggcaaucaguuucuggaugugcucuaaugggucucuacaguguagaauauguauuuaa

SEQ ID NO: 40466 - RNA, 1701 nt, Artificial Sequence; identical to SEQ ID NO: 36261
  derived and/or modified CDS sequence (wt) from hemagglutinin__InfluenzaA__AFG31516

SEQ ID NO: 40467 - RNA, 1701 nt, Artificial Sequence
  derived and/or modified CDS sequence (wt) from hemagglutinin__InfluenzaA__AFG31526
augaaggcaauacuaguaguucugcuauauacauuugcaaccgcaaaugcagacacauuauguauagguuaucaugcgaacaauucaacagacacuguagacacaguacuagaaaagaauguaacaguaacacacucuguuaaccuucuagaagacaagcauaacgggaaacuaugcaaacuaagagggguagccccauugcauuuggguaaauguaacauugcuggcuggauccugggaaauccagagugugaaucacucuccacagcaagcucaugguccuacauuguggaaacaucuaguucagacaauggaacguguuacccaggagauuucaucgauuaugaggagcuaagagagcaauugagcucagugucaucauuugaaagguuugagauauuccccaagacaaguucauggcccaaucaugacucgaacaaagguguaacggcagcauguccucaugcuggagcaaaaagcuucuacaaaaauuuaauauggcuaguuaaaaaaggaaauucauacccaaagcucagcaaauccuacauuaaugauaaagggaaagaaguccucgugcuauggggcauucaccauccaucuacuagugcugaccaacaaagucucuaucagaaugcagaugcauauguuuuuguggggacaucaagauacagcaagaaguucaagccggaaauagcaauaagacccaaagugagggaucaagaagggagaaugaacuauuacuggacacuaguagagccgggagacaaaauaacauucgaagcaacuggaaaucuagugguaccgagauaugcauucgcaauggaaagaaaugcuggaucugguauuaucauuucagauacaccaguccacgauugcaauacaacuugucagacacccaagggugcuauaaauaccagccucccauuucagaauauacauccgaucacaauuggaaaauguccaaaauauguaaaaagcacaaaauugagacuggccacaggauugaggaaugucccgucuauucaaucuagaggccuauuuggggccauugccgguuucauugaagggggguggacagggaugguagauggaugguacgguuaucaccaucaaaaugagcaggggucaggauaugcagccgaccuaaagagcacacagaaugccauugacgagauuacuaacaaaguaaauucuguuauugaaaagaugaauacacaauucacagcaguagguaaagaguucaaccaccuggaaaaaagaauagagaauuuaaauaaaaaaauugaugaugguuuccuggacauuuggacuuacaaugccgaacuguugguucuauuggaaaaugaaagaacuuuggacuaucacgauucaaaugugaagaacuuauaugaaaagguaagaagccaguuaaaaaacaaugccaaggaaauuggaaacggcugcuuugaauuuuaccacaaaugcgauaacacgugcauggaaagugucaaaaaugggacuuaugacuacccaaaauacucagaggaagcaaaauuaaacagagaagaaauagaugggguaaagcuggaaucaacaaggauuuaccagauuuuggcuaucuauucaacugucgccaguucauugguacugguagucucccugggggcaaucaguuucuggaugugcucuaaugggucucuacaguguagaauauguauuuaa

SEQ ID NO: 40468 - RNA, 1701 nt, Artificial Sequence
  derived and/or modified CDS sequence (wt) from hemagglutinin__InfluenzaA__AFG31536
augaaggcaauacuaguaguucugcuauauacauuugcaaccgcaaaugcagacacauuauguauagguuaucaugcgaacaauucaacagacacuguagacacaguacuagaaaagaauguaacaguaacacacucuguuaaccuucuagaagacaagcauaacgggaaacuaugcaaacuaagagggguagccccauugcauuuggguaaauguaacauugcuggcuggauccugggaaauccagagugugaaucacucuccacagcaagcucaugguccuacauuguggaaacaucuaguucagacaauggaacguguuacccaggagauuucaucgauuaugaggagcuaagagagcaauugagcucagugucaucauuugaaagguuugagauauuccccaagacaaguucauggcccaaucaugacucgaacaaagguguaacggcagcauguccucaugcuggagcaaaaagcuucuacaaaaauuuaauauggcuaguuaaaaaaggaaauucauacccaaagcucagcaaauccuacauuaaugauaaagggaaagaaguccucgugcuauggggcauucaccauccaucuacuagugcugaccaacaaagucucuaucagaaugcagaugcauauguuuuuguggggacaucaagauacagcaagaaguucaagccggaaauagcaauaagacccaaagugagggaucaagaagggagaaugaacuauuacuggacacuaguagagccgggagacaaaauaacauucgaagcaacuggaaaucuagugguaccgagauaugcauucgcaauggaaagaaaugcuggaucugguauuaucauuucagauacaccaguccacgauugcaauacaacuugucagacacccaagggugcuauaaacaccagccucccauuucagaauauacauccgaucacaauuggaaaauguccaaaauauguaaaaagcacaaaauugagacuggccacaggauugaggaaugucccgucuauucaaucuagaggccuauuuggggccauugccgguuucauugaagggggguggacagggaugguagauggaugguacgguuaucaccaucaaaaugagcaggggucaggauaugcagccgaccugaagagcacacagaaugccauugacgagauuacuaacaaaguaaauucuguuauugaaaagaugaauacacaguucacagcaguagguaaagaguucaaccaccuggaaaaaagaauagagaauuuaaauaaaaaaguugaugaugguuuccuggacauuuggacuuacaaugccgaacuguugguucuauuggaaaaugaaagaacuuuggacuaccacgauucaaaugugaagaacuuauaugaaaagguaagaagccaguuaaaaaacaaugccaaggaaauuggaaacggcugcuuugaauuuuaccacaaaugcgauaacacaugcauggaaagugucaaaaaugggacuuaugacuacccaaaauacucagaggaagcaaaauuaaacagagaagaaauagaugggguaaagcuggaaucaacaaggauuuaccagauuuuggcgaucuauucaacugucgccaguucauugguacugguagucucccugggggcaaucaguuucuggaugugcucuaaugggucucuacaguguagaauauguauuuaa

SEQ ID NO: 40469 - RNA, 1701 nt, Artificial Sequence; identical to SEQ ID NO: 39118
  derived and/or modified CDS sequence (wt) from hemagglutinin__InfluenzaA__AFG31546

SEQ ID NO: 40470 - RNA, 1701 nt, Artificial Sequence; identical to SEQ ID NO: 39118
  derived and/or modified CDS sequence (wt) from hemagglutinin__InfluenzaA__AFG31556

SEQ ID NO: 40471 - RNA, 1701 nt, Artificial Sequence; identical to SEQ ID NO: 36261
  derived and/or modified CDS sequence (wt) from hemagglutinin__InfluenzaA__AFG31566

SEQ ID NO: 40472 - RNA, 1701 nt, Artificial Sequence; identical to SEQ ID NO: 36785
  derived and/or modified CDS sequence (wt) from hemagglutinin__InfluenzaA__AFG31586

SEQ ID NO: 40473 - RNA, 1701 nt, Artificial Sequence; identical to SEQ ID NO: 36785
  derived and/or modified CDS sequence (wt) from hemagglutinin__InfluenzaA__AFG31596

SEQ ID NO: 40474 - RNA, 1701 nt, Artificial Sequence; identical to SEQ ID NO: 36785
  derived and/or modified CDS sequence (wt) from hemagglutinin__InfluenzaA__AFG31606

SEQ ID NO: 40475 - RNA, 1701 nt, Artificial Sequence; identical to SEQ ID NO: 36785
  derived and/or modified CDS sequence (wt) from hemagglutinin__InfluenzaA__AFG31616

SEQ ID NO: 40476 - RNA, 1701 nt, Artificial Sequence; identical to SEQ ID NO: 36785
  derived and/or modified CDS sequence (wt) from hemagglutinin__InfluenzaA__AFG31626

SEQ ID NO: 40477 - RNA, 1701 nt, Artificial Sequence; identical to SEQ ID NO: 36261
  derived and/or modified CDS sequence (wt) from hemagglutinin__InfluenzaA__AFG31636

SEQ ID NO: 40478 - RNA, 1701 nt, Artificial Sequence
  derived and/or modified CDS sequence (wt) from hemagglutinin__InfluenzaA__AFG31646
augaaggcaauacuaguaguucugcuauauacauuugcaaccgcaaaugcagacacauuauguauagguuaucaugcgaacaauucaacagacacuguagacacaguacuagaaaagaauguaacaguaacacacucuguuaaccuucuagaagacaagcauaacgggaaacuaugcaaacuaagagggguagccccauugcauuuggguaaauguaacauugcuggcuggauccugggaaauccagagugugaaucacucuccacagcaagcucaugguccuacauuguggaaacaucuaguucagacaauggaacguguuacccaggagauuucaucgauuaugaggagcuaagagagcaauugagcucagugucaucauuugaaagguuugagauauuccccaagacaaguucauggcccaaucaugacucgaacaaagguguaacggcagcauguccucaugcuggagcaaaaagcuucuacaaaaauuuaauauggcuaguuaaaaaaggaaauucauacccaaagcucagcaaauccuacauuaaugauaaagggaaagaaguccucgugcuauggggcauucaccauccaucuacuagugcugaccaacaaagucucuaucagaaugcagaugcauauguuuuuguggggacaucaagauacagcaagaaguucaagccggaaauagcaauaagacccaaagugagggaucaagaagggagaaugaacuauuacuggacacuaguagagccgggagacaaaauaacauucgaagcaacuggaaaucuagugguaccgagauaugcauucgcaauggaaagaaaugcuggaucugguauuaucauuucagauacaccaguccacgauugcaauacaacuugucagacacccaagggugcuauaaacaccagccucccauuucagaauauacauccgaucacaauuggaaaauguccaaaauauguaaaaagcacaaaauugagacuggccacaggauugaggaaugucccuucuauucaaucuagaggccuauuuggggccauugccgguuucauugaagggggguggacagggaugguagauggaugguacgguuaucaccaucaaaaugagcaggggucaggauaugcagccgaccugaagagcacacagaaugccauugacgagauuacuaacaaaguaaauucuguuauugaaaagaugaauacacaguucacagcaguagguaaagaguucaaccaccuggaaaaaagaauagagaauuuaaauaaaaaaguugaugaugguuuccuagacauuuggacuuacaaugccgaacuguugguucuauuggaaaaugaaagaacuuuggacuaccacgauucaaaugugaagaacuuauaugaaaagguaagaagccaguuaaaaaacaaugccaaggaaauuggaaacggcugcuuugaauuuuaccacaaaugcgauaacacgugcauggaaagugucaaaaaugggacuuaugacuacccaaaauacucagaggaagcaaaauuaaacagagaagaaauagaugggguaaagcuggaaucaacaaggauuuaccagauuuuggcgaucuauucaacugucgccaguucauugguacugguagucucccugggggcaaucaguuucuggaugugcucuaaugggucucuacaguguagaauauguauuuaa

SEQ ID NO: 40479 - RNA, 1701 nt, Artificial Sequence
  derived and/or modified CDS sequence (wt) from hemagglutinin__InfluenzaA__AFG31656
augaaggcaauacuaguaguucugcuauauacauuugcaaccgcaaaugcagacacauuauguauagguuaucaugcgaacaauucaacagacacuguagacacaguacuagaaaagaauguaacaguaacacacucuguuaaccuucuagaagacaagcauaacgggaaacuaugcaaacuaagagggguagccccauugcauuuggguaaauguaacauugcuggcuggauccugggaaauccagagugugaaucacucuccacagcaagcucaugguccuacauuguggaaacaucuaguucagacaauggaacguguuacccaggagauuucaucgauuaugaggagcuaagagagcaauugagcucagugucaucauuugaaagguuugagauauuccccaagacaaguucauggcccaaucaugacucgaacaaagguguaacggcagcauguccucaugcuggagcaaaaagcuucuacaaaaauuuaauauggcuaguuaaaaaaggaaauucauacccaaagcucagcaaauccuacauuaaugauaaagggaaagaaguccucgugcuauggggcauucaccauccaucuacuagugcugaccaacaaagucucuaucagaaugcagaugcauauguuuuuguggggacaucaagauacagcaagaaguucaagccggaaauagcaauaagacccaaagugagggaucaagaagggagaaugaacuauuacuggacacuaguagagccgggagacaaaauaacauucgaagcaacuggaaaucuagugguaccgagauaugcauucgcaauggaaagaaaugcuggaucugguauuaucauuucagauacaccaguccacgauugcaauacaacuugucagacacccaagggugcuauaaacaccagccucccauuucagaauauacauccgaucacaauuggaaaauguccaaaauauguaaaaagcacaaaauugagacuggccacaggauugaggaaugucccgucuauucaaucuagaggccuauuuggggccauugccgguuucauugaagggggguggacagggaugguagauggaugguacgguuaucaccaucaaaaugagcaggggucaggauaugcagccgaccugaagaguacacagaaugccauugacaagauuacuaacaaaguaaauucuguuauugaaaagaugaauacacaguucacagcaguagguaaagaguucaaccaccuggaaaaaagaauagagaauuuaaauaaaaaaguugaugaugguuuccuggacauuuggacuuacaaugccgaacuguugguucuauuggaaaaugaaagaacuuuggacuaccacgauucaaaugugaagaacuuauaugaaaagguaagaagccaguuaaaaaacaaugccaaggaaauuggaaacggcugcuuugaauuuuaccacaaaugcgauaacacgugcauggaaagugucaaaaaugggacuuaugacuacccaaaauacucagaggaagcaaaauuaaacagagaagaaauagaugggguaaagcuggaaucaacaaggauuuaccagauuuuggcgaucuauucaacugucgccaguucauugguacugguagucucccugggggcaaucaguuucuggaugugcucuaaugggucucuacaguguagaauauguauuuaa

SEQ ID NO: 40480 - RNA, 1701 nt, Artificial Sequence
  derived and/or modified CDS sequence (wt) from hemagglutinin__InfluenzaA__AFG31666
augaaggcaauacuaguaguucugcuauauacauuugcaacugcaaaugcagacacauuauguauagguuaucaugcgaacaauucaacagacacuguagacacaguacuagaaaagaauguaacaguaacacacucuguuaaccuucuagaagacaagcauaacgggaaacuaugcaaacuaagagggguagccccauugcauuuggguaaauguaacauugcuggcuggauccugggaaauccagagugugaaucacucuccacagcaagcucaugguccuacauuguggaaacaucuaguucagacaauggaacguguuacccaggagauuucaucgauuaugaggagcuaagagagcaauugagcucagugucaucauuugaaagguuugagauauuccccaagacaaguucauggcccaaucaugacucgaacaaagguguaacggcagcauguccucaugcuggagcaaaaagcuucuacaaaaauuuaauauggcuaguuaaaaaaggaaauucauacccaaagcucagcaaauccuacauuaaugauaaagggaaagaaguccucgugcuauggggcauucaccauccaucuacuagugcugaccaacaaagucucuaucagaaugcagaugcauauguuuuuguggggacaucaagauacagcaagaaguucaagccggaaauagcaauaagacccaaagugagggaucaagaagggagaaugaacuauuacuggacacuaguagagccgggagacaaaauaacauucgaagcaacuggaaaucuagugguaccgagauaugcauucgcaauggaaagaaaugcuggaucugguauuaucauuucagauacaccaguccacgauugcaauacaacuugucagacacccaagggugcuauaaacaccagccucccauuucagaauauacauccgaucacaauuggaaaauguccaaaauauguaaaaagcacaaaauugagacuggccacaggauugaggaaugucccgucuauucaaucuagaggccuauuuggggccauugccgguuucauugaagggggguggacagggaugguagauggaugguacgguuaucaccaucaaaaugagcaggggucaggauaugcagccgaccugaagaguacacagaaugccauugacaagauuacuaacaaaguaaauucuguuauugaaaagaugaauacacaguucacagcaguagguaaagaguucaaccaccuggaaaaaagaauagagaauuuaaauaaaaaaguugaugaugguuuccuggacauuuggacuuacaaugccgaacuguugguucuauuggaaaaugaaagaacuuuggacuaccacgauucaaaugugaagaacuuauaugaaaagguaagaagccaguuaaaaaacaaugccaaggaaauuggaaacggcugcuuugaauuuuaccacaaaugcgauaacacgugcauggaaagugucaaaaaugggacuuaugacuacccaaaauacucagaggaagcaaaauuaaacagagaagaaauagaugggguaaagcuggaaucaacaaggauuuaccagauuuuggcgaucuauucaacugucgccaguucauugguacugguagucucccugggggcaaucaguuucuggaugugcucuaaugggucucuacaguguagaauauguauuuaa

SEQ ID NO: 40481 - RNA, 1701 nt, Artificial Sequence
  derived and/or modified CDS sequence (wt) from hemagglutinin__InfluenzaA__AFG71865
augaagaccaucauugcuuugagcuacauuuucugucuggcucucggccaagaccuuccaggaaaugacaacagcacagcaacgcugugccugggacaucaugcggugccaaacggaacacuagugaaaacaaucacaaaugaucagauugaagugacuaaugcuacugagcuaguucagagcuccucaacggggaaaauaugcaacaauccucaucgaauccuugauggaauagacugcacacugauagaugcucuauugggggacccucauugugauguuuuucaaaaugagacaugggaccuuuucguugaacgcagcaaagcuuucagcaacuguuacccuuaugaugugccagauuaugccucccuuaggucacuaguugccucgucaggcacucuggaguuuaucacugaggguuucacuuggacuggggucacucagaaugggggaagcaaugcuugcaaaaggggaccugguaucgguuuuuucaguagacugaacugguugaccaaaucaggaagcacauauccagugcugaacgugacuaugccaaacaaugacaauuuugacaaacuauacauuugggggguucaccacccgagcacgaaccaagaacaaaccagccuguauguucaagcaucagggagagucacagucucuaccaggagaagccagcaaacuauaaucccgaauaucggguccagacccuggguaaggggucugucuaguagaauaagcaucuauuggacaauaguuaagccgggagacguacugguaauuaauaguaaugggaaccuaaucgcaccucgggguuauuucaaaaugcgcacugggaaaagcucaauaaugaggucagaugcaccuauugauaccuguauuucugaaugcaucacuccaaauggaagcauucccaaugacaagcccuuucaaaacguaaacaagaucacauauggagcaugccccaaguauguuaagcaaaacacccugaaguuggcaacagggaugcggaauguaccagagaaacaaacuagaggccuauucggugcaauagcagguuucauagaaaaugguugggagggaaugauagacgguugguacgguuucaggcaucaaaauucugagggcacaggacaagcagcagaucuuaaaagcacucaagcagccaucgaccaaaucaaugggaaauugaacaggguaaucgagaagacgaacgagaaauuccaucaaaucgaaaaggaauucucagaaguagaagggagaauucaggaccucgagaaauacguugaagacacuaaaauagaucucuggucuuacaaugcggaacuucuugucgcucuggagaaucaacauacaauugaccugacugacucggaaaugaacaagcuguuugaaaaaacaaggaggcaacugagggaaaaugcugaagacaugggcaaugguugcuucaaaauauaccacaaaugugacaacgcuugcauagagucaaucagaaaugggacuuaugaccaugauguauacagagacgaagcauuaaacaaccgguuucagaucaaagguguugaacugaagucuggauacaaagacuggauccuguggauuuccuuugccauaucaugcuuuuugcuuuguguuguuuugcugggguucaucaugugggccugccagagaggcaacauuaggugcaacauuugcauuuga

SEQ ID NO: 40482 - RNA, 1701 nt, Artificial Sequence
  derived and/or modified CDS sequence (wt) from hemagglutinin__InfluenzaA__AFG71876
augaagaccaucauugcuuugagcuacauuuucugucuggcucucggccaagaccuuccaggaaaugacaacagcacagcaacgcugugccugggacaucaugcggugccaaacggaacacuagugaaaacaaucacagaugaucagauugaagugacuaaugcuacugagcuaguucagagcuccucaacggggaaaauaugcaacaauccucaucgaauccuugauggaauaaacugcacacugauagaugcucuauugggggacccucauugugauguuuuucaagaugagacaugggaccuuuucguugaacgcagcaaagcuuucagcaacuguuacccuuaugaugugccagauuaugccucccuuaggucacuaguugccucgucaggcacucuggaguuuaucacugaggguuucacuuggacuggggucacucagaaugggggaagcaaugcuugcaaaaggggaccugguagcgguuuuuucaguagacugaacugguugaccaaaucaggaagcacauauccagugcugaacgugacuaugccaaacaaugacaauuuugacaaacuauacauuugggggguucaccacccgagcacgaaccaagaacaaaccagccuguauguucaagcaucagggagagucacagucucuaccaggagaagccagcaaacuauaaucccgaauaucggguccagacccuggguaaggggucugucuaguagaauaagcaucuauuggacaauaguuaagccgggagacguacugguaauuaauaguaaugggaaccuaaucgcuccucgggguuauuucaaaaugcgcacugggaaaagcucaauaaugaggucagaugcaccuauugauaccuguauuucugaaugcaucacuccaaauggaagcauucccaaugacaagcccuuucaaaacguaaacaagaucacauauggagcaugccccaaguauguuaagcaaaacacccugaaguuggcaacagggaugcggaauguaccagagaaacaaacuagaggccuauucggcgcaauagcaggcuucauagaaaaugguugggagggaaugauagacgguugguacgguuucaggcaucaaaauucugagggcacaggacaagcagcagaucuuaaaagcacucaagcagccaucgaccaaaucaaugggaaauugaacaggguaaucgagaagacgaacgagaaauuccaucaaaucgaaaaggaauucucagaaguagaagggagaauucaggaccucgagaaauacguugaagacacuaaaauagaucucuggucuuacaaugcggagcuucuugucgcucuggagaaucaacauacaauugaccugacugacucggaaaugaacaagcuguuugaaaaaacaaggaggcaacugagggaaaaugcugaagacaugggcaaugguugcuucaaaauauaccacaaaugugacaacgcuugcauagagucaaucagaaaugggacuuaugaccaugauguauacagagacgaagcauuaaacaaccgguuucagaucaaagguguugaacugaagucuggauacaaagacuggauccuguggauuuccuuugccauaucaugcuuuuugcuuuguguuguuuugcugggguucaucaugugggccugccagagaggcaacauuaggugcaacauuugcauuuga

SEQ ID NO: 40483 - RNA, 1701 nt, Artificial Sequence
  derived and/or modified CDS sequence (wt) from hemagglutinin__InfluenzaA__AFG71898
augaagaccaucauugcuuugagcuaccuuuucugucuggcuuucggccaagaccuuccaggaaaugacaacagcacagcaacgcugugccugggacaucaugcggugccaaacggaacacuagugaaaacaaucacagaugaucagauugaagugacuaaugcuacugagcuaguucagagcuccucaacggggaaaauaugcaacaauccucaucgaauccuugauggaauagacugcacacugauagaugcucuauugggggacccucauugugauguuuuccaaaaugagacaugggaccuuuucguugaacgcagcaaagcuuucagcaacuguuacccuuaugauguaccagauuaugccucccuuaggucacuaguugccucgucaggcacucuggaguuuaccacugaggguuucacuuggacuggggucacucagaaugggggaagcaaugcuugcaaaaggggaccugguagcgguuuuuucaguagacugaacugguugaccaaaucaggaagcacauauccagugcugaacgugacuaugucaaacaaugacaauuuugacaaacuauacauuugggggguucaccacccgagcacgaaccaagaacaaaccagccuguauguucaagcaucagggagagucacagucucuaccaggagaagccagcaaacuauaaucccgaauaucggguccagacccuggguaaggggucugucuaguagaauaagcaucuauuggacaauaguuaagccgggagacguacugguaauuaauaguaaugggaaccuaaucgcuccucgggguuauuucaaaaugcgcacugggaaaagcucaauaaugaggucagaugcaccuauugauaccuguguuucugaaugcaucacuccaaauggaagcauucccaaugacaagcccuuucaaaacguaaacaagaucacauauggagcaugccccaaguauguuaagcaaaacacccugaaguuggcaacagggaugcggaauguaccagagaaacaaacuagaggccuauucggcgcaauagcagguuucauagaaaaugguugggagggaaugauagacgguugguacgguuucaggcaucaaaauucugagggcacaggacaagcagcagaucuuaaaagcacucaagcagccaucgaccaaaucaaugggaaauugaacaggguaaucgagaagacgaacgagaaauuccaucaaaucgaaaaggaauucucagaaguagaagggagaauucaggaccucgagaaauacguugaagacacuaaaauagaucucuggucuuacaaugcggagcuucuugucgcucuggagaaucaacauacaauugaccugacugacucggaaaugaacaagcuguuugaaaaaacaaggaggcaacugagggaaaaugcugaagacaugggcaaugguugcuucaaaauauaccacaaaugugacaacgcuugcauagagucaaucagaaaugggacuuaugaccaugauguauacagagacgaagcauuaaacaaccgguuucagaucaaagguguugaacugaagucuggauacaaagacuggauccuguggauuuccuuugccauaucaugcuuuuugcuuuguguuguuuugcugggguucaucaugugggccugccagagaggcaacauuaggugcaacauuugcauuuga

SEQ ID NO: 40484 - RNA, 1701 nt, Artificial Sequence
  derived and/or modified CDS sequence (wt) from hemagglutinin__InfluenzaA__AFG71920
augaagaccaucauugcuuugagcuacauuuucugucuggcucucggccaagaccuuccaggaaaugacaacaguacagcaacgcugugccugggacaucaugcggugccaaacggaacacuagugaaaacaaucacaaaugaucagauugaagugacuaaugcuacugagcuaguucagagcuccucaacggggaaaauaugcaacaauccucaucgaauccuugauggaauaaacugcacacugauagacgcucuauugggggacccucauugugauguuuuccaagaugagacaugggaccuuuucguugaacgcagcaaagcuuucagcaacuguuacccuuaugaugugccagauuaugccucccuuaggucacuaauugccucgucaggcacucuggaguuuaucacugaggguuucacuuggacuggggucacucagaaugggggaagcaaugcuugcaaaaggggaccugguagcgguuuuuucaguagacugaacugguugaccaaaucaggaagcacauauccagugcugaacgugacuaugccaaacaaugacaauuuugacaaacuauacauuugggggguucaccacccgagcacgaaccaagaacaaaccagccuguauguucaagcaucagggagagucacagucucuaccaggagaagccagcaaacuauaaucccgaauaucggguccagacccuggguaaggggucugucuaguagaauaagcaucuauuggacaauaguuaaaccgggagacguacugguaauuaauaguaaugggaaccuaaucgcuccucgggguuauuucaaaaugcgcacugggaaaagcucaauaaugaggucagaugcaccuauugauaccuguauuucugaaugcaucacuccaaauggaagcauucccaaugacaagcccuuucaaaacguaaacaagaucacauauggagcaugccccaaguauguuaagcaaaacacccugaaauuggcaacagggaugcggaauguaccagagaaacaaacuagaggccuauucggcgcaauagcaggcuucauagaaaaugguugggagggaaugauagacgguugguacgguuucaggcaucaaaauucugagggcacaggacaagcagcagaucuuaaaagcacucaagcagccaucgaccaaaucaaugggaaauugaacaggguaaucgagaagacgaacgagaaauuccaucaaaucgaaaaggaauucucugaaguagaagggagaauucaggaccucgagaaauacguugaagacacuaaaauagaucucuggucuuacaaugcagagcuucuugucgcucuggagaaucaacauacaauugaccugacugacucggaaaugaacaagcuguuugaaaaaacaaggaggcaacugagggaaaaugcugaagacaugggcaaugguugcuucaaaauauaccacaaaugugacaacgcuugcauagagucaaucagaaaugggacuuaugaccaugauguauacagagacgaagcauuaaacaaccgguuucagaucaaagguguugaacugaagucuggauacaaagacuggauccuguggauuuccuuugccauaucaugcuuuuugcuuuguguuguuuugcugggguucaucaugugggccugccagagaggcaacauuaggugcaacauuugcauuuga

SEQ ID NO: 40485 - RNA, 1701 nt, Artificial Sequence
  derived and/or modified CDS sequence (wt) from hemagglutinin__InfluenzaA__AFG71931
augaagaccaucauugcuuugagcuacauuuucugucugguuaucggccaagaccuuccaggaaaugaaaacagcacagcaacgcugugccugggacaucaugcagugccaaacggaacacuagugaaaacaaucacaaaugaucagauugaagugacuaaugcuacugagcuaguucagagcuccucaacggggaaaauaugcaacaauccucaucgaauccuugauggaauagacugcacacugauagaugcucuauugggggacccucauugugaugguuuucaaaaugagacaugggaccuuuucguugaacgcagcaaagcuuucagcaacuguuacccuuaugaugugccagauuaugccucccuuaggucacuaguugccucgucaggcacucuggaguuuaucacugaggguuucacuuggacuggggucacucagaaugggggaagcaaugcuugcaaaaggggaccugguaucgguuuuuucaguagacugaacugguugaccaaaucaggaagcacauauccagugcugaacgugacuaugccaaacaaugacaauuuugacaaacuauacauuugggggguucaccacccgagcacgaaccaagaacaaaccagccuguauguucaagcaucagggagagucacagucucuaccaggagaagccagcaaacuauaaucccgaacaucgggucuagacccuggguaaggggucugucuaguagaauaagcaucuauuggacaauaguuaagccgggagacguacugguaauuaauaguaaugggaaccuaaucgcuccucgggguuauuucaaaaugcgcacugggaaaagcucaauaaugaggucagaugcaccuauugauaccuguauuucugaaugcaucacuccaaauggaagcauucccaaugacaagcccuuucaaaacguaaacaagaucacauauggagcaugccccaaguauguuaagcaaaacacccugaaguuggcaacagggaugcggaauguaccagagaaacaaacuagaggccuauucggcgcaauagcagguuucauagaaaaugguugggagggaaugauagacgguugguacgguuucaggcaucaaaauucugagggcacaggacaagcagcagaucuuaaaagcacucaagcagccaucgaccaaaucaaugggaaauugaauaggguaauugagaagacgaacgagaaauuccaucaaaucgaaaaggaauucucagaaguagaagggagaauucaggaccucgagaaauacguugaagacacuaaaauagaucucuggucuuacaaugcggagcuucuugucgcucuggagaaucaacauacaauugaucugacugacucggaaaugaacaagcuguuugaaaaaacaaggaggcaacugagggaaaaugcugaagacaugggcaaugguugcuucaaaauauaccacaaaugugacaacgcuugcauagagucaaucagaaaugggacuuaugaccaugauguauacagagacgaagcauuaaacaaccgguuucagaucaaagguguugaacugaagucuggauacaaagacuggauccuguggauuuccuuugccauaucauguuuuuugcuuuguguuguuuugcugggguucaucaugugggccugccagagaggcaacauuaggugcaacauuugcauuuga

SEQ ID NO: 40486 - RNA, 1701 nt, Artificial Sequence
  derived and/or modified CDS sequence (wt) from hemagglutinin__InfluenzaA__AFG71942
augaagaccaucauugcuuugagcuacauuuucuaucuggcucucagccaagaccuuccaggaaaugacaacagcaaagcaacgcugugccugggacaucaugcggugccaaacggaacacuagugaaaacaaucacagaugaucagacugaagugacuaaugcuacugagcuaguucagagcuccucaacggggaaaauaugcaacaauccucaucgaauccuugauggaauggacugcacacugauagaugcucuauugggggacccucauugugauguuuuucaaaaugagacaugggaccuuuucguugaacgcagcaaagcuuucagcaacuguuacccuuaugaugugccagauuaugccucccuuagaucacuaguugccucgucaggcacucuggaguuuauuacugaggguuucacuuggacugaggucacucagaaugggggaagcauugcuugcaaaaggggaccugauagcgguuuuuucaguagacugaacugguugaccaaaucaggaagaacauauccagugcugaacgugacuaugccaaacaaugacaauuuugacaaacuauacauuugggggguucaccacccgagcacggaccaagaacaaaccaaccuguauguucaaacaucagggagagucacagucucuaccaggagaagccagcaaacuauaaucccgaauaucggauccagacccuggguaaggggucugucuaguagaauaagcaucuauuggacaauaguuaagccgggagacguacugguaauuaauaguaaugggaaccuaaucgcuccucgggguuauuucaaaaugcgcacugggaaaagcucaauaaugaggucagaugcaccuauugauaccuguauuucugaaugcaucacuccaaauggaagcauucccaaugauaaacccuuucaaaacguaaacaagaucacauauggagcaugccccaaauauguuaagcaaaacacccugaaguuggcaacaggaaugcggaauguaccagagaaacaaacuagaggccuauucggcgcaauagcaggcuucauagaaaaugguugggagggaaugauagacgguugguacgguuucaggcaucaaaauucugagggcacaggacaagcagcagaucuuaaaagcacucaagcagccauugaccaaaucaauggaaaauugaacaggauaaucgagaagacgaacgagaaauuccaucaaaucgaaaaggaauucucagaaguagaaggaagaauucaggaccucgagaaauacguugaagacacuaaaauagaucuauggucuuacaaugcagagcuucuugucgcucuggagaaucaacauacaauugaucugacugacucggaaaugaacaaacuguuugaaaaaacaagaaggcaacugagggaaaaugcugaagacaugggcaaugguugcuucaaaauauaccacaaaugugacaacgcuugcauagagucaaucagaaaugggacuuaugaccaugauguauacagagacgaagcauuaaacaacagguuucaaaucaaagguguugaacugaagucuggauacaaagacuggauccuguggauuuccuuugccauaucaugcuuuuugcuuuguguuguuuugcugggguucaucaugugggccugccagagaggcaacauuaggugcaacauuugcauuuga

SEQ ID NO: 40487 - RNA, 1701 nt, Artificial Sequence
  derived and/or modified CDS sequence (wt) from hemagglutinin__InfluenzaA__AFG71953
augaagaccaucauugcuuugagcuacauuuucugucugguucucggccaagaccuuccaggaaaugacaaaagcacagcaacgcugugccugggacaccaugcagugccaaacggaacacuagugaaaacaaucacaaaugaucagauugaagugacuaaugcuacugagcugguucagagcuccucaacggggaaaauaugcaacaauccucaucgaauccuugauggaauagacugcacacugauagaugcucuauugggggacccucauugugauggcuuucaaaaugagacaugggaccuuuucguugaacgcagcaaagcuuucagcaacuguuacccuuaugaugugccagauuaugccucccuuaggucacuaguugccucgucaggcacucuggaguuuaucacugaggguuucacuuggacuggggucacucagaaugggggaagcaaugcuugcaaaaggggaccugguagcgguuuuuucaguaggcugaacugguugaccaaaucaggaagcacauauccagugcugaacgugacuaugccaaacaaugacaauuuugacaaacuauacauuugggggguucaccacccgagcacgaaccaagaacaaaccagccuguauguacaagcaucagggagagucacagucuccaccaagagaagccagcaaacuauaaucccgaauaucgggucuagacccuggguaagggguccgucuagcagaauaagcaucuauuggacaacaguuaaaccgggagacauacugauaaucaauaguaaugggaaccuaauugcuccucgggguuauuucaaaaugcgaacugggaaaagcucaauaaugaggucagaugcaccuauuggugccuguauuucugaaugcaucacuccaaauggaagcauucccaaugacaagcccuuucaaaauguaaacaagaucacauauggggcaugccccaaguauguuaagcaaaacacccugaaguuggcaacagggaugcggaauguaccagagaaacaaacuagaggccuauucggagcaauagcagguuucauagaaaaugguugggagggaaugauagacgguugguacgguuucaggcaucaaaauucugagggcacaggacaagcagcagaucuuaaaagcacucaagcagccaucgaccaaaucaaugggaaacugaauaggguaaucgagaagacgaacgagaaauuccaucaaaucgaaaaggaauucucagaaguagaagggagaauucaggaccucgagaaauacguugaagacacuaaaauagaucucuggucuuacaaugcggagcuucuugucgcucuggagaaucaacauacaauugaccugacugacucggaaaugaacaagcuguuugaaaaaacaaggaggcaacugagggaaaaugcugaagacaugggcaaugguugcuucaaaauauaccacaaaugugacaacgcuugcauagggucaaucagaaaugggacuuaugaccaugauguauacagagacgaagcauuaaacaaccgguuucagaucaaagguguugaacugaagucaggauacaaagacuggauccuguggauuuccuuugccauaucaugcuuuuugcuuuguguuguuuugcugggggucaucaugugggccugccagaaaggcaacauuaggugcaacauuugcauuuga

SEQ ID NO: 40488 - RNA, 1701 nt, Artificial Sequence
  derived and/or modified CDS sequence (wt) from hemagglutinin__InfluenzaA__AFG71975
augaagacuaucauugcuuugagcuacauuuucugucugguucucggccaagauuuuccaggaaaugacaacagcacagcaacgcugugccugggacaucaugcggugccaaacggaacacuagugaaaacaaucacaaaugaucagauugaagugacuaaugcuacugagcugguucagaguuccucaacggggaaaauaugcaacaauccucaucgaauccuugauggaauagacugcacacugauagaugcucuauugggggacccucauugugauggcuuucaaaaugagacaugggaccuuuucguugaacgcagcaaagcuuucagcaacuguuacccuuaugaugugccagauuaugccucccuuaggucacuaguugccucgucaggcacucuggaguuuaucaaugaaggcuucacuuggacuggggucacucagaaugggggaagcaaugcuugcaaaaggggaccugauagcgguuuuuucaguagacugaacugguuguacaaaucaggaagcacauauccagugcugaacgugacuaugccaaacaaugacaauuuugacaaacuauacauuugggggguucaccacccgagcacggaccaagaacaaaccagccuauauguucaagcaucagggagagucacagucucuaccaagagaagccagcaaacuauaaucccgaauaucggaucuagacccuggguaaggggucugucuaguagaauaagcaucuauuggacaauaguuaaaccaggagacauacugguaauuaauaguaaugggaaccuaauugcuccucgggguuauuucaaaaugcgcacugggaaaagcucaauaaugaggucagaugcaccuauuggcaccugcauuucugaaugcaucacuccaaauggaagcauucccaaugacaagcccuuucaaaacguaaacaagaucacauauggggcaugucccaaguauguuaagcaaaacacucugaaguuggcaacagggaugcgaaauguaccagagaaacaaacuagaggccuauucggcgcaauagcagguuucauagaaaaugguugggagggaaugauagacgguugguacgguuucaggcaucaaaauucugagggcacaggacaagcagcagaucuuaaaagcacucaagcagccaucgaccaaaucaaugggaaacugaauaggguaaucgagaagacgaacgagaaauuccaucaaaucgaaaaggaauucucagaaguagaagggagaauucaggaccucgagaaauacguugaagacacuaaaauagaucucuggucuuacaaugcggagcuucuugucgcucuggagaaccaacauacaauugaucugacugacucggaaaugaacaaacuguuugaaaaaacaaggaggcaacugagggaaaaugcugaggacaugggcaaugguugcuucaaaauauaccacaaaugugacaaugcuugcauagggucaaucagaaaugggacuuaugaccaugauguauacagagacgaagcauuaaacaaccgguuucagaucaaagguguugaacugaagucaggauacaaagacuggauccuguggauuuccuuugccauaucaugcuuuuugcuuuguguuguuuugcugggguucaucaugugggccugccagaaaggcaacauuaggugcaacauuugcauuuga

SEQ ID NO: 40489 - RNA, 1701 nt, Artificial Sequence
  derived and/or modified CDS sequence (wt) from hemagglutinin__InfluenzaA__AFG71996
augaagacuaucauugcuuugagcuacauuuucugucugguucucggccaaaacuuuccaggaaaugacaacagcacagcaacgcugugccugggacaucaugcggugccaaacggaacacuagugaaaacaaucacaaaugaucagauugaagugacuaaugccacugagcugguucagaguuccucaacgggaaaaauaugcaacaauccucaucgaauccuugauggaauagacugcacacugauagaugcucuauugggggacccucauugugauggcuuucaaaaugagacaugggaccuuuucguugaacgcagcaaagcuuucagcaacuguuacccuuaugaugugccagauuaugccucccuuaggucacuaguugccucgucaggcacucuggaguuuaucaaugaaggcuucacuuggacuggggucacucagaaugggggaagcaaugcuugcaaaaggggaccugauaucgguuuuuucaguagacugaacugguuguacaaaucaggaaacacauauccagugcugaacgugaguaugccaaacaaugacaauuuugacaaacuauacauuugggggguucaccacccgagcacggaccaagaacaaaccagccuauauguucaagcaucagggagagucacagucuccaccaagagaagccagcaaacuauaaucccgaauaucgggucuagacccuggguaaggggucugucuaguagaauaagcaucuauuggacaauaguuaaaccgggagacauacugguaauuaauagcaaugggaacuuaauugcuccucgggguuacuucaaaaugcgcacuggaaaaagcucaauaaugaggucagaugcaucuauuggcaccugcauuucugaaugcaucacuccaaauggaagcauucccaaugacaagcccuuucaaaacguaaacaagaucacauauggggcaugucccaaguauguuaagcaaaacacccugaaguuggcaacagggaugcggaauguaccagagaaacaaacuagaggcauauucggcgcaauagcagguuucauagaaaaugguugggagggaaugauagacgguugguacgguuucaggcaucaaaauucugagggcacaggacaagcagcagaucuuaaaagcacucaagcagccaucgaccaaaucaaugggaaacugaauaggauaaucgagaagacgaacgagaaauuccaucaaaucgaaaaggaauucucagaaguagaagggagaauucaggaccucgagaaauacguugaagacacuaaaauagaucucuggucuuacaaugcggagcuucuugucgcucuggagaaccaacauacaauugaucugacugacucggaaaugaacaaacuguuugaaaaaacaaggaggcaacugagggaaaaugcugaggacaugggcaaugguugcuucaaaauauaccacaaaugugacaaugcuugcauagggucaaucagaaaugggacuuaugaccaugauguauacagagacgaagcauuaaacaaccgguuucagaucaaagguguugaacugaagucaggauacaaagacuggauccuguggauuuccuuugccauaucaugcuuuuugcuuuguguuguuuugcuggguuucaucaugugggccugccagaaaggcaacauuaggugcaacauuugcauuuga

SEQ ID NO: 40490 - RNA, 1701 nt, Artificial Sequence
  derived and/or modified CDS sequence (wt) from hemagglutinin__InfluenzaA__AFG72007
augaagacuaucauugcuuugagcuacauuuucugucugguucucggccgagacuuuccaagaaaugacaacagcacagcaacgcugugccugggacaucaugcggugccaaauggaacacuagugaaaacaaucacaaaugaucagauugaagugacuaaugcuacugaacugguucagaguuccucaacggggaaaauaugcaauaauccucaucgaauccucgauggaauggacugcacacugauagaugcucuauugggggacccucauugugauggccuucaaaaugggacaugggaccuuuucguugaacgcagcaaagcuuucagcaacuguuacccuuaugaugugccagauuaugccucccuuaggucacuaguugccucgucuggcacucuggaguuuaucaaugaaggcuucacuuggacuggggucacucagaaugggggaagcaaugcuugcaaaaggggaccugauagcgguuuuuucaguagacugaacugguuguacaaaucaggaaacacauauccaguacugaacgugacuaugccaaacaaugacaauuuugacaaacuauacauuugggggguucaccacccgagcacggaccaagaccaaaccagccuauauguucaagcaucagggagagucacagucuccaccaagagaagccagcaaacuguaaucccgaauaucgggccuagacccuggguaaggggucugucuaguagaauaagcaucuauuggacaauaguuaaaccgggagacauacuguuaauuaauaguaauggaaaccuaauugcuccucgggguuauuucaaaaugcgcacugggaaaagcucaauaaugaggucagaugcaccuauuggcaccugcauuucugaaugcaucacuccaaauggaagcauucccaaugacaagcccuuucaaaacguaaacaagaucacauauggggcaugucccaaguauguuaagcaaaacacccugaaguuggcaacagggaugcggaauguaccagagaaacaaacuagaggcauauucggcgcaauagcagguuucauagaaaaugguugggagggaaugauagacgguugguacgguuucaggcaucaaaauucugagggcacagggcaagcagcagaucuuaaaagcacucaagcagccaucgaccaaaucaauggaaaacugaauaggguaaucgagaagacgaacgagaaauuccaucaaaucgaaaaggaguucucagaaguagaagggagaauucaggaccucgagaaauacguugaagacacuaaaauagaucucuggucuuacaaugcggagcuucuugucgcucuggagaaccaacauacaauugaucugacugacucggaaaugaacaaacuguuugaaaaaacaaggaggcaacugagggaaaaugcugaggacaugggcaaugguugcuucaaaauauaccacagaugugacaaugcuugcauagggucaaucagaaaugggacuuaugaccaugauguauacagagacgaagcauuaaacaaccgguuucagaucaaagguguugaacugaagucaggauacaaagacuggauccuguggauuuccuuugccauaucaugcuuuuugcuuuguguuguuuugcugggguucaucaugugggccugccaaaaaggcaacauuaggugcaacauuugcauuuga

SEQ ID NO: 40491 - RNA, 1701 nt, Artificial Sequence
  derived and/or modified CDS sequence (wt) from hemagglutinin__InfluenzaA__AFG72029
augaagacuaucauugcuuugagcuacauuuucugucugguuuucggccaaaaccuucccggaaaugacaacagcacagcaacgcugugccugggacaccaugcagugccaaacggaacgcuagugaaaacaaucacgaaugaucagauugaagugacuaaugcuacugagcugguucagaguuccucaacagguagaauaugcgacaguccucaccgaauccuugaugggaaaaacugcacacugauagaugcucuauugggagacccucauugugauggcuuucaaaaugagaaaugggaccuuuuuguugaacgcagcaaagcuuucagcaacuguuacccuuaugaugugccagauuaugccucccuuaggucacuaauugccucgucaggcacccuggaguuuaucaaugaaggcuucaauuggacuggagucacucagagugggggaagcuaugcuugcaaaaggggaucugauaacaguuucuucaguagacugaauugguuguacgaaucagaaagcaaauauccagugcugaacgugacuaugccaaacaauggcaauuuugacaaacuguacauuugggggguucaccacccgagcacggacaaagaacaaaccaaccuauauguucgagcaucagggagagucacagucucuaccaagagaagccagcagaccauaaucccgaauaucgggucuagacccuggguaaggggucugucuaguagaauaaguaucuauuggacaauaguaaaaccgggagacauacuguuaauuaauaguaaugggaaccuaauugcuccuagggguuacuucaaaauacgcacugggaaaagcucaauaaugaggucagaugcaccuauuggcaccugcaguucugaaugcaucacuccaaauggaagcauucccaaugacaagcccuuucaaaacguaaacaagaucacauauggggcaugucccaaguauguuaagcaaaacacucugaaguuggcaacagggaugcggaauguaccagagaaacaaacuagaggcauauucggcgcaauagcagguuucauagaaaaugguugggagggaaugguagacgguugguacgguuucaggcaucaaaauucugagggcacaggacaagcagcagaucuuaaaagcacucaagcagcaaucgaccaaaucaaugggaaacugaauaggguaaucgagaaaacgaacgagaaauuccaucaaaucgaaaaggaauucucagaaguagaagggagaauucaggaccucgagaaauacguugaagacacuaaaauagaucucuggucuuacaacgcggagcuucuugucgcucuggagaaccaacauacaauugaucugacugacucggaaaugaacaaacuguuugaaaaaacaaggaggcaacugagggaaaaugcugaggacaugggcaaugguugcuucaaaauauaccacaaaugugacaaugcuugcauagggucaaucagaaauggaacuuaugaccaugauguauacagagacgaagcauuaaacaaccgguuucagaucaaagguguugagcugaagucaggauacaaagacuggauccuguggauuuccuuugccauaucaugcuuuuugcuuuguguuguuuugcugggguucaucaugugggccugccaaaaaggcaacauuaggugcaacauuugcauuuaa

SEQ ID NO: 40492 - RNA, 1701 nt, Artificial Sequence
  derived and/or modified CDS sequence (wt) from hemagglutinin__InfluenzaA__AFG72040
augaagacuaucauugcuuugagcuacauuuucugucugguuuucgcccaaaaccuucccggaaaugacaacagcacagcaacgcugugccugggacaccaugcagugccaaacggaacgcuagugaaaacaaucacgaaugaucagauugaagugacuaaugcuacugagcugguucagaguuccucaacagguagaauaugcgacaguccucaccggauccuugaugggaaaaacugcacacugguagaugcucuauugggagacccucauugugauggcuuucaaaaugagaaaugggaccuuuuuguugaacgcagcaaagcuuucagcaacuguuacccuuaugaugugccagauuaugccucccuuaggucacuaguugccucgucaggcacccuggaguuuaucaaugaaagcuucaauuggacuggagucacucagagugggggaagcuaugcuugcaaaagaggaucugauaacaguuucuucaguagacugaauugguuguacgaaucagaaagcaaauauccagugcugaacgugacuaugccaaacaauggcaauuuugacaaacuguacauuugggggguucaccacccgagcacggacaaagaacaaaccaaccuauauguucgagcaucagggagagucacagucucuaccaagagaagccagcaaacuauaaucccgaauaucgggucuagacccuggguaaggggucugucuagcagaauaagcaucuauuggacaauaguaaaaccgggagacauacuguuaauuaauaguaaugggaaccuaauugcuccucgggguuacuucaaaauacgcacugggaaaagcucaauaaugaggucagaugcaccuauuggcaccugcaguucugaaugcaucacuccaaauggaagcauucccaaugacaagcccuuucaaaauguaaacaagaucacauauggggcaugucccaaguauguuaagcaaaacacucugaaguuggcaacagggaugcggaauguaccagagaaacaaacuagaggcauauucggcgcaauagcagguuucauagaaaaugguugggagggaaugguagacgguugguacgguuucaggcaucaaaauucugagggcacaggacaagccgcagaucuuaaaagcacucaagcagcaaucgaccaaaucaaugggaaacugaauaggguaaucgagaaaacgaacgagaaauuccaucaaaucgaaaaggaauucucagaaguagaagggagaauucaggaccucgagaaauacguugaaaacacuaaaauagaucucuggucuuacaacgcggagcuucuugucgcucuggagaaccaacauacaauugaucugacugacucggaaaugaacaaacuguuugaaaaaacaaggaggcaacugagggaaaaugcugaggacaugggcaauggcugcuucaaaauauaccacaaaugugacaaugcuugcauagggucaaucagaaauggaacuuaugaccaugauguauacagagacgaagcauuaaacaaccgguuucagaucaaagguguugagcugaagucaggauacaaagacuggauccuguggauuuccuuugccauaucaugcuuuuugcuuuguguuguuuugcugggguucaucaugugggccugccaaaaaggcaacauuaggugcaacauuugcauuuga

SEQ ID NO: 40493 - RNA, 1701 nt, Artificial Sequence
  derived and/or modified CDS sequence (wt) from hemagglutinin__InfluenzaA__AFG72051
augaagacuaucauugcuuuaagcuacauuuucugucugguuuucgcccaaaaccuucccggaaaugacaacagcacagcaacgcugugccugggacaccaugcagugccaaacggaacgcuagugaaaacaaucacgaaugaucagauugaagugacuaaugcuacugagcugguucagaguuccucaacagguagaauaugcgacaguccucaccgaauccuugaugggaaaaacugcacacugguagaugcucuauugggagacccucauugugauggcuuucaaaaugagaaaugggaccuuuuuguugaacgcagcaaagcuuucagcaacuguuacccuuaugaugugccagauuaugccucccuuaggucacuaguugccucgucaggcacccuggaguuuaucaaugaaagcuucaauuggacuggagucacucagagugggggaagcuaugcuugcaaaaggggaucugauaacaguuucuucaguagacugaauugguuguacgaaucagaaagcaaauauccagugcugaacgugacuaugccaaacaauggcaauuuugacaaacuguacauuugggggguucaccacccgagcacggacaaagaacaaaccaaccuauauguucgagcaucagggagagucacagucucuaccaagagaaaccagcaaacuguaaucccgaauaucgggucuagacccuggguaaggggucugucuagcagaauaagcaucuauuggacaauaguaaaaccgggagacauacugcuaauuaauaguaaugggaaccuaauugcuccucgggguuacuucaaaauacacaaugggaaaagcucaauaaugaggucagaugcaccuauuggcaccugcaguucugaaugcaucacuccaaauggaagcauucccaaugacaagcccuuucaaaauguaaacaagaucacauauggggcaugucccaaguacguuaagcaaaacacucugaaguuggcaacagggaugcggaauguaccagagaaacaaacuagaggcauauucggcgcaauagcagguuucauagaaaaugguugggagggaaugguagacgguugguacgguuucaggcaucgaaauucugagggcacaggacaagcagcagaucuuaaaagcacucaagcagcaaucgaccaaaucaaugggaaacugaauaggguaaucgagaaaacgaacgagaaauuccaucaaaucgaaaaggaauucucagaaguagaagggagaauucaggaccucgagaaauacguugaagacacuaaaauagaucucuggucuuacaacgcggagcuucuugucgcucuggagaaccaacauacaauugaucugacugacucggaaaugaacaaacuguuugaaaaaacaaggaggcaacugagggaaaaugcugaggacaugggcaaugguugcuucaaaauauaccacaaaugugacaaugcuugcauagggucaaucagaaauggaacuuaugaccaugauguauacagagacgaagcauuaaacaaccgguuucagaucaaagguguugagcugaagucaggauacaaagacuggauccuguggauuuccuuugccauaucaugcuucuugcuuuguguuguuuugcugggguucaucaugugggccugccaaaaaggcaacauuaggugcaacauuugcauuuga

SEQ ID NO: 40494 - RNA, 1701 nt, Artificial Sequence
  derived and/or modified CDS sequence (wt) from hemagglutinin__InfluenzaA__AFG72085
augaagacuaucauugcuuugagcuacauuuucugucugguuuucgcccaaaaacuucccggaaaugacaacagcacagcaacgcugugccugggacaucaugcagugccaaacggaacgcuagugaaaacaaucacgaaugaucagauugaagugacuaaugcuacugagcugguucagaguuccucaacagguagaauaugcgacaguccucaccgaauccuugauggaaaaaacugcacacugauagaugcucuauugggagacccucauugugauggcuuccaaaaugagaaaugggaccuuuuuguugaacgcagcaaagcuuacagcaacuguuacccuuaugaugugccggauuaugccucccuuaggucacuaguugccucaucaggcacccuggaguuuaucaaugaagacuucaauuggauuggagucacucagagugggggaagcugugcuugcaaaaggggaucuguuaacaguuucuucaguagauugaauugguugcacgaaucagaacaaaaauauccagcgcugaacgugacuaugccaaacaauggcaaauuugacaaauuguacauuugggggguucaccacccgagcacggacagagaacaaaccaaccuauauguucgagcaucagggagagucacagucucuaccaagagaagccagcaaacuguaaucccgaauaucgggucuagacccuggguaaggggucuguccaguagaauaagcaucuauuggacaauaguaaaaccgggagacauacuguugauuaauagcaucgggaaccuaauugcuccucgggguuacuucaaaauacgcacugggaaaagcucaauaaugaggucagaugcaccuauuggcaccugcaguucugaaugcaucacuccaaauggaagcauucccaaugacaaacccuuucaaaauguaaacaagaucacauauggggcaugucccagguauguuaagcaaaacacucugaaauuggcaacagggaugcggaauguaccagagaaacaaacuagaggcauauucggcgcaauagcagguuucauagaaaaugguugggagggaaugguagacgguugguacgguuucaggcaucaaaauucugagggcacaggacaagcagcagaucuuaaaagcacucaagcagcaaucgaccaaaucaacgggaaacugaauagguuaaucgagaaaacgaacgagaaauuccaucaaaucgaaaaggaauucucagaaguagaagggagaauucaggaccucgagaaauauguugaagacacuaaaauagaucucuggucuuacaacgcggagcuucuugucgcccuggagaaccaacauacaauugaucugacugacucagaaaugaacaaacuguuugaaaaaacaaggaagcaacugagggaaaaugcugaggacaugggcaaugguugcuucaagauauaccacaaaugugacaaugccugcauagggucaaucagaaauggaacuuaugaccaugauguauacagagacgaagcauuaaacaaccgguuccagaucaaagguguugagcugaagucaggauacaaagacuggauccuauggauuuccuuugccauaucaugcuuuuugcuuuguguuguuuugcugggguucaucaugugggccugccaaaaaggcaacauuaggugcaacauuugcauuuga

SEQ ID NO: 40495 - RNA, 1701 nt, Artificial Sequence
  derived and/or modified CDS sequence (wt) from hemagglutinin__InfluenzaA__AFG72107
augaagacuaucauugcuuugagcuacauuuucugucugguuuucgcccaaaaacuucccggaaaugacaacagcacagcaacgcugugccugggacaucaugcagugccaaacggaacgcuagugaaaacaaucacgaaugaucagauugaagugacuaaugcuacugagcugguucagaguuccucaacagguagaauaugcgacaguccucaccgaauccuugauggaaaaaacugcacacugauagaugcucuauugggagacccucauugugauggcuuccaaaaugagaaaugggaccuuuuuguugaacgcagcaaagcuuucagcaacuguuacccuuaugaugugccggauuaugccucccuuaggucacuaauugccucaucaggcacccuggaguuuaucaaugaagaauucaauuggacuggagucacucagaaugggggaagcuaugcuugcaaaaggggaucuguuaacaguuucuucaguagauugaauugguugcaugaaucagaauacaaauauccagcgcugaacgugacuaugccaaacaauggcagauuugacaaauuguacauuugggggguucaccacccuagcacggacagagaacaaaccaaccuauauguucgagcaucagggagagucacagucuccaccaaaagaagccagcaaacuguaaucccgaauaucgggccuagacccuggguaaggggucuguccaguagaauaagcaucuauuggacaauaguaaaaccgggggacauacuguugauuaauagcacugggaaccuaauugcuccucgggguuacuucaaaauacacacugggaaaagcucaauaaugaggucagaugcaccuauuggcaccugcaguucugaaugcaucacuccaaauggaagcauccccaaugacaaacccuuucaaaauguaaacaagaucacauauggggcaugucccagguauguuaagcaaaacacucuaaaauuggcaacagggaugcggaauguaccagagaaacaaacuagaggcauauucggcgcaauagcagguuucauagaaaaugguugggagggaaugguagacgguugguacgguuucaggcaucaaaauucugagggcacaggacaagcagcagaucuuaaaagcacucaagcagcaaucgaccaaaucaacgggaaacugaauagguuaaucgagaaaacgaacgagaaauuccaucaaaucgaaaaggaauucucagaaguagaagggagaauucaggaccucgagaaauauguugaagacacuaaaauagaucucuggucuuacaacgcggagcuucuugucgcccuggagaaccaacauacaauugaucugacugacucagaaaugaacaaacuguuugaaaaaacaagaaagcaacugagggaaaaugcugaggacaugggcaaugguugcuucaaaauauaccacaaaugugacaaugcuugcauagggucaaucagaaauggaacuuaugaccaugauguauacagagacgaagcaguaaacaaccgguuccagaucaaagguguugagcugaagucaggauacaaagacuggauccuauggauuuccuuugccauaucaugcuuuuugcuuuguguuauuuugcugggauucaucaugugggccugccaaaaaggcaacauuaggugcaacauuugcauuuga

SEQ ID NO: 40496 - RNA, 1701 nt, Artificial Sequence
  derived and/or modified CDS sequence (wt) from hemagglutinin__InfluenzaA__AFG72118
augaagacuaucauugcuuugagcuacauuuucugucugguuuucgcccaaaaacuucccggaaaugacaacagcacagcaacgcugugccugggacaucaugcagugccaaacggaacgcuagugaaaacaaucacgaaugaucaaauugaagugacuaaugcuacugaguugguucagaauuccucaacagguagaauaugcaacaguccucaccgaauccuugauggaaaaaacugcacacugauagaugcucuauugggagacccucauugugauggcuuccaaaauaaggaaugggaccuuuuuguugaacgcagcaaagcuuacagcaacuguuacccuuaugaugugccggauuaugccucccuuaggucacuaguugccucaucaggcacccuggaguuuaucaaugaagacuucaauuggacuggagucgcucagagugggggaagcuaugcuugcaaaaggggaucuguuaacaguuucuucaguagauugaauugguugcacgaaucagaauacaaauauccagcgcugaacgugacuaugccaaacaauggcaaauuugacaaauuguacauuugggggguucaccacccgagcacggacagagaacaaaccaaccuauauguucgagcaucagggagagucacagucucuaccaaaagaagccagcaaacuguaaucccgaauaucgggucuagacccuggguaaggggucuguccaguagaauaagcaucuauuggacaauaguaaaaccgggagacauacuguugauuaauagcaccgggaaccuaauugcuccucgggguuacuucaaaauacgaacuggaaaaagcucaauaaugaggucagaugcacccauuggcaccugcaguucugaaugcaucaccccaaauggaagcauucccaaugacaaacccuuucaaaauguaaacaggaucacauauggggcaugucccagauauguuaagcaaaacacucugaaauuggcaacagggaugcggaauguaccggagagacaaacuaggggcauauucggcgcaaucgcagguuucauagaaaaugguugggagggaaugguagacgguugguacgguuucaggcaucaaaauucugagggcacaggacaagcagcagaucuuaaaagcacucaagcagcaaucgaccaaaucaacgggaaacugaauagguuaaucgagaaaacgaacgagaaauuccaucaaaucgaaaaggaauucucagaaguagaagggagaauucaggaccucgagaaauauguugaagacacuaaaauagaucucuggucuuacaacgcggagcuucuugucgcccuggagaaccaacauacaauugaucugacugacucagaaaugaacaaacuguuugaaaaaacaaggaagcaacugagggaaaaugcugaggacaugggcaaugguugcuucaagauauaccacaaaugugacaaugccugcauagggucaaucagaaauggaacuuauaaccaugauguauacagagacgaagcauuaaacaaccgguuccagaucaaagguguugagcugaagucaggauacaaagacuggauccuauggauuuccuuugccauaucaugcuuuuugcuuuguguuguuuugcugggguucaucaugugggccugccaaaaaggcaacauuaggugcaacauuugcauuuga

SEQ ID NO: 40497 - RNA, 1701 nt, Artificial Sequence
  derived and/or modified CDS sequence (wt) from hemagglutinin__InfluenzaA__AFG72129
augaagacuaucauugcuuugagcuacauuuucugucugguuuucgcccaaaaacuucccggaaaugacaacagcacagcaacgcugugccugggacaucaugcagugccaaacggaacgcuagugaaaacaaucacgaaugaucaaauugaagugacuaaugcuacugagcugguucagaguuccucaacagguagaauaugcgacaguccucaccgaauccuugauggaaaaaacugcacacugauagaugcucuauugggagacccucauugugauggcuuccaaaauaaggaaugggaccuuuuuguugaacgcagcaaagcuuacagcaacuguuacccuuaugaugugccggauuaugccucccuuaggucacuaguugccucaucaggcacccuggaguuuaucaaugaagacuucaauuggacuggagucgcucagagugggggaagcuaugcuugcaaaaggggaucuguuaacaguuucuuuaguagauugaauugguugcacgaaucagaauacaaauauccagcgcugaacgugacuaugccaaacaauggcaaauuugacaaauuguacauuugggggguucaccacccgagcacggauagagaacaaaccaaccuauauguucgagcaucagggagagucacagucucuaccaaaagaagccagcaaacugugaucccgaauaucgggucuagacccuggguaaggggucuguccaguggaauaagcaucuauuggacaauaguaaaaccgggagacauacuguugauuaauagcaccgggaaccuaauagcuccucgggguuacuucaaaauacgaacugggaaaagcucaauaaugaggucagaugcacccauuggcaccugcaguucugaaugcaucacuccaaauggaagcauucccaaugacaaacccuuucaaaauguaaacaggaucacauauggggcaugucccagauauguuaagcaaaacacucugaaauuggcaacagggaugcggaauguaccagagaaacaaacuagaggcauauucggcgcaaucgcagguuucauagaaaaugguugggagggaaugguagacgguugguacgguuucaggcaucaaaauucugagggcacaggacaagcagcagaucuuaaaagcacucaagcagcaaucaaccaaaucaacgggaaacugaauagguuaaucgagaaaacgaacgagaaauuccaucaaaucgaaaaggaauucucagaaguagaagggagaauucaggaccucgagaaauauguugaagacacuaaaauagaucucuggucuuacaacgcggagcuucuugucgcccuggagaaccaacauacaauugaucugacugacucagaaaugaacaaacuguuugaaaaaacaaggaagcaacugagggaaaaugcugaggacaugggcaaugguugcuucaagauauaccacaaaugugacaaugccugcauagggucaaucagaaauggaacuuaugaccaugauguauacagagacgaagcauuaaacaaccgguuccagaucaaagguguugagcugaagucaggauacaaagacuggauccuauggauuuccuuugccauaucaugcuuuuugcuuuguguuguuuugcugggguucaucaugugggccugccaaaaaggcaacauuaggugcaacauuugcauuuga

SEQ ID NO: 40498 - RNA, 1701 nt, Artificial Sequence
  derived and/or modified CDS sequence (wt) from hemagglutinin__InfluenzaA__AFG72140
augaagacuaucauugcuuugagcuacauuuucugucugguuuucgcccaaaaacuucccggaaaugacaacagcacagcaacgcugugccugggacaucaugcagugccaaacggaacgcuagugaaaacaaucacgaaugaucaaauugaagugacuaaugcuacugagcugguucagaguuccucaacagguagaauaugcgacaguccucaccgaauccuugauggaaaaaacugcacacugauagaugcucuauugggagacccucauugugauggcuuucaaaauaaggaaugggaccuuuuuguugaacgcagcaaagcuuacagcaacuguuacccuuaugaugugccggauuaugccucccuuaggucacuaguugccucaucaggcacccuggaguuuaucaaugaagacuucaauuggacuggagucgcucagagugggggaagcuaugcuugcaaaaggggaucuguuaacaguuucuuuaguagauugaauugguugcacgaaucagaauacaaauauccagcgcugaacgugacuaugccaaacaauggcaaauuugacaaauuguacauuugggggguucaccacccgagcacggacagagaacaaaccaaccuauauguucgagcauuagggagagucacagucucaaccaaaagaagccagcaaacuguaaucccgaauaucgggucuagacccuggguaaggggucuguccaguagaauaagcaucuauuggacaauaguaaaaccgggagacauacuuuugauuaauagcaccgggaaccuaauugcuccucgggguuacuucaaaauacgaacugggaaaagcucaauaaugaggucagaugcacccauuggcaccugcaguucugaaugcaucacuccaaauggaagcauucccaauaacaaacccuuucaaaauguaaacaggaucacauauggggcaugucccagauauguuaagcaaaacacucugaaauuggcaacagggaugcggaauguaccagagaaacaaacuagaggcauauucggcgcaaucgcagguuucauagaaaaugguugggagggaaugguagacgguugguacgguuucaggcaucaaaauucugagggcacaggacaagcagcagaucuuaaaagcacucaagcagcaaucgaccaaaucaacgggaaacugaauagguuaaucgagaaaacgaacgagaaauuccaucaaaucgaaaaggaauucucagaaguagaagggagaauucaggaccucgagaaauauguugaagacacuaaaauagaucucuggucuuacaacgcagagcuucuugucgcccuggagaaccaacauacaauugaucugacugacucagaaaugaacaaacuguuugaaaaaacaaggaagcaacugagggaaaaugcugaggacaugggcaaugguugcuucaaaauauaccacaaaugugacaaugccugcauagggucaaucagaaauggaacuuaugaccaugauguauacagagacgaagcauuaaacaaccgguuccagaucaaagguguugagcugaagucaggauacaaagacuggauccuauggauuuccuuugccauaucaugcuuuuugcuuuguguuguuuugcugggguucaucaugugggccugccaaaaaggcaacauuaggugcaacauuugcauuuga

SEQ ID NO: 40499 - RNA, 1701 nt, Artificial Sequence
  derived and/or modified CDS sequence (wt) from hemagglutinin__InfluenzaA__AFG72151
augaagacuaucauugcuuugagcuacauuuuaugucugguuuucgcccaaaaacuucccggaaaugacaacagcacagcaacgcugugccugggacaucaugcagugccaaacggaacgcuagugaaaacaaucacgaaugaucaaauugaagugacuaaugcuacugagcugguucagaguuccucaacagguagaauaugugacaguccucaccgaauccuugauggaaaaaauugcacacugauagaugcucuauugggagacccucauugugauggcuuccaaaauaaggaaugggaccuuuuuguugaacgcagcaaagcuuacagcaacuguuacccuuaugaugugccggauuaugccucccuuaggucacuaguugccucaucaggcacccuggaguuuaccaaugaagacuucaauuggacuggagucgcucagaguggggaaagcuaugcuugcaaaaggggaucuguuaaaaguuucuuuaguagauugaauugguugcacgaaucagauuacaaauauccagcgcugaacgugacuaugccaaacaauggcaaauuugacaaauuguacauuugggggguucaccacccgagcacggacagagaacaaaccagccuauauguucgagcaucagggagagucacagucuccaccaaaagaagccaacaaacugugaucccgaauaucggguccagacccuggguaaggggucuguccaguagaauaagcaucuauuggacaauagugaaaccgggagacauacuuuugauuaauagcaccgggaaccuaauugcuccucgggguuacuucaaaauacgaacugggaaaagcucgauaaugagaucagaugcacccauuggcaccugcaguucugaaugcaucacuccaaauggaagcauccccaaugacaaaccuuuucaaaacguaaacaggaucacauauggggcaugucccagauauguuaagcaaaacacucugaaauuggcaacagggaugcggaauguaccagagaaacaaacuagaggcauauucggcgcaaucgcagguuucauagaaaaugguugggagggaaugguagacgguugguacgguuucaggcaucaaaauucugagggcacaggacaagcagcagaucuuaaaagcacucaagcagcaaucgaccaaaucaacgggaaacugaauagguuaaucgagaaaacgaacgagaaauuccaucaaaucgaaaaggaauucucagaaguagaagggagaauucaggaccucgagaaauauguugaagacacuaaaauagaucucuggucuuacaacgcggagcuucuuguugcccuggagaaccaacauacaauugaucugacugacucagaaaugaacaaacuguuugaaaaaacaaggaagcaacugagggaaaaugcugaggacaugggcaaugguugcuucaaaauauaccacaaaugugacaaugccugcauagggucaaucagaaauggaacuuaugaccaugauguauacagagacgaagcauuaaacaaccgguuccagaucaaagguguugagcugaagucaggauacaaagauuggauccuauggauuuccuuugccauaucaugcuuuuugcuuuguguuguuuugcugggguucaucaugugggccugccaaaaaggcaacauuaggugcaacauuugcauuuga

SEQ ID NO: 40500 - RNA, 1701 nt, Artificial Sequence
  derived and/or modified CDS sequence (wt) from hemagglutinin__InfluenzaA__AFG72184
augaagacuaucauugcuuugagcuacaucuuaugucugguuuucgcccaaaaacuucccggaaaugacaacagcacagcaacgcugugccuggggcaucaugcagugccaaacggaacucuagugaaaacaaucacgaaugaucaaauugaagugacuaaugcuacugagcugguucagaguuccucaacagguagaauaugcgacaguccucaccgaauccuugauggaaaaaacugcacacugauagaugcucuauugggagacccucauugugaugacuuccaaaauaaggaaugggaccuuuuuguugaacgcagcaaagcuuacagcaacuguuacccuuaugaugugccagauuaugccucccuuaggucacuaguugccucaucaggcacccuggaauuuaucaaugaagacuucaauuggacuggagucgcucagaguggggaaagcuaugcuugcaaaaggggaucuguuaaaaguuucuuuaguagauugaauugguugcacgaaucagaauacaaauauccagcgcugaacgugacuaugccaaacaaugacaaauuugacaaauuguacauuugggggguucaccacccgagcacggaaagagaacaaaccagccuauauauucgagcaucagggagagucacagucucuaccaaaagaagccaacaaacuguaaucccgaauaucggguccagacccuggguaaggggucuguccaguagaauaagcaucuauuggacaauaguaaaaccgggagacauacuuuugauuaauagcaccgggaaccuaauugcuccuagggguuacuucaaaauacgaacugggaaaagcucgauaaugaggucagaugcacccauuggcaccugcaguucugaaugcaucacuccaaauggaagcauccccaaugacaaaccuuuucaaaauguaaacaggaucacauauggggcaugucccagauauguuaagcaaaacacucugaaauuggcaacagggaugcggaauguaccagagaaacaaacuagaggcauauucggcgcaauugcagguuucauagaaaaugguugggagggaaugguagacgguugguacgguuucaggcaucaaaauucugagggcacaggacaagcagcagaucuuaaaagcacucaagcagcaaucgaccaaaucaacgggaaacugaauagguuaauagagaaaacgaacgagaaauuccaucaaaucgaaaaggaauucucagaaguagaagggagaauucaggaccucgagaaauauguugaagacacuaaaauagaucucuggucuuacaacgcggagcuucuuguugcccuggagaaccaacauacaauugaucugacugacucagaaaugaacaaacuguuugaaaaaacaaggaagcaacugagggaaaaugcugaggacaugggcaaugguugcuucaaaauauaccacaaaugugacaaugccugcauagggucaaucagaaauggaacuuaugaccaugauguauacagagacgaagcauuaaacaaccgguuccagaucaaagguguugagcugaagucaggauacaaagauuggauccuauggauuuccuuugccauaucaugcuuuuugcuuuguguuguuuugcugggguucaucaugugggccugccaaaaaggcaacauuaggugcaacauuugcauuuga

SEQ ID NO: 40501 - RNA, 1701 nt, Artificial Sequence
  derived and/or modified CDS sequence (wt) from hemagglutinin__InfluenzaA__AFG72195
augaagacuaucauugcuuugagcuacauuuuaugucugguuuucgcccaaaaacuucccggaaaugacaacagcacagcaacgcugugccugggacaucaugcagugccaaacggaacgcuagugaaaacaaucacgaaugaucaaauugaagugacuaaugcuacugagcugguucagaguuccucaacagguagaauaugugacaguccucaccgaauccuugauggaaaaaauugcacacugauagaugcucuauugggagacccucauugugauggcuuccaaaauaaggaaugggaccuuuuuguugaacgcagcaaagcuuacagcaacuguuacccuuaugaugugccggauuaugccucccuuaggucacuaguugccucaucaggcacccuggaguuuaccaaugaagacuucaauuggacuggagucgcucagaguggggaaagcuaugcuugcaaaaggggaucuguuaaaaguuucuuuaguagauugaauugguugcacgaaucagauuacaaauauccagcgcugaacgugacuaugccaaacaauggcaaauuugacaaauuguacauuugggggguucaccacccgagcacggacagagaacaaaccagccuauauguucgagcaucagggagagucacagucuccaccaaaagaagccaacaaacugugaucccgaauaucggguccagacccuggguaaggggucuguccaguagaauaagcaucuauuggacaauagugaaaccgggagacauacuuuugauuaauagcaccgggaaccuaauugcuccucgggguuacuucaaaauacgaacugggaaaagcucgauaaugagaucagaugcacccauuggcaccugcaguucugaaugcaucacuccaaauggaagcauccccaaugacaaaccuuuucaaaacguaaacaggaucacauauggggcaugucccagauauguuaagcaaaacacucugaaauuggcaacagggaugcggaauguaccagagaaacaaacuagaggcauauucggcgcaaucgcagguuucauagaaaaugguugggagggaaugguagacgguugguacgguuucaggcaucaaaauucugagggcacaggacaagcagcagaucuuaaaagcacucaagcagcaaucgaccaaaucaacgggaaacugaauagguuaaucgagaaaacgaacgagaaauuccaucaaaucgaaaaggaauucucagaaguagaagggagaauucaggaccucgagaaauauguugaagacacuaaaauagaucucuggucuuacaacgcggagcuucuuguugcccuggagaaccaacauacaauugaucugacugacucagaaaugaacaaacuguuugaaaaaacaaggaagcaacugagggaaaaugcugaggacaugggcaaugguugcuucaaaauauaccacaaaugugacaaugccugcauagggucaaucagaaauggaaccuaugaccaugauguauacagagacgaagcauuaaacaaccgguuccagaucaaagguguugagcugaagucaggauacaaagauuggauccuauggauuuccuuugccauaucaugcuuuuugcuuuguguuguuuugcugggguucaucaugugggccugccaaaaaggcaacauuaggugcaacauuugcauuuga

SEQ ID NO: 40502 - RNA, 1701 nt, Artificial Sequence
  derived and/or modified CDS sequence (wt) from hemagglutinin__InfluenzaA__AFG72206
augaagacuaucauugcuuugagcuacauucuaugucugguuuucgcccaaaaacuucccggaaaugacaacagcacagcaacgcugugccugggacaucaugcagugccaaacggaacgcuagugaaaacaaucacgaaugaucaaauugaagugacuaaugcuacugagcugguucagaguuccucaacagguaaaauaugugacaguccucaccgaauccuugauggaaaaaauugcacacugauagaugcucuauugggagacccucauugugauggcuuccaaaauaaggaaugggaccuuuuuguugaacgcagcaaagcuuacagcaacuguuacccuuaugaugugccggauuaugccucccuuaggucacuaguugccucaucaggcacccuggaguuuaucaaugaagacuucaauuggacuggagucgcucagaguggggaaagcuaugcuugcaaaaggggaucuguuaaaaguuucuuuaguagauugaauuggcugcacgaaucagauuacaaauauccagcgcugaacgugacuaugccaaacaauggcaaauuugacaaauuguacauuugggggguucaccacccgagcacggacagagaacaaaccagccuauauauucgagcaucagggagagucacagucuccaccaaaagaagccaacaaacugugaucccgaauaucggguccagacccugggugaggggucuguccaguagaauaagcaucuauuggacaauagugaaaccgggagacauacuuuugauuaauagcaccgggaaccuaauugcuccucgggguuacuucaaaauacgaacugggaaaagcucgauaaugagaucagaugcacccauuggcaccugcaguucugaaugcaucacuccaaauggaagcauccccaaugacaaaccuuuucaaaacguaaacaggaucacauauggggcaugucccagauauguuaagcaaaacacucugaaauuggcaacagggaugcggaauguaccagagaaacaaacuagaggcauauucggcgcaaucgcagguuucauagaaaaugguugggagggaaugguagacgguugguacgguuucaggcaucaaaauucugagggcacaggacaagcagcagaucuuaaaagcacucaagcagcaaucgaccaaaucaacgggaaacugaauagguuaaucgagaaaacgaacgagaaauuccaucaaaucgaaaaggaauucucagaaguagaagggagaauucaggaccucgagaaauauguugaagacacuaaaauagaucucuggucuuacaacgcggagcuucuuguugcccuggagaaccaacauacaauugaucugacugacucagaaaugaacaaacuauuugaaaaaacaaggaagcaacugagggaaaaugcugaggacaugggcaaugguugcuucaaaauauaccacaaaugugacaaugccugcauagggucaaucagaaauggaacuuaugaccaugauguauacagagacgaagcauuaaacaaccgguuccagaucaaagguguugagcugaagucaggauacaaagauuggauccuauggauuuccuuugccauaucaugcuuuuugcuuuguguuguuuugcugggguucaucaugugggccugccaaaaaggcaacauuaggugcaacauuugcauuuga

SEQ ID NO: 40503 - RNA, 1701 nt, Artificial Sequence
  derived and/or modified CDS sequence (wt) from hemagglutinin__InfluenzaA__AFG72217
augaagacuaucauugcuuugagcuacauuuuaugucugguuuucgcucaaaaacuucccggaaaugacaacagcacagcaacgcugugccugggacaucaugcagugccaaacggaacgcuagugaaaacaaucacgaaugaucaaauugaagugacuaaugcuacugaguugguucagaguuccucaacagguagaauaugcgacaguccucaccgaauccuugauggaaaaaacugcacacugauagaugcucuauugggagacccucauugugauggcuuccaaaauaaggaaugggaccuuuuuguugaacgcagcaaagcuuacagcaacuguuacccuuaugaugugccggauuaugccucccuuaggucacuaguugccucaucaggcacccuggaguuuaucaaugaagacuucaauuggacuggagucgcucaggaugggggaagcuaugcuugcaaaaggggaucuguuaacaguuucuuuaguagauugaauugguugcacaaauuagaauacaaauauccagcgcugaacgugacuaugccaaacaauggcaaauuugacaaauuguacauuugggggguucaccacccgagcacggacagugaccaaaccagccuauauguucgagcaucagggagagucacagucucuaccaaaagaagccaacaaacuguaaccccgaauaucgggucuagacccuggguaaggggucuguccaguagaauaagcaucuauuggacaauaguaaaaccgggagacauacuuuugauuaguagcacagggaaucuaauugcuccucgggguuacuucaaaauacgaaaugggaaaagcucaauaaugaggucagaugcacccauuggcaacugcaguucugaaugcaucacuccaaauggaagcauucccaaugacaaaccuuuucaaaauguaaacaggaucacauauggggccugccccagauauguuaagcaaaacacucugaaauuggcaacagggaugcggaauguaccagagaaacaaacuagaggcauauucggcgcaaucgcagguuucauagaaaaugguugggagggaaugguagacgguugguacgguuucaggcaucaaaauucugagggcacaggacaagcagcagauauuaaaagcacucaagcagcaaucgaccaaaucaacgggaaacugaauagguuaaucgagaaaacgaacgagaaauuccaucaaaucgaaaaagaauucucagaaguagaagggagaauucaggaccucgagaaauauguugaagacacuaaaauagaucucuggucuuacaacgcggagcuucuuguugcccuggagaaccaacauacaauugaucuaacugacucagaaaugaacaaacuguuugaaaaaacaaggaagcaacugagggaaaaugcugaggacaugggcaaugguugcuucaaaauauaccacaaaugugacaaugccugcauagggucaaucagaaauggaacuuaugaccaugauguauacagagacgaagcauuaaacaaccgguuccagaucaaagguguugagcugaagucaggauacaaagauuugauccuauggauuuccuuugccauaucaugcuuuuugcuuuguguuguuuugcugggguucaucaugugggccugccaaaaaggcaacauuaggugcaacauuugcauuuga

SEQ ID NO: 40504 - RNA, 1701 nt, Artificial Sequence
  derived and/or modified CDS sequence (wt) from hemagglutinin__InfluenzaA__AFG72228
augaagacuaucauugcuuugagcuacauuuuaugucugguuuucgcccaaaaacuucccggaaaugacaacagcacagcaacgcugugccugggacaucaugcagugccaaacggaacgcuagugaaaacaaucacgaaugaucaaauugaagugacuaaugcuacugagcugguucagaguuccucaacagguagaauaugugacaguccucaccgaauccuugauggaaaaaauugcacacugauagaugcucuauugggagacccucauugugauggcuuccaaaauaaggaaugggaccuuuuuguugaacgcagcaaagcuuacagcaacuguuacccuuaugaugugccggauuaugccucccuuaggucacuaguugccucaucaggcacccuggaguuuaccaaugaagacuucaauuggacuggagucgcucagaguggggaaagcuaugcuugcaaaaggggaucuguuaaaaguuucuuuaguagauugaauugguugcacgaaucagauuacaaauauccagagcugaacgugacuaugccaaacaauggcaaauuugacaaauuguacauuugggggguucaccacccgagcacggacagagaacaaaccagccuauauguucgagcaucagggagagucacagucuccaccaaaagaagccaacaaacugugaucccgaauaucggguccagacccuggguaaggggucuguccaguagaauaagcaucuauuggacaauagugaaaccgggagacauacuuuugauuaauagcaccgggaaccuaauugcuccucgggguuacuucaaaauacgaacugggaaaagcucgauaaugagaucagaugcacccauuggcaccugcaguucugaaugcaucacuccaaauggaagcauccccaaugacaaaccuuuucaaaacguaaacaggaucacauauggggcaugucccagauauguuaagcaaaacacucugaaauuggcaacagggaugcggaauguaccagagaaacaaacuagaggcauauucggcgcaaucgcagguuucauagaaaaugguugggagggaaugguagacgguugguacgguuucaggcaucaaaauucugagggcacaggacaagcagcagaucuuaaaagcacucaagcagcaaucgaccaaaucaacgggaaacugaauagguuaaucgagaaaacgaacgagaaauuccaucaaaucgaaaaggaauucucagaaguagaagggagaauucaggaccucgagaaauauguugaagacacuaaaauagaucucuggucuuacaacgcggagcuucuuguugcccuggagaaccaacauacaauugaucugacugacucagaaaugaacaaacuguuugaaaaaacaaggaagcaacugagggaaaaugcugaggacaugggcaaugguugcuucaaaauauaccacaaaugugacaaugccugcauagggucaaucagaaauggaaccuaugaccaugauguauacagagacgaagcauuaaacaaccgguuccagaucaaagguguugagcugaagucaggauacaaagauuggauccuauggauuuccuuugccauaucaugcuuuuugcuuuguguuguuuugcugggguucaucaugugggccugccaaaaaggcaacauuaggugcaacauuugcauuuga

SEQ ID NO: 40505 - RNA, 1701 nt, Artificial Sequence
  derived and/or modified CDS sequence (wt) from hemagglutinin__InfluenzaA__AFG72239
augaagacuaucauugcuuugagcuacauuuuaugucugguucucgcccaaaaacuucccggaagugacaacagcacagcaacgcugugccugggacaucaugcagugccaaacggaacgcuagugaaaacaaucacgaaugaucaaauugaagugacuaaugcuacugagcugguucagaguuccacaacagguagaauaugugacaguccucaccgaauccuugauggaaaaaauugcacacugauagaugcucuauugggagacccucauugugauggcuuccaaaauaaggaaugggaucuuuuuguugaacgcagcaaagcuuacagcaacuguuacccuuaugaugugccggauuaugccucccuuaggucacuaguugccucaucaggcacccuggaguuuaccaaugaagacuucaauuggacuggagucgcucagaguggggaaagcuaugcuugcaaaaggggaucuguuaaaaguuucuuuaguagauugaauugguugcacgaaucagauuacaaauauccagcgcugaacgugacuaugccaaacaauggcaaauuugacaaauuguacauuugggggguucaccacccgagcacggacagagaacaaaccagccuauauguucgagcaucagggagagucacagucuccaccaaaagaagccaacaaacugugaucccgaauaucggguccagacccuggguaaggggucuguccaguagaauaagcaucuauuggacaauagugaaaccgggagacauacuuuugauuaauagcaccgggaaccuaauugcuccucgggguuacuucaaaauacgaacugggaaaagcucgauaaugagaucagaugcacccauuggcaccugcaguucugaaugcaucacuccaaauggaagcauccccaaugacaaaccuuuucaaaacguaaacaggaucacauauggggcaugucccagauauguuaagcaaaacacucugaaauuggcaacagggaugcggaauguaccagagaaacaaacuagaggcauauucggcgcaaucgcagguuucauagaaaaugguugggagggaaugguagacgguugguacgguuucaggcaucaaaauucugagggcacaggacaagcagcagaucuuaaaagcacucaagcagcaaucgaccaaaucaacgggaaacugaauagguuaaucgagaaaacgaacgagaaauuccaucaaaucgaaaaggaauucucagaaguagaagggagaauucaggaccucgagaaauauguugaagacacuaaaauagaucucuggucuuacaacgcggagcuucuuguugcccuggagaaccaacauacaauugaucugacugacucagaaaugaacaaacuguuugaaaaaacaaggaagcaacugagggaaaaugcugaggacaugggcaaugguugcuucaaaauauaccacaaaugugacaaugccugcauagggucaaucagaaauggaaccuaugaccaugauguauacagagacgaagcauuaaacaaccgguuccagaucaaagguguugagcugaagucaggauacaaagauuggauccuauggauuuccuuugccauaucaugcuuuuugcuuuguguuguuuugcugggguucaucaugugggccugccaaaaaggcaacauuaggugcaacauuugcauuuga

SEQ ID NO: 40506 - RNA, 1701 nt, Artificial Sequence
  derived and/or modified CDS sequence (wt) from hemagglutinin__InfluenzaA__AFG72272
augaagacuaucauugcuuugagcuacauuuuaugucugguuuucgcccaaaaacuucccggaaaugacaacagcacagcaacgcugugccugggacaucaugcagugccaaacggaacgcuagugaaaacaaucacgaaugaucaaauugaagugacuaaugcuacugagcugguucagaguuccucaacagguagaauaugugacaguccucaccgaauccuugauggaaaaaauugcacacugauagaugcucuauugggagacccucauugugauggcuuccaaaauaaggaaugggaccuuuuuguugaacgcagcaaagcuuacagcaacuguuacccuuaugaugugccggauuaugccucccuuaggucacuaguugccucaucaggcacccuggaguuuaccaaugaagacuucaauuggacuggagucgcucagaguggggaaagcuaugcuugcaaaaggggaucuguuaaaaguuucuuuaguagauugaauugguugcacgaaucagauuacaaauauccagcgcugaacgugacuaugccaaacaauggcaaauuugacaaauuguacauuugggggguucaccacccgagcacggacagagaacaaaccagccuauauguucgagcaucagggagagucacagucuccaccaaaagaagccaacaaacugugaucccgaauaucggguccagacccuggguaaggggucuguccaguagaauaagcaucuauuggacaauagugaaaccgggagacauacuuuugauuaauagcaccgggaaccuaauugcuccucgggguuacuucaaaauacgaacugggaaaagcucgauaaugagaucagaugcacccauuggcaccugcaguucugaaugcaucacuccaaauggaagcauccccaaugacaaaccuuuucaaaacguaaacaggaucacauauggggcaugucccagauauguuaagcaaaacacucugaaauuggcaacaggaaugcggaauguaccagagaaacaaacuagaggcauauucggugcaaucgcagguuucauagaaaaugguugggagggaaugguagacgguugguacgguuucaggcaucaaaauucugagggcacaggacaagcagcagaucuuaaaagcacucaagcagcaaucgaccaaaucaacgggaaacugaauagguuaaucgagaaaacgaacgagaaauuccaucaaaucgaaaaggaauucucagaaguagaagggagaauucaggaccucgagaaauauguugaagacacuaaaauagaucucuggucuuacaacgcggagcuucuuguugcccuggagaaccaacauacaauugaucugacugacucagaaaugaacaaacuguuugaaaaaacaaggaagcaacugagggaaaaugcugaggacaugggcaaugguugcuucaaaauauaccacaaaugugacaaugccugcauagggucaaucagaaauggaacuuaugaccaugauguauacagagacgaagcauuaaacaaccgguuccagaucaaagguguugagcugaagucaggauacaaagauuggauccuauggauuuccuuugccauaucaugcuuuuugcuuuguguuguuuugcugggguucaucaugugggccugccaaaaaggcaacauuaggugcaacauuugcauuuga

SEQ ID NO: 40507 - RNA, 1701 nt, Artificial Sequence
  derived and/or modified CDS sequence (wt) from hemagglutinin__InfluenzaA__AFG72316
augaagacuaucauugcuuugagccacauuuuaugucugguuuucgcucaaaaacuucccggaaaugacaacagcacagcaacgcuaugccugggacaucaugcagugccaaacggaacgcuagugaaaacaaucacgaaugaucaaauugaagugacuaaugcuacugaguugguucagaguucuucaacagguagaauaugcgacaguccucaccgaauccuugauggaaaaaacugcacacugauagaugcucuauugggagacccucauugugauggcuuccaaaauaaggaaugggaccuuuuuguugaacgcagcaaagcuuacagcaacuguuacccuuaugaugugccggauuaugccucccuuaggucacuaguugccucaucaggcacccuggaauuuaucaaugaagacuucaauuggacuggagucgcucaggaugggggaagcuaugcuugcaaaaggggaucuguuaacaguuucuuuaguagauugaauugguugcacaaauuagaauacaaauauccagcgcugaacgugacuaugccaaacaauggcaaauuugacaaauuguacauuugggggguucaccacccgagcacggacagugaccaaaccagccuauauguucgagcaucagggagagucacagucucuaccaaaagaagccaacaaacuguaaccccgaauaucgggucuagacccuggguaaggggucuguccaguagaauaagcaucuauuggacaauaguaaaaccgggagacauacuuuugauuaauagcacaggaaaucuaauugcuccucgggguuacuucaaaauacgaaaugggaaaagcucaauaaugaggucagauguacccauuggcaacugcaguucugaaugcaucacuccaaauggaagcauucccaaugacaaaccuuuucaaaauguaaacaggaucacauauggggccugccccagauauguuaagcaaaacacucugaaauuggcaacagggaugcggaauguaccagagaaacaaacuagaggcauauucggcgcaaucgcagguuucauagaaaaugguugggagggaaugguagacgguugguaugguuucaggcaucaaaauucugagggcacaggacaagcagcagaucuuaaaagcacucaagcagcaaucgaccaaaucaacgggaaacugaauagguuaaucgagaaaacgaacgagaaauuccaucaaaucgaaaaagaauucucagaaguggaagggagaauucaggaccucgagaaauauguugaagacacuaaaauagaucucuggucuuacaacgcggagcuucuuguugcccuggagaaccaacauacaauugaucuaacugacucagaaaugaacaaacuguuugaaaaaacaaggaagcaacugagggaaaaugcugaggacaugggcaaugguugcuucaaaauauaccacaaaugugacaaugccugcauagggucaaucagaaauggaacuuaugaccaugauguauacagagacgaagcauuaaacaaccgguuccagaucaaagguguugagcugaagucaggauacaaagauuggauccuauggauuuccuuugccauaucaugcuuuuugcuuuguguuguuuugcugggguucaucaugugggccugccaaaaaggcaacauuaggugcaacauuugcauuuga

SEQ ID NO: 40508 - RNA, 1701 nt, Artificial Sequence
  derived and/or modified CDS sequence (wt) from hemagglutinin__InfluenzaA__AFG72339
augaagacuaucauugcuuugagcuacauuuuaugucugguuuucgcucaaaaacuucccggaaaugacaacagcacagcaacgcugugccugggacaucaugcagugccaaacggaacgcuagugaaaacaaucacgaaugaucaaauugaagugacuaaugcuacugagcugguucagaguuccucaacagguagaauaugcgacaguccucaccgaauccuugauggaaaaaacugcacacugauagaugcucuauugggagacccucauugugauggcuuccaaaauaaggaaugggaccuuuuuguugaacgcagcaaagcuuacagcaacuguuacccuuaugaugugccggauuaugucucccuuaggucacuaguugccucaucaggcacccuggaguuuaucaaugaagacuucaauuggacuggagucgcucaggaugggggaagcuauacuugcaaaaggggaucuguuaacaguuucuuuaguagauugaauugguugcacaaaucagaauacaaauauccagcgcugaacgugacuaugccaaacaauggcaaauuugacaaauuguacauuugggggguucaccacccgagcacggacagugaccaaaccagccuauauguucgagcaucagggagagucacagucucuaccaaaagaagccaacaaacuguaaccccgaauaucgggucuagacccuggguaaggggucuguccaguagaauaagcaucuauuggacaauaguaaaaccgggagacauacuuuugauuaauagcacagggaaucuaauugcuccucgggguuacuucaaaauacgaaaugggaaaagcucaauaaugaggucagaugcacccauuggcaccugcaguucugaaugcaucacuccaaauggaagcauucccaaugacaaaccuuuucaaaauguaaacaggaucacauauggggccugccccagauauguuaagcaaaacacucugaaauuggcaacagggaugcggaauguaccagagaaacaaacuagaggcauauucggcgcaaucgcagguuucauagaaaaugguugggagggaaugguagacgguugguacgguuucaggcaucaaaauucugagggcacaggacaagcagcagaucuuaaaagcacucaagcagcaaucgaccaaaucaacgggaaacugaauagguuaaucgagaaaacgaacgagaaauuccaucaaaucgaaaaagaauucucagaaguagaagggagaauucaggaccucgagaaauauguugaagacacuaaaauagaucucuggucuuacaacgcggagcuucuuguugcccuggagaaccaacauacaauugaccuaacugacucagaaaugaacaaacuguuugaaaaaacaaggaagcaacugagggaaaaugcugaggacaugggcaaugguugcuucaaaauauaccacaaaugugacaaugccugcauagggucaaucagaaauggaacuuaugaccaugauguauacagagacgaagcauuaaacaaccgguuccagaucaaagguguugagcugaagucaggauacaaagauuggauccuauggauuuccuuugccauaucaugcuuuuugcuuuguguuguuuugcugggguucaucaugugggccugccaaaaaggcaacauuaggugcaacauuugcauuuga

SEQ ID NO: 40509 - RNA, 1701 nt, Artificial Sequence
  derived and/or modified CDS sequence (wt) from hemagglutinin__InfluenzaA__AFG72350
augaagacuaucauugcuuugagcuacauuuuaugucugguuuucgcucaaaaacuucccggaaaugacaacagcacagcaacgcugugccugggacaucaugcagugccaaacggaacgcuagugaaaacaaucacgaaugaucaaauugaagugacuaaugcuacugagcugguucagaguuccucaacagguagaauaugcgacaguccucaccgaauccuugauggaaaaaacugcacacugauagaugcucuauugggagacccucauugugauggcuuccaaaauaaggaaugggaccuuuuuguugaacgcagcaaagcuuacagcaacuguuacccuuaugaugugccggauuaugucucccuuaggucacuaguugccucaucaggcacccuggaguuuaucaaugaagacuucaauuggacuggagucgcucaggaugggagaagcuaugcuugcaaaaggggaucuguuaacaguuucuuuaguagauugaauugguugcacaaaucagaauacaaauauccagcgcugaacgugacuaugccaaacaauggcaaauuugacaaauuguacauuugggggguucaccacccgagcacggacagugaccaaaccagccuauauguucgagcaucagggagagucacagucucuaccaaaagaagccaacaaacuguaaccccgaauaucgggucuagacccuggguaaggggucuguccaguagaauaagcaucuauuggacaauaguaaaaccgggagacauacuuuugauuaauagcacagggaaucuaauugcuccucgggguuacuucaaaauacgaaaugggaaaagcucaauaaugaggucagaugcacccauuggcaucugcaguucugaaugcaucacuccaaauggaagcauucccaaugacaaaccuuuucaaaauguaaacaggaucacauauggggccugccccagauauguuaagcaaaacacucugaaauuggcaacagggaugcggaauguaccagagaaacaaacuagaggcauauucggcgcaaucgcagguuucauagaaaaugguugggagggaaugguagacgguugguacgguuucaggcaucaaaauucugagggcacaggacaagcagcagaucuuaaaagcacucaagcagcaaucgaccaaaucaacgggaaacugaauagguuaaucgagaaaacgaacgagaaauuccaucaaaucgaaaaagaauucucagaaguagaagggagaauucaggaccucgagaaauauguugaagacacuaaaauagaucucuggucuuacaacgcggagcuucuuguugcccuggagaaccaacauacaauugaccuaacugacucagaaaugaacaaacuguuugaaaaaacaaggaagcaacugagggaaaaugcugaggacaugggcaaugguugcuucaaaauauaccacaaaugugacaaugccugcauagggucaaucagaaauggaacuuaugaccaugauguauacagagacgaagcauuaaacaaccgguuccagaucaaagguguugagcugaagucaggauacaaagauuggauccuauggauuuccuuugccauaucaugcuuuuugcuuuguguuguuuugcugggguucaucaugugggccugccaaaaaggcaacauuaggugcaacauuugcauuuga

SEQ ID NO: 40510 - RNA, 1701 nt, Artificial Sequence
  derived and/or modified CDS sequence (wt) from hemagglutinin__InfluenzaA__AFG72372
augaagacuaucauugcuuugagcuacauuuuaugucugguuuucgcucaaaaacuucccggaaaugacaacagcacagcaacgcugugccugggacaccaugcagugccaaacggaacgcuagugaaaacaaucacgaaugaucaaauugaagugacuaaugcuacugagcugguucagaguuccucaacagguagaauaugcgacaguccucaccgaauccuugauggaaaaaacugcacacugauagaugcucuauugggagacccucauugugauggcuuccaaaauaaggaaugggaccuuuuuguugaacgcagcaaagcuuacagcaacuguuacccuuaugaugugccggauuaugccucccuuaggucacuaguugccucaucaggcacccuggaguuuaucaaugaagacuucaauuggacuggagucgcucaggaugggaaaagcuauacuugcaaaaggggaucuguuaacaguuucuuuaguagauugaauugguugcacaaauuagaauacaaauauccagcgcugaacgugacuaugccaaacaauggcaaauuugacaaauuguacauuugggggguucaccacccgagcacggacagugaccaaaccagccuauauguucgagcaucagggagagucacagucucuaccaaaagaagccaacaaacuguaaucccgaauaucgggucuagacccuggguaaggggucuguccaguagaauaagcaucuauuggacaauaguaaaaccgggagacauacuuuugauuaauagcacagggaaucuaauugcuccucgggguuacuucaaaauacgaaaugggaaaagcucaauaaugaggucagaugcacccauuggcaacugcaguucugaaugcaucacuccaaauggaagcauucccaaugacaaaccuuuucaaaauguaaacaggaucacauauggggccugccccagauauguuaagcaaaacacucugaaauuggcaacagggaugcggaauguaccagagaaacaaacuagaggcauauucggcgcaaucgcagguuucauagaaaaugguugggagggaaugguagacgguugguacgguuucaggcaucaaaauucugagggcacaggacaagcagcagaucuuaaaagcacucaagcagcaaucgaccaaaucaacgggaaacugaauagguuaaucgagaaaacgaacgagaaauuccaucaaaucgaaaaagaauucucagaaguagaagggagaauucaggaccucgagaaauauguugaagacacuaaaauagaucucuggucuuacaaugcggagcuucuuguugcccuggagaaccaacauacaauugaucuaacugacucagaaaugaacaaacuguuugaaagaacaaggaagcaacugagggaaaaugcugaggacaugggcaaugguugcuucaaaauauaccacaaaugugacaaugccugcauagggucaaucagaaauggaacuuaugaccaugauguauacagagacgaagcauuaaacaaccgguuccagaucaaagguguugaacugaagucaggauacaaagauuggauccuauggauuuccuuugccauaucaugcuuuuugcuuuguguuguuuugcugggguucaucaugugggccugccaaaaaggcaacauuaggugcaacauuugcauuuga

SEQ ID NO: 40511 - RNA, 1701 nt, Artificial Sequence; identical to SEQ ID NO: 33037
  derived and/or modified CDS sequence (wt) from hemagglutinin__InfluenzaA__AFG72383

SEQ ID NO: 40512 - RNA, 1701 nt, Artificial Sequence
  derived and/or modified CDS sequence (wt) from hemagglutinin__InfluenzaA__AFG72394
augaagacuaucauugcuuugagcuacauuuuaugucugguuuucgcucaaaaacuucccggaaaugacaacagcacagcaacgcugugccugggacaccaugcagugccaaacggaacgcuagugaaaacaaucacgaaugaucaaauugaagugacuaaugcuacugagcugguucagaguuccucaacagguagaauaugcgacaguccucaccgaauccuugauggaaaaaacugcacacugauagaugcucuauugggagacccucauugugauggcuuccaaaauaaggaaugggaccuuuuuguugaacgcagcaaagcuuacagcaacuguuacccuuaugaugugccggauuaugccucccuuaggucacuaguugccucaucaggcacccuggaguuuaucaaugaagacuucaauuggacuggagucgcucaggaugggaaaagcuaugcuugcaaaaggggaucuguuaacaguuucuuuaguagauugaauugguugcacaaauuagaauacaaauauccagcgcugaacgugacuaugccaaacaauggcaaauuugacaaauuguacauuugggggguucaccacccgagcacggacagugaccaaaccagccuauauguucgagcaucagggagagucacagucgcuaccaaaagaagccaacaaacuguaaucccgaauaucggguuuagacccuggguaaggggucaguccaguggaauaagcaucuauuggacaauaguaaaaccgggagacauacuuuugauuaauagcacagggaaucuaauugcuccucgggguuacuucaaaauacgaaaugggaaaagcucaauaaugaggucagaugcacccauuggcaacugcaguucugaaugcaucacuccaaauggaagcauucccaaugacaaaccuuuucaaaauguaaacaggaucacauauggggccugccccagauauguuaagcaaaacacucugaaguuggcaacagggaugcggaauguaccagagaaacaaacuagaggcauauucggcgcaaucgcagguuucauagaaaaugguugggagggaaugguagacgguugguacgguuucaggcaucaaaauucugagggcacaggacaagcagcagaucuuaaaagcacucaagcagcaaucgaccaaaucaacgggaaacugaauagguuaaucgagaaaacgaacgagaaauuucaucaaaucgaaaaagaauucucagaaguagaagggagaauucaggaccucgagaaauauguugaagacacuaaaauagaucucuggucuuacaacgcggggcuucuuguugcccuggagaaccaacauacaauugaucuaacugacucagaaaugaacaaacuguuugaaagaacaaggaagcaacugagggaaaaugcugaggacaugggcaaugguugcuucaaaauauaccacaaaugugacaaugccugcauagggucaaucagaaauggaacuuaugaccaugauguauacagagacgaagcauuaaacaaccgguuccagaucaaagguguugagcugaagucaggauacaaagauuggauccuauggauuuccuuugccauaucaugcuuuuugcuuuguguuguuuugcugggguucaucaugugggccugccaaaaaggcaacauuaggugcaacauuugcauuuga

SEQ ID NO: 40513 - RNA, 1701 nt, Artificial Sequence
  derived and/or modified CDS sequence (wt) from hemagglutinin__InfluenzaA__AFG72405
augaagacuaucauugcuuugagcuacauuuuaugucugguuuucgcucaaaaacuucccggaaaugacaacagcacagcaacgcugugccugggacaccaugcagugccaaacggaacgcuagugaaaacaaucacgaaugaucaaauugaagugacuaaugcuacugagcugguucagaguuccucaacagguagaauaugcgacaguccucacagaauccuugauggaaaaaacugcacacugauagaugcucuauugggagacccuaauugugauggcuuccaaaauaaggaaugggaccuuuuuguugaacgcagcaaagcuuacagcaacuguuacccuuaugaugugccggauuaugccucccuuaggucacuaguugccucaucaggcacccuggaguuuaccaaugaagacuucaauuggacuggagucgcucaggaugggggaagcuaugcuugcaaaaggggaucuguuaaaaguuucuuuaguagauugaauugguugcacaaauuagaauacaaauauccagcgcugaacgugacuaugccaaacaauggcaaauucgacaaauuguacauuugggggguucaccacccgagcacggacagugaccaaaccagccuauauguucgagcaucagggagagucacagucucuaccaaaagaagccaacaaacuguaaccccgaauaucgggucuagacccuggguaaggggucuguccaguagaauaagcaucuauuggacaauaguaaaaccgggagacauacuuuugauuaauagcacaggaaaucuaauugcuccucgggguuacuucaaaauacgaaaugggaaaagcucaauaaugaggucagaugcacccauuggcaccugcaguucugaaugcaucacuccaaauggaagcauucccaaugacaaaccuuuucaaaauguaaacaggaucacauauggggccugccccagauauguuaagcaaaacacucugaaauuggcaacagggaugcggaauguaccagagaaacaaacuagaggcauauucggcgcaaucgcagguuucauagaaaaugguugggagggaaugguagacgguugguacgguuucaggcaucaaaauucugagggcacaggacaagcagcagaucuuaaaagcacucaagcagcaaucaaccaaaucaacgggaaacugaauagguuaaucgagaaaacgaacgagaaauuccaucaaaucgaaaaagaauucucagaaguagaagggagaauucaggaccucgagaaauauguugaagacacuaaaauagaucucuggucuuacaacgcggagcuucuuguugcccuggagaaccaacauacaauugaucuaaccgacucagaaaugaacaaacuguuugaaaaaacaaggaagcaacugagggaaaaugcugaggacaugggcaaugguugcuucaaaauauaccacaaaugugacaaugccugcauagggucaaucagaaauggaacuuaugaccaugauguauacagagacgaagcauuaaacaaccgguuccagaucaaagguguugagcugaagucaggauacaaagauuggauccuauggauuuccuuugccauaucaugcuuuuugcuuuguguuguuuugcugggguucaucaugugggccugccaaaaaggcaacauuaggugcaacauuugcauuuga

SEQ ID NO: 40514 - RNA, 1701 nt, Artificial Sequence
  derived and/or modified CDS sequence (wt) from hemagglutinin__InfluenzaA__AFG72449
augaagacuaucauugcuuugagcuacauuuuaugucugguuuucgcucaaaaacuucccggaaaugacaacagcacagcaacgcugugccugggacaccaugcggugccaaacggaacgcuagugaaaacaaucacgaaugaucaaauugaagugacuaaugcuacugagcugguucagaguuccucaacagguagaauaugcuacaguccucaccgaauccuugauggaaacaacugcacacugauagaugcucuauugggagacccucauugugauggcuuccaaaauaaggaaugggaccuuuuuguugaacgcagcaaagcuuacagcaacuguuacccuuaugaugugccggauuaugccucccuuaggucacuaguugccucaucaggcacccuggaguuuaucaaugaagacuucaauuggacuggagucgcucaggaugggaaaagcuaugcuugcaaaaggggaucuguuaaagguuucuuuaguagauugaauugguugcacaaauuagaauacaaauauccagcgcugaacgugacuaugccaaacaauggcaaauuugacaaauuguacauuugggggguucaccacccgagcacggacagugaccaaaccagccuauauguucgagcaucagggggagucacagucucuaccaaaagaagccaacaaacuguaaucccgaguaucgggucuagacccuggguaaggggucuguccaguagaauaagcaucuauuggacaauaguaaaaccgggagacauacuuuugauuaauagcacagggaaucuaauugcuccucgggguuacuucaaaauacgaaaugggaaaagcucaauaaugaggucagaugcacccauuggcaacugcaguucugaaugcaucacuccaaauggaagcauucccaaugacaaaccuuuucaaaauguaaacaggaucacauauggggccugccccagauauguuaagcaaaacacucugaaauuggcaacagggaugcggaauguaccagagaaacaaacuagaggcauauucggcgcaaucgcagguuucauagaaaaugguugggagggaaugguagacgguugguacgguuucaggcaucaaaauucugagggcacaggacaagcagcagaucuuaaaagcacucaagcagcaaucgaucaaaucaacgggaaacugaauagguuaaucgagaaaacgaacgagaaauuccaucaaaucgaaaaagaauucucagaaguagaagggagaauucaggaccucgagaaauauguugaagacacuaaaauagaucucuggucuuacaacgcggagcuucuuguugcccuggagaaccaacauacaauugaucuaacugacucagaaaugaacaaacuguuugaaagaacaaggaagcaacugagggaaaaugcugaggacaugggcaaugguugcuucaaaauauaccacaaaugugacaaugccugcauagggucaaucagaaauggaacuuaugaccaugauguauacagagacgaagcauuaaacaaccgguuccagaucaaagguguugagcugaagucaggauacaaagauuggauccuauggauuuccuuugccauaucaugcuuuuugcuuuguguuguuuugcugggguucaucaugugggccugccaaaaaggcaacauuaggugcaacauuugcauuuga

SEQ ID NO: 40515 - RNA, 1701 nt, Artificial Sequence
  derived and/or modified CDS sequence (wt) from hemagglutinin__InfluenzaA__AFG72460
augaagacuaucauugcuuugagcuacauuuuaugucugguguucgcucaaaaacuucccggaaaugacaacagcacagcaacgcugugccugggacaccaugcagugccaaacggaacgcuagugaaaacaaucacgaaugaucaaauugaagugacuaaugcuacugagcugguucagaguuccucaacagguagaauaugcgacaguccucaccgaauccuugauggaaaaaacugcacacugauagaugcucuauugggagacccucauugugauggcuuccaaaauaaggaaugggaccuuuuuguugaacgcagcaaagcuuacagcaacuguuacccuuaugaugugccggauuaugccucccuuaggucacuaguugccucaucaggcacccuggaguuuaucaaugaagacuucaauuggacuggagucgcucaggaugggaaaagcuaugcuugcaaaaggggaucuguuaacaguuucuuuaguagauugaauugguugcacaaauuagaauacaaauauccagcgcugaacgugacuaugccaaacaauggcaaauuugacaaauuguacauuugggggguucaccacccgagcacggacagugaccaaaccagccuguauguucgagcaucagggagagucacagucucuaccaaaagaagccaacaaacuguaaucccgaauaucgggucuagacccuggguaaggggccuguccaguagaauaagcaucuauuggacaauaguaaaaccgggagacauacuuuugauuaauagcacagggaaucuaauugcuccucgggguuacuucaaaauacgaaaugggaaaaguucaauaaugaggucagaugcacccauuggcaacugcaguucugaaugcaucacuccaaauggaagcauucccaaugacaaaccuuuucaaaauguaaacaggaucacauauggggccugccccagauauguuaagcaaaacacucugaaauuggcaacagggaugcggaauguaccagagaaacaaacuagaggcauauucggcgcaauugcagguuucauagaaaaugguugggagggaaugguagacgguugguacgguuucaggcaucagaauucugagggcacaggacaagcagcagaucuuaaaagcacucaagcagcaaucgaccaaaucaacgggaaacugaauagguuaaucgagaaaacgaacgagaaauuccaucaaaucgaaaaagaauucucagaaguagaagggagaauucaggaccucgagaaauauguugaagacacuaaaauagaucucuggucuuacaacgcggagcuucuuguugcccuggagaaccaacauacaauugaucuaacugacucagaaaugaacaaacuguuugaaagaacaaggaagcaacugagggaaaaugcugaggacaugggcaaugguugcuucaaaauauaccacaaaugugacaaugccugcauaggaucaaucagaaauggaacuuaugaccaugauguauacagagacgaagcauuaaacaaccgguuccagaucaaagguguugagcugaagucaggauacaaagauuggauccuauggauuuccuuugccauaucaugcuuuuugcuuuguguuguuuugcugggguucaucaugugggccugccaaaaaggcaacauuaggugcaacauuugcauuuga

SEQ ID NO: 40516 - RNA, 1701 nt, Artificial Sequence
  derived and/or modified CDS sequence (wt) from hemagglutinin__InfluenzaA__AFG72504
augaagacuaucauugcuuugagcuacauuuuaugucugguuuucgcucaaaaacuucccggaaaugacaacagcacagcaacgcugugccugggacaccaugcagugccaaacggaacgcuagugaaaacaaucacgaaugaucaaauugaagugacuaaugcuacugagcugguucagaguuccucaacagguagaauaugcgacaguccucaccgaauccuugauggaaaaaacugcacacugauagaugcucuauugggagacccucauugugauggcuuccaaaauaaggaaugggaccuuuuuguugaacgcagcaaagcuuacagcaacuguuacccuuaugaugugccggauuaugccucccuuaggucacuaguugccucaucaggcacccuggaguuuaucaaugaagacuucaauuggacuggagucgcucaggaugggaaaagcuaugcuugcaaaaggggaucuguuaaaaguuucuuuaguagauugaauugguugcacaaauuagaauacaaauauccagcgcugaacgugacuaugccaaacaauggcaaauuugacaaauuguacauuugggggguucaccacccgagcacggacagugaccaaaccagccuauauguucgagcaucagggagagucacagucucuaccaaaagaagccaacaaacuguaaucccgaauaucggguuuagacccuggguaaggggucuguccaguagaauaagcaucuauuggacaauaguaaaaccgggagacauacuuuugauuaauagcacagggaaucuaauugcuccucgggguuacuucaaaauacgaaaugggaaaagcucaauaauuaggucagaugcacccauuggcaacugcaguucugaaugcaucacuccaaauggaagcauucccaaugacaaaccuuuucaaaauguaaacaggaucacauauggggccugccccagauauguuaagcaaaacacucugaaguuggcaacagggaugcggaauguaccagagaaacaaacuagaggcauauucggcgcaaucgcagguuucauagaaaaugguugggagggaaugguagacgguugguacgguuucaggcaucaaaauucugagggcacaggacaagcagcagaucuuaaaagcacucaagcagcaaucgaccaaaucaacgggaaacugaauagguuaaucgagaaaacgaacgagaaauuccaucaaaucgaaaaagaauucucagaaguagaagggagaauucaggaccucgagaaauauguugaagacacuaaaauagaucucuggucuuacaacgcggggcuucuuguugcccuggagaaccaacauacaauugaucuaacugacucagaaaugaacaaacuguuugaaagaacaaggaagcaacugagggaaaaugcugaggacaugggcaaugguugcuucaaaauauaccacaaaugugacaaugccugcauagggucaaucagaaauggaacuuaugaccaugauguauacagagacgaagcauuaaacaaccgguuccagaucaaagguguugagcugaagucaggauacaaagauuggauccuauggauuuccuuugccauaucaugcuuuuugcuuuguguuguuuugcugggguucaucaugugggccugccaaaaaggcaacauuaggugcaacauuugcauuuga

SEQ ID NO: 40517 - RNA, 1701 nt, Artificial Sequence
  derived and/or modified CDS sequence (wt) from hemagglutinin__InfluenzaA__AFG72515
augaagacuaucauugcuuugagcuacauuuuaugucugguuuucgcucaaaaacuucccggaaaugacaacagcacagcaacgcugugccugggacaccaugcagugccaaacggaacgcuagugaaaacaaucacgaaugaucaaauugaagugacuaaugcuacugagcugguucagaguuccccaacagguagaauaugcgacaguccucaccgaauccuugauggaaagaacugcacacugauagaugcucuauugggagacccucauugugauggcuuccaaaauaaggaaugggaccuuuuuguugaacgcagcaaagcuuacagcaacuguuacccuuaugaugugccggauuaugccucccuuaggucacuaguugccucaucaggcacccuggaguuuaucaacgaaaacuucaauuggacuggagucgcucaggaugggaaaagcuaugcuugcaaaaggggaucuguuaacaguuucuuuaguagauugaauugguugcacaaauuagaauacaaauauccagcgcugaacgugacuaugccaaacaauggcaaauuugacaaauuguacauuugggggguucaccacccgagcacggacagugaccaaaccagccuauauguccgagcaucagggagagucacagucucuaccaaaagaagccaacaaacuguaaucccggauaucggguauagaccauggguaaggggucuguccaguagaauaagcaucuauuggacaauaguaaaaccgggagacauacuucugauuaauagcacagggaaucuaauugcuccucgggguuacuucaaaauacgaaaugggaaaagcucaauaaugaggucagaugcacccauuggcaacugcaguucugaaugcaucacuccaaauggaagcauucccaaugacaaaccuuuucaaaauguaaacaggaucacauauggggccugucccagauauguuaagcaaaacacucugaaauuggcaacagggaugcggaauguaccagagaaacaaacuagaggcauauucggcgcaaucgcagguuucauagaaaaugguugggagggaaugguagacgguugguacgguuucaggcaucaaaauucugagggcacaggacaagcugcagaucuuaaaagcacucaagcagcaaucgaccaaaucaacgggaagcugaauagguuagucgagaaaacgaacgagaaauuccaucaaaucgaaaaagaauucucagaaguagaagggagaauucaggaccucgagaaauauguugaagacacuaaaauagaucucuggucuuacaaugcggagcuucuuguugcucuggagaaccaacauacaauugaucuaacugacucagaaaugaacaaacuguuugaaagaacaaggaagcaacugagggaaaaugcugaggacaugggcaaugguuguuucaaaauauaccacaaaugugacaaugccugcauagggucaaucagaaauggaacuuaugaccaugauguauacagagacgaagcauuaaacaaccgguuccagaucaaagguguugagcugaagucaggauacaaagauuggauucuauggauuuccuuugccauaucaugcuuuuugcuuuguguuguuuugcuuggguucaucaugugggccugccaaaaaggcaacauuaggugcaacauuugcauuuga

SEQ ID NO: 40518 - RNA, 1701 nt, Artificial Sequence
  derived and/or modified CDS sequence (wt) from hemagglutinin__InfluenzaA__AFG72526
augaagacuaucauugcuuugagcuacauuuuaugucugguuuucgcucaaaaacuucccggaaaugacaacagcacagcaacgcugugccugggacaccaugcagugccaaacggaacgcuagugaaaacaaucacgaaugaucaaauugaagugacuaaugcuacugagcugguucagaguuccucaacagguagaauaugcgacaguccucaccgaauccuugauggaaaaaacugcacacugauagaugcucuauugggagacccucauugugauggcuuccaaaauaaggaaugggaccuuuuuguugaacgcagcaaagcuuacagcagcuguuacccuuaugaugugccggauuaugccucccuuaggucacuaguugccucaucaggcacccuggaguuuaucaaugaagacuucaauuggacuggagucgcucaggaugggaaaagcuaugcuugcaaaaggggaucuguuaacaguuucuuuaguagauugaauugguugcacaaauuagaauacaaauauccagcgcugaacgugacuaugccaaacaauggcaaauuugacaaauuguacauuugggggguucaucacccgagcacggacagugaccagaccagccuauauguucgagcaucagggagagucauagucucuaccaaaagaagccaacaaacuguaaucccgaauaucgggucuagacccuggguaaggggucuguccaguagaauaagcaucuauuggacaauaguaaaaccgggagacauacuuuugauuaauagcacagggaaucuaauugcuccucgggguuacuuuaaaauacgaacugggaaaagcucaauaaugaggucagaugcacccauuggcaacugcaguucugaaugcaucacuccaaauggaagcauucccaaugacaaaccuuuucaaaauguaaacaggaucacauauggggccugccccagauauguuaagcaaaacacucugaaauuggcaacagggaugcggaauguaccagagaaacaaacuagaggcauauucggcgcaaucgcagguuucauagaaaaugguugggaaggaaugguagacgguugguacgguuucaggcaucaaaauucugagggcacaggacaagcagcagaucuuaaaagcacucaaacagcaaucaaccaaaucaacgggaaacugaauagguugaucgagaaaacgaacgagaaauuccaucaaaucgaaaaagaauucucagaaguagaagggagaauucaggaccucgagaaauauguugaagacacuaaaauagaucucuggucuuacaacgcggagcuucuuguugcccuggagaaccaacauacaauugaucuaacugacucagaaaugaacaaacuguuugaaagaacaaggaagcaacugagggaaaaugcugaggacaugggcaaugguugcuucaaaauauaccacaaaugugacaaugccugcauagggucaaucagaaauggaacuuaugaccaugauguauacagagacgaagcauuaaacaaccgguuccagaucaaagguguugagcugaagucaggauacaaagauuggauccuauggauuuccuuugccauaucaugcuuuuugcuuuguguuguuuugcugggguucaucaugugggccugccaaaaaggcaacauuaggugcaacauuugcauuuga

SEQ ID NO: 40519 - RNA, 1701 nt, Artificial Sequence
  derived and/or modified CDS sequence (wt) from hemagglutinin__InfluenzaA__AFG72581
augaagaccaucauugcuuugagcuacauuuuaugucugguuuucgcucaaaaacuucccggaaaugacaacagcacagcaacgcugugccugggacaccaugcagugccaaacggaacgcuagugaaaacaaucacgaaugaucaaauugaagugacuaaugcuacugagcugguucagaguuccucaacagguagaauaugcgacaguccucaccgaauccuugauggaaaaaacugcacacugauagaugcucuauugggagacccucauugugauggcuuccaaaauaaggaaugggaccuuuuuguugaacgcagcaaagcuuacagcaacuguuacccuuaugaugugccggauuaugccucccuuaggucacuaguugccucaucaggcacccuggaguuuaucaaugaagacuucaauuggacuggagucgcucaggaugggaaaagcuaugcuugcaaacggggaucuguuaacaguuucuuuaguagauugaauugguugcacaaauuagaauacaaauauccagcgcugaacgugacuaugccaaacaauggcaaauuugacaaauuguacauuugggggguucaccacccgagcacggacagugaccaaaccagccuauauguucgagcaucagggggagucacagucucuaccaaaagaagccaacaaacuguaaucccgaauaucggguauagacccuggguaaggggucuguccaguagaauaagcaucuauuggacaauaguaaaaccaggagacauacuuuugauuaauagcacagggaaucuaauugcuccucgggguuacuucaaaauacgaaaugggaaaagcucaauaaugaggucagaugcacccauuggcaacugcaguucugaaugcaucacuccaaauggaagcauuuccaaugacaaaccuuuucaaaauguaaacaggaucacauauggggccugccccagauauguuaagcaaaacacucugaaauuggcaacagggaugcggaauguaccagagaaacaaacuagaggcauauucggcgcaaucgcagguuucauagaaaaugguugggagggaaugguagacgguugguacgguuucaggcaucaaaauucugagggcacaggacaagcagcagaucuuaaaagcacucaagcagcaaucgaccaaaucaacgggaaacugaauagguuaaucgagaaaacgaacgagaaauuccaucaaaucgaaaaagaguucucagaaguagaagggagaauucaggaccucgagaaauauguugaagacacuaaaauagaucucuggucuuacaacgcggagcuucuuguugcccuggagaaccaacauacaauugaucuaacugacucagaaaugaacaaacuguuugaaagaacaaggaagcaacugagggaaaaugccgaggacaugggcaaugguugcuucaaaauauaccacaaaugugacaaugccugcauagggucaaucagaaauggaacuuaugaccaugauguauacagagacgaagcauuaaacaaccgguuccagaucaaagguguugagcugaagucaggauacaaagauuggauccuauggauuuccuuugccauaucaugcuuuuugcuuuguguuguuuugcugggguucaucaugugggccugccaaaaaggcaacauuaggugcaacauuugcauuuga

SEQ ID NO: 40520 - RNA, 1701 nt, Artificial Sequence
  derived and/or modified CDS sequence (wt) from hemagglutinin__InfluenzaA__AFG72603
augaagacuaucauugcuuugagcuacauuuuaugucugguuuucgcucaaaaacuucccggaaaugacaacagcacagcaacgcugugccugggacaccaugcagugccaaacggaacgcuagugaaaacaaucacgaaugaucaaauugaggugacuaaugcuacugagcugguucagaguuccucaacagguagaauaugcgacaguccucaccgaauccuugauggaaaaaacugcacacugauagaugcucuauugggagacccucauugugauggcuuccaaaauaaggaaugggaccuuuuuguugagcgcagcaaagcuuacagcaacuguuacccuuaugaugugccggauuaugccucccuuagaucacuaguugccucaucaggcacccuggaguuuaccaaggaaggcuucaauuggacuggagucgcucaggaugggaaaagcuaugcuugcaaaaggggaucuguuaacaguuucuuuaguagauugaauugguugcacaaauuagaauacaaauauccagcacugaacgugacuaugccaaacaaugacaaauuugacaaauuguacauuugggggguucaccacccgagcacggacagugaccaaaccagccuauauguucaagcaucagggagagucacagucucuaccaaaagaagccaacaaacuguaaucccgaauaucgggucuagacccuggguaagggguaucuccaguagaauaagcaucuauuggacaauaguaaaaccgggagacauacuuuugauuaacagcacagggaaucuaauugcuccucgggguuacuucaaaauacgaaaugggaaaagcucaauaaugaggucagaugcacccauuggcaacugcaaaucugaaugcaucacuccaaauggaagcauucccaaugacaaaccuuuucaaaauguaaacaggaucacauauggggccugucccagauauguuaagcaaaacacucugaaguuggcaacagggaugcggaauguaccagagaaacaaacuagaggcauauucggcgcaaucgcagguuucauagaaaaugguugggagggaaugguagacgguugguacgguuucaggcaucaaaauucugagggcacaggacaagcagcagaucuuaaaagcacucaagcagcaaccgaccaaaucaacgggaaacugaauagguuaaucgagaaaacgaacgagaaauuccaucaaaucgaaaaagaauucucagaaguagaagggagaauucaggaccucgagaaauauguugaagacacuaaaauagaucucuggucuuacaacgcggagcuucuuguugcccuggagaaccaacauacaauugaucuaacugacucagaaaugaacaaacuguuugaaagaacaaggaagcaacugagggaaaaugcugaggacaugggcaaugguugcuucaaaauauaccacaaaugugacaaugccugcauagggucaaucagaaauggaacuuaugaccaugauguauacagagacgaagcauuaaacaaccgguuccagaucaaagguguugagcugaagucaggauacaaagauuggauccuauggauuuccuuugccauaucaugcuuuuugcuuuguguuguuuugcugggguucaucaugugggccugccaaaaaggcaacauuaggugcaacauuugcauuuga

SEQ ID NO: 40521 - RNA, 1701 nt, Artificial Sequence
  derived and/or modified CDS sequence (wt) from hemagglutinin__InfluenzaA__AFG72614
augaagacuaucauugcuuugagcuacauuuuaugucugguuuucgcucaaaaacuucccggaaaugacaacagcacggcaacgcugugccugggacaccaugcagugccaaacggaacgcuagugaaaacaaucacgaaugaccaaauugaagugacuaaugcuacugagcugguucagaguuccucaacagguagaauaugcgacaguccucaccgaauccuugauggaaaaaacugcacacugauagaugcucuauugggagacccucauugugauggcuuccaaaauaaggaaugggaccuuuuuguugaacgcagcaaagcuuacagcaacuguuacccuuaugaugugccggauuaugccucccuuaggucacuaguugccucauccggcacccuggaguuuaccaaugaaggcuucaauuggacuggagucgcucaggauggaacaagcuauucuugcaaaaggggaucuguuaaaaguuucuuuaguagauugaauugguugcacaaauuagaauacaaauauccagcacugaacguggcuaugccaaacaaugacaaauuugacaaauuguacauuugggggguucaccacccgaguacggacagugaccaaaccagccuauauguucaagcaucagggagagucacagucucuaccaaaagaagccaacaaacuguaaucccgaauaucgggucuagacccuggguaaggggugucuccagcagaauaagcaucuauuggacaauaguaaaaccgggagacauacuuuugauuaacagcacagggaaucuaauugcuccucgggguuacuucaaaauacgaagugggaaaagcucaauaaugaggucagaugcacccauuggcaacugcaauucugaaugcaucacuccaaauggaagcauucccaaugacaaaccuuuucaaaauguaaacaggaucacauauggggccugucccagauauguuaagcaaaacacucugaaauuggcaacagggaugcggaauguaccagagaaacaaacuagaggcauauucggcgcaaucgcagguuucauagaaaaugguugggagggaaugguagacgguugguacgguuucaggcaucaaaauucugagggcacaggacaagcagcagaucuuaaaagcacucaagcagcaaucaaccaaaucaacgggaaacugaauagguuaaucgagaaaacgaacgagaaauuccaucaaaucgaaaaagaauucucagaaguagaagggagaauucaggaccucgagaaauauguugaagacacuaaaauagaucucuggucuuacaacgcggagcuucuuguugcccuggagaaccaacauacaauugaucuaacugacucagaaaugaacaaacuguuugaaagaacaaggaagcaacugagggaaaaugcugaggacaugggcaaugguugcuucaaaauauaccacaaaugugacaaugccugcauagggucaaucagaaauggaacuuaugaccaugauguauacagagacgaagcauuaaacaaccgguuccagaucaaagguguugagcugaagucaggauacaaagauuggauccuauggauuuccuuugccauaucaugcuuuuugcuuuguguuguuuugcugggguucaucaugugggccugccaaaaaggcaacauuaggugcaacauuugcauuuga

SEQ ID NO: 40522 - RNA, 1701 nt, Artificial Sequence
  derived and/or modified CDS sequence (wt) from hemagglutinin__InfluenzaA__AFG72625
augaagacuaucauugcuuugagcuacauuuuaugucugguuuucgcucaaaaacuucccggaaaugacaacagcacggcaacgcugugccugggacaccaugcagugccaaacggaacgcuagugaaaacaaucacgaaugaccaaauugaagugacuaaugcuacugagcugguucagaguuccucaacagguagaauaugcgacaguccucaccgaauccuugauggaaaaaacugcacacugauagaugcucuauugggagacccucauugugauggcuuccaaaauaaggagugggaccuuuuuguugaacgcagcaaagcuuacagcaacuguuacccuuaugaugugccggauuaugcuucccuuaggucacuaguugccucauccggcacccuggaguuuaccaaugaaggcuucaauuggacuggagucgcucaggauggaacaagcuaugcuugcaaaaggggaucuguuaaaaguuucuuuaguagauugaauugguugcacaaauuagaauacaaauauccagcacugaacgugacuaugccaaacaaugacaaauuugacaaauuguacauuugggggguucaccacccgaguacggacagugaccaaaccagccuauauguucaagcaucagggagagucacagucucuaccaaaagaagccaacaaacuguaaucccgaauaucgggucuagacccuggguaagggguaucuccagcagaauaagcaucuauuggacaauaguaaaaccgggagacauacuuuugauuaaaagcacagggaaucuaauugcuccucgggguuacuucaaaauacgaagugggaaaagcucaauaaugaggucagaugcacccauuggcaacugcaauucugaaugcaucacuccaaauggaagcauucccaaugacaaaccuuuucaaaauguaaacaggaucacauauggggccugucccagauauguuaagcaaaacacucugaaauuggcaacagggaugcggaauguaccagagaaacaaacuagaggcauauucggcgcaaucgcagguuucauagaaaaugguugggagggaaugguagacgguugguacgguuucaggcaucaaaauucugagggcacaggacaagcagcagaucuuaaaagcacucaagcagcaaucaaccaaaucaacgggaaacugaauagguuaaucgagaaaacgaacgagaaauuccaucaaaucgaaaaagaauucucagaaguagaagggagaauucaggaccucgagaaauauguugaagacacuaaaauagaucucuggucuuacaacgcggagcuucuuguugcccuggagaaccaacauacaauugaucuaacugacucagaaaugaacaaacuguuugaaagaacaaggaagcaacugagggaaaaugcugaggacaugggcaaugguugcuucaaaauauaccacaaaugugacaaugccugcauagggucaaucagaaauggaacuuaugaccaugauguauacagagacgaagcauuaaacaaccgguuccagaucaaagguguugagcugaagucaggauacaaagauuggauccuauggauuuccuuugccauaucaugcuuuuugcuuuguguuguuuugcugggguucaucaugugggccugccaaaaaggcaacauuaggugcaacauuugcauuuga

SEQ ID NO: 40523 - RNA, 1701 nt, Artificial Sequence
  derived and/or modified CDS sequence (wt) from hemagglutinin__InfluenzaA__AFG72636
augaagacuaucauugcuuugagcuacauuuuaugucugguuuucgcucaaaaacuucccggaaaugacaacagcacagcaacgcugugccugggacaccaugcagugccaaacggaacgcuagugaaaacaaucacaaaugaucaaauugaagugacuaaugcuacugagcugguucagaguuccucaacagguagaauaugcgacaguccucaccgaauccuugauggaaaaaacugcacacugauagaugcucuauugggagacccucauugugauggcuuccaaaauaaggaaugggaccuuuuuguugaacgcagcaaagcuuacagcaacuguuacccuuaugaugugccggauuaugcuucccuuaggucacuaguugccucaucaggcacccuggaguuuaccaaugaaggcuucaauuggacuggagucgcucaggaugggaaaagcuaugcuugcaaaaggggaucuguuaaaaguuucuuuaguagauugaauugguugcacaaauuagaauucaaauauccagcacugaacgugacuaugccaaacaaugacaaauuugacaaauuguacauuugggggguucaccacccgagcacggacagugaccaaaccagccuauauguucaagcaucagggagagucacagucucuaccaaaagaagccaacaaacuguaaucccgaauaucggguccagacccugggugagggguaucuccaguagaauaagcaucuauuggacaauaguaaaaccgggagacauacuuuugauuaacagcacagggaaucuaauugcuccucgggguuacuucaaaauacgaaaugggaaaagcucaauaaugaggucagaugcacccauugacaacugcaauucugaaugcaucacuccaaauggaagcauucccaaugacaaaccuuuucaaaauguaaacaggaucacauauggggccugucccagauauguuaagcaaaacacucugaaauuggcaacagggaugcggaauguaccagagaaacaaacuagaggcauauucggcgcaaucgcagguuucauagaaaaugguugggagggaaugguagacgguugguacgguuucaggcaccaaaauucugagggcacaggacaagcagcagaucuuaaaagcacucaagcagcaaucgaucaaaucaacgggaaacugaauagguuaaucgagaaaacgaacgagaaauuccaucaaaucgaaaaagaauucucagaaguagaagggagaauucaggaccucgagaaauauguugaagacacuaaaauagaucucuggucuuacaacgcggagcuucuuguugcccuggagaaucaacauacaauugaucuaacugacucagaaaugaacaaacuguuugaaagaacaaggaagcaacugagggaaaaugcugaggacaugggcaaugguugcuucaaaauauaccacaaaugugacaaugccugcauagggucaaucagaaauggaacuuaugaccaugauguauacagagacgaagcauuaaacaaccgguuccagaucaaagguguugagcugaagucaggauacaaagauuggauccuauggauuuccuuugccauaucaugcuuuuugcuuuguguuguuuugcuaggguucaucaugugggcaugccaaaaaggcaacauuaggugcaacauuugcauuuga

SEQ ID NO: 40524 - RNA, 1701 nt, Artificial Sequence
  derived and/or modified CDS sequence (wt) from hemagglutinin__InfluenzaA__AFG72658
augaagacuaucauugcuuugagcuacauuuuaugucuggcuuucgcucaaaaacuucccggaaaugacaacagcacagcaacgcugugccugggacaccaugcagugccaaacggaacgcuagugaaaacaaucacgaaugaucaaauugaagugacuaaugcuacugagcugguucagaguuccucaacagguagaauaugcgacaguccucaccgaauccuugauggaaaaaacugcacacugauagaugcucuauugggagacccucauugugauggcuuccaaaauaaggaaugggaccuuuuuguugaacgcagcaaagcuuacagcaacuguuacccuuaugaugugccggauuaugccucccuuaggucacuaguugccucaucaggcacccuggaguuuaccaaugaaggcuucaauuggacuggagucgcucaggaugggaaaagcuaugcuugcaaaaggggaucuguuaacaguuucuuuaguagauugaauugguuacacaaauuagaauacaaauauccagcacugaacgugacuaugccaaacaaugacaaauuugacaaauuguacauuugggggguucaccacccgagcacggacagugaccaaaccagccuauauguucaagcaucagggagagucacagucucuaccaaaagaagccaacaaacuguaaucccgaauaucggguccagacccugggugaggggcaucuccaguagaauaagcaucuauuggacaauaguaaaaccgggagacauacuuuugauuaacagcacagggaaucuaauugcuccucgggguuacuucaaaauacgaaaugggaaaagcucaauaaugaggucagaugcacccauugacaacugcaauucugaaugcaucacuccaaauggaagcauucccaaugacaaaccuuuucaaaauguaaacaggaucacauauggggccugucccagauauguuaagcaaaacacucugaaauuggcaacagggaugcggaauguaccagagaaacaaacuagaggcauauucggcgcaaucgcagguuucauagaaaaugguugggagggaaugguagacgguugguacgguuucaggcaucaaaauucugagggcacaggacaagcagcagaucuuaaaagcacucaagcagcaaucgaucaaaucaacgggaaacugaauagguuaaucgagaaaacgaacgagaaauuccaucaaaucgaaaaagaauucucagaaguagaagggagaauucaggaccucgagaaauauguugaagacacuaaaauagaucucuggucuuacaacgcggagcuucuuguugcccuggagaaucaacauacaauugaucuaacugacucagaaaugaacaaacuguuugaaagaacaaggaagcaacugagggaaaaugcugaggacaugggcaaugguugcuucaaaauauaccacaaaugugacaaugccugcauagggucaaucagaaauggaacuuaugaccaugauguauacagagacgaagcauuaaacaaccgguuccagaucaaagguguugagcugaagucaggauacaaagauuggauccuauggauuuccuuugccauaucaugcuuuuugcuuuguguuguuuugcugggguucaucaugugggccugccaaaaaggcaacauuaggugcaacauuugcauuuga

SEQ ID NO: 40525 - RNA, 1701 nt, Artificial Sequence
  derived and/or modified CDS sequence (wt) from hemagglutinin__InfluenzaA__AFG72680
augaagacuaucauugcuuugagcuacauuuuaugucugguuuucgcucaaaaacuucccggaaaugacaacagcacggcaacgcugugccugggacaccaugcagugccaaacggaacgcuagugaaaacaaucacgaaugaccaaauugaagugacuaaugcuacugagcugguucagaguuccucaacagguauaauaugcgacaguccucaccgaauccuugauggaaaaaacugcacacugauagaugcucuauugggagacccucauugugauggcuuccaaaauaaggaaugggaccuuuuuguugaacgcagcaaagcuuacagcaacuguuacccuuaugaugugccggauuaugccucccuuaggucacuaguugccucauccggcacccuggaguuuaccaaugaaggcuucaauuggacuggagucgcucaggauggaacaagcuaugcuugcaaaaggggaucuguuaaaaguuucuuuaguagauugaauugguugcacaaauuagaauacaaauauccagcacugaaugugacuaugccaaacaaugacaaauuugacaaauuguacauuugggggguucaccacccgaguacggacagugaccaaaccagccuauauguucaagcaucagggagagucacagucucuaccagaagaagccaacaaacuguaaucccgaauaucgggucuagacccuggguaaggggugucuccagcagaauaagcaucuauuggacaauaguaaaaccgggagacauacuuuugauuaacagcacagggaaucuaauugcuccucgggguuacuucaaaauacgaagugggaaaagcucaauaaugaggucagaugcacccauuggcaacugcaauucugaaugcaucacuccaaauggaagcauucccaaugacaaaccuuuucaaaauguaaacaggaucacauauggggccugucccagauauguuaagcaaaacacucugaaauuggcaacagggaugcggaauguaccagagaaacaaacuagaggcauauucggcgcaaucgcagguuucauagaaaaugguugggagggaaugguagacgguugguacgguuucaggcaucaaaauucugagggcacaggacaagcagcagaucuuaaaagcacucaagcagcaaucaaccaaaucaacaggaaacugaauagguuaaucgagaaaacgaacgagaaauuccaucaaaucgaaaaagaauucucagaaguagaagggagaauucaggaccucgagaaauauguugaagacacuaaaauagaucucuggucuuacaacgcggagcuucuuguugcccuggagaaccaacauacaauugaucuaacugacucagaaaugaacaaacuguuugaaagaacaaggaagcaacugagggaaaaugcugaggacaugggcaaugguugcuucaaaauauaccacaaaugugacaaugccugcauagggucaaucagaaauggaacuuaugaccaugauguauacagggacgaagcauuaaacaaccgguuccagaucaaagguguugagcugaagucaggauacaaagauuggauccuauggauuuccuuugccauaucaugcuuuuugcuuuguguuguuuugcugggguucaucaugugggccugccaaaaaggcaacauuaggugcaacauuugcauuuga

SEQ ID NO: 40526 - RNA, 1701 nt, Artificial Sequence
  derived and/or modified CDS sequence (wt) from hemagglutinin__InfluenzaA__AFG72691
augaagacuaucauugcuuugagcuacauuuuaugucugguuuucgcucaaaaacuucccggaaaugacaacagcacggcaacgcugugccugggacaccaugcagugccaaacggaacgcuagugaaaacaaucacgaaugaccaaauugaagugacuaaugcuacugagcugguucagaguuccucaacagguagaauaugcgacaguccucaccgaauccuugauggaaaaaacugcacacugauagaugcucuauugggagacccucauugugauggcuucaaaaauaaggaaugggaccuuuuuguugaacgcagcacagcuuacagcaacuguuacccuuaugaugugccggauuaugccucccuuaggucacuaguugccucauccggcacccuggaguuuaccaaugaaggcuucaauuggacuggagucgcucaggauggaacaagcuaugccugcaaaaggggaucuguuaaaaguuucuuuaguagauugaauugguugcacaaauuagaauacaaauauccagcacugaacgugacuaugccaaacaaugacaaauuugacaaauuguacauuugggggguucaccacccgaguacggacagugaccaaaccagccuauauguucaagcaucagggagagucacagucucuaccaaaagaagccaacaaacuguaaucccgaauaucgggucuagacccuggguaaggggugucuccagcagaauaagcaucuauuggacaauaguaaaaccgggagacauacuuuugauuaacagcacagggaaucuaauugcuccucgggguuacuucaaaauacgaagugggaaaagcucaauaaugaggucagaugcacccauugacaacugcaauucugaaugcaucacuccaaauggaagcauucccaauggcaaaccuuuucaaaauguaaacaggaucacauauggggccugucccagauauguuaagcaaaacacucuaaaauuggcaacagggaugcggaauguaccagagaaacaaacuagaggcauauucggcgcaaucgcagguuucauagaaaaugguugggagggaaugguagacgguugguacgguuucaggcaucaaaauucugagggcacaggacaagcagcagaucuuaaaagcacucaagcagcaaucaaccaaaucaacgggaaacugaauagguuaaucgagaaaacgaacgagaaauuccaucaaaucgaaaaagaauucucagaaguagaagggagaauucaggaccucgagaaauauguugaagacacuaaaauagaucucuggucuuacaacgcggagcuucuuguugcccuggagaaccaacauacaauugaucuaacugacucagaaaugaacaaacuguuugaaagaacaagaaagcaacugagggaaaaugcugaggacaugggcaaugguugcuucaaaauauaucacaaaugugacaaugccugcauagggucaaucagaaauggaacuuaugaccaugauguauacagagacgaagcauuaaacaaccgguuccagaucaaagguguugagcugaagucaggauacaaagauuggauccuauggauuuccuuugccauaucaugcuuuuugcuuuguguuguuuugcugggguucaucaugugggccugccaaaaaggcaacauuaggugcaacauuugcauuuga

SEQ ID NO: 40527 - RNA, 1701 nt, Artificial Sequence
  derived and/or modified CDS sequence (wt) from hemagglutinin__InfluenzaA__AFG72713
augaagauuaucauugcuuugagcuacauuuuaugucugguuuucgcucaaaaacuucccggaaaugacaacagcacggcaacgcugugccugggacaccaugcagugccaaacggaacgcuagugaaaacaaucacgaaugaccaaauugaagugacuaaugcuacugagcugguucagaguuccucaacagguagaauaugcgacaguccucaccaaauccuugaugggaaaaacugcacacugauagaugcucuauugggagacccucauugugauggcuucaaaaauaaggaaugggaccuuuuuguugaacgcagcacagcuuacagcaacuguuacccuuaugaugugccggauuaugccucccuuaggucacuaguugccucaucgggcacccuggaguuuaccaaugaaggcuucaauuggacuggagucgcucaggauggaacaagcuaugcuugcaaaaggggaucuguuaaaaguuucuuuaguagauugaauugguugcacaaauuagaauacaaauauccagcacugaacgugacuaugccaaacaaugacaaauuugacaaauuguacauuugggggguucaccacccgaguacggacagugaccaaaccagccuauauguucaagcaucagggagagucacagucucuaccaaaagaagccaacaaacuguaaucccgaauaucgggucuagacccuggguaagggguaucuccagcagaauaagcaucuauuggacaauaguaaaaccgggagacauacuuuugauuagcagcacagggaaucuaauugcuccucgggguuacuucaaaauacgaagugggaaaagcucaauaauaaggucggaugcacccauugacaacugcaauucugaaugcaucacuccaaauggaagcauucccaaugacaaaccuuuucaaaauguaaacaggaucacauauggggccugucccagauauguuaagcaaaacacucugaaauuggcaacagggaugcggaauguaccagagaaacaaacuagaggcauauucggcgcaaucgcagguuucauagaaaaugguugggagggaaugguagacgguugguacgguuucaggcaucaaaauucugagggcacaggacaagcagcagaucuuaaaagcacucaagcagcaaucaaccaaaucaacgggaaacugaauagguuaaucgagaaaacgaacgagaaauuccaucaaaucgaaaaagaauucucagaaguagaagggagaauucaggaccucgagaaauauguugaagacacuaaaauagaucucuggucuuacaacgcggagcuccuuguugcccuggagaaccaacauacaauugaucuaacugacucagaaaugaacaaacuguuugaaagaacaagaaagcaacugagggaaaaugcugaggacaugggcaaugguugcuucaaaauauaccacaaaugugacaaugccugcauagggucaaucagaaauggaacuuaugaccaugauguauacagagacgaagcauuaaacaaccgguuccagaucaaagguguugagcugaagucaggauacaaagauuggauccuauggauuuccuuugccauaucaugcuuuuugcuuuguguuguuuugcugggguucaucaugugggccugccaaaaaggcaacauuaggugcaacauuugcauuuga

SEQ ID NO: 40528 - RNA, 1701 nt, Artificial Sequence
  derived and/or modified CDS sequence (wt) from hemagglutinin__InfluenzaA__AFG72724
augaagacuaucauugcuuugagcuacauucuaugucugguuuucgcucaaaaacuucccggaaaugacaacagcacggcaacgcugugccugggacaccaugcagugccaaacggaacgcuagugaaaacaaucacaaaugaccaaauugaaguuacuaaugcuacugagcugguucagaguuccucaacagguagaauaugcgacaguccucaccgaauccuugauggaaaaaacugcacacugauagaugcucuauugggagacccucauugugauggcuuccaaaauaaggaaugggaccuuuuuguugaacgcagcaaagcuuacagcaacuguuacccuuaugaugugccggauuaugccucccuuaggucacuaguugccucauccggcacccuggaguuuaccaaugaaggcuucaauuggacuggaguugcucaggauggaacaagcuaugcuugcaaaaggggaucuguuaaaaguuucuuuaguagauugaauugguugcacaaauuagaauacaaauauccagcacugaacguuacuaugccaaacaaugacaaauuugacaaauuguacauuugggggguucaccacccgaguacggacagugaccaaaccagccuauauguucaagcaucagggagagucacagucucuaccaaaagaagccaacaaacuguaaucccgaauaucgggucuagacccuggguuaggggugucuccagcagaauaagcaucuauuggacaauaguaaaaccgggagacauacuuuugauuaacagcacagggaaucuaauugcuccucgggguuacuucaaaauacgaagugggaaaagcucaauaaugaggucagaugcacccauugacaacugcaauucugaaugcaucacuccaaauggaagcauucccaaugacaaaccuuuucaaaauguaaacaggaucacauauggggccugucccagauauguuaagcaaaacacucugaaauuggcaacagggaugcggaauguaccagagaaacaaacuagaggcauauucggcgcaaucgcagguuucauagaaaaugguugggagggaaugguagacgguugguacgguuucaggcaucaaaauucugagggcacaggacaagcagcagaucuuaaaagcacucaagcagcaaucaaccaaaucaacgggaaacugaauagguuaaucgagaaaacgaacgagaaauuccaucaaaucgaaaaagaauucucagaaguagaagggagaauucaggaccucgagaaauauguugaagacacuaaaauagaucucuggucuuacaacgcggagcuucuuguugcccuggagaaccaacauacaauugaucuaacugacucagaaaugaacaaacuguuugaaagaacaaggaagcaacugagggaaaaugcugaggacaugggcaaugguugcuucaaaauauaccacaaaugugacaaugucugcauagggucaaucagaaauggaacuuaugaccaugauguauacagagacgaagcauuaaacaaucgguuccagaucaaagguguugagcugaagucaggauacaaagauuggauccuauggauuuccuuugccauaucaugcuuuuugcuuuguguuguuuugcugggguucaucaugugggccugccaaaaaggcaacauuaggugcaacauuugcauuuga

SEQ ID NO: 40529 - RNA, 1701 nt, Artificial Sequence
  derived and/or modified CDS sequence (wt) from hemagglutinin__InfluenzaA__AFG72735
augaagacuaucauugcuuugagcuacauuuuaugucugguuuucgcucaaaaacuucccggaaaugacaacagcacggcaacgcugugccugggacaccaugcagugccaaacggaacgcuagugaaaacaaucacgaaugaccaaauugaagugacuaaugcuacugagcugguucagaguuccucaacagguagaauaugcgacaguccucaccgaauccuugauggaaaaaacugcacacugauagaugcucuauugggagacccucauugugauggcuucaaaaauaaggaaugggaccuuuuuguugaacgcagcacagcuuacagcaacuguuacccuuaugaugugccggauuaugccucccuuaggucacuaguugccucauccggcacccuggaguuuaccaaugaaggcuucaauuggacuggagucgcucaggauggaacaagcuaugcuugcaaaaggggaucuguuaaaaguuucuuuaguagauugaauugguugcacaaauuagaauacaaauauccagcacugaccgugacuaugccaaacaaugacaaauuugacaaauuguacauuugggggguucaccacccgaguacggacagugaccaaaccagcauauauguucaagcaucagggagagucacagucucuaccaaaagaagccaacaaacuguaaucccgaauaucgggucuagacccuggguaaggggugucuccagcagaauaagcaucuauuggacaauaguaaaaccgggagacauacuuuugauuaacagcacagggaaucuaauugcuccucgggguuacuucaaaauacgaagugggaaaagcucaauaaugaggucagaugcacccauugacaacugcaauucugaaugcaucacuccaaauggaagcauucccaaugacaaaccuuuucaaaauguaaacaggaucacauauggggccugucccagauauguuaagcaaaacacucuaaaauuggcaacagggaugcggaauguaccagagaaacaaacuagaggcauauucggcgcaaucgcagguuucauagaaaaugguugggagggaaugguagacgguugguacgguuucaggcaucaaaauucugagggcacaggacaagcagcagaucuuaaaagcacucaagcagcaaucaaccaaaucaacgggaaacugaauagguuaaucgagaaaacgaacgagaaauuccaucaaaucgaaaaagaauucucagaaguagaagggagaauucaggaccucgagaaauauguugaagacacuaaaauagauaucuggucuuacaacgcggagcuucuuguugcccuggagaaccaacauacaauugaucuaacugacucagaaaugaacaaacuguuugaaagaacaagaaagcaacugagggaaaaugcugaggacaugggcaaugguugcuucaaaauauaucacaaaugugacaaugccugcauagggucaaucagaaauggaacuuaugaccaugauguauacagagacgaagcauuaaacaaccgguuccagaucaaagguguugagcugaagucaggauacaaagauuggauccuauggauuuccuuugccauaucaugcuuuuugcuuuguguuguuuugcugggguucaucaugugggccugccaaaaaggcaacauuaggugcaacauuugcauuuga

SEQ ID NO: 40530 - RNA, 1701 nt, Artificial Sequence
  derived and/or modified CDS sequence (wt) from hemagglutinin__InfluenzaA__AFG72757
augaagacuaucauugcuuugagcuacauuuuaugucugguuuucgcucaaaaaauucccggaaaugacaacagcacggcaacgcugugccugggacaccaugcagugccaaacggaacgcuagugaaaacaaucacgaaugaccaaauugaagugacuaaugcuacugagcugguucagaguuccucaacagguagaauaugcgacaguccucaccgaauccuugauggagaaaacugcacacugauagaugcucuauugggagacccucauugugauggcuuccaaaauaaggaaugggaccuuuuuguugaacgcagcaaagccuacagcaacuguuacccuuaugaugugccggauuaugccucccuuaggucacuaguugccucauccggcacccuggaguuuaacaaugaaagcuucaauuggacuggagucgcucagaauggaacaagcuaugcuugcaaaaggaguucuauuaaaaguuucuuuaguagauugaauugguugcaccaauuaaaauacaaauauccagcacugaacgugacuaugccaaacaaugacaaauuugacaaauuguacauuugggggguucaccacccgaguacggacagugaccaaaccagcauauaugcucaagcaucagggagagucacagucucuaccaaaagaagccaacaaacuguaaucccgaauaucggaucuagacccuggguaagggguaucuccagcagaauaagcauccauuggacaauaguaaaaccgggagacauacuuuugauuaacagcacagggaaucuaauugcuccucgggguuacuucaaaauacgaagugggaaaagcucaauaaugaggucagaugcacccauuggcaaaugcaauucugaaugcaucacuccaaauggaagcauucccaaugacaaaccauuucaaaauguaaacaggaucacauauggggccugucccagauauguuaagcaaaacacucugaaauuggcaacagggaugcggaauguaccagagaaacaaacuagaggcauauucggcgcaaucgcagguuucauagaaaaugguugggagggaaugguagacgguugguacgguuucaggcaucaaaauucugagggcacaggacaagcagcagaucuuaaaagcacucaagcagcaaucaaccaaaucaacgggaaacugaauagguuaaucgagaaaacgaacgagaaauuccaucaaauugaaaaagaauucucagaaguagaagggagaauucaggaccucgagaaauauguugaggacacuaaaauagaucucuggucguacaacgcggagcuucuuguugcccuggagaaccaacauacaauugaucuaacugacucagaaaugaacaaacuguuugaaagaacaaggaagcaacugagggaaaaugcugaggauaugggcaaugguuguuucaaaauauaccacaaaugugacaaugccugcauagggucaaucagaaauggaacuuaugaccaugauguauacagagacgaagcauuaaacaaccgguuccagaucaaagguguugagcugaagucaggauacaaagauuggauccuauggauuuccuuugccauaucauguuuuuugcuuuguguuguuuugcugggguucaucaugugggccugccaaaaaggcaacauuaggugcaacauuugcauuuga

SEQ ID NO: 40531 - RNA, 1701 nt, Artificial Sequence
  derived and/or modified CDS sequence (wt) from hemagglutinin__InfluenzaA__AFG72779
augaagacuaucauugcuuugagcuacauuuuaugucugguuuucgcucaaaaacuucccggaaaugacaacagcacggcaacgcugugccugggacaccaugcagugccaaacggaacguuagugaaaacaaucacgaaugaccaaauugaagugacuaaugcuacugagcugguucagaguuccucaacagguagaauaugcgacaguccucaccgaauccuugauggagaaaacugcacacugauagaugcucuauugggagacccucauugugauggcuuccaaaauaaggaaugggaccuuuuuguugaacgcagcaaagccuacagcaacuguuacccuuaugaugugccggauuaugccucccuuaggucacuaguugccucauccggcacccuggaguuuaacaaugaaagcuucaauuggacuggagucgcucagaauggaacaagcucugcuugcaaaaggagauccauuaaaaguuucuuuaguagauugaauugguugcaccaauuaaaauacaaauauccagcacugaacgugacuaugccaaacaaugacaaauuugacaaauuguacauuugggggguucaccacccgaguacggacagugaccaaaccagccuauaugcucaagcaucagggagagucacagucucuaccagaagaagccaacaaacuguaaucccgaacaucggaucuagacccuggguaaggggugucuccagcggaauaagcaucuauuggacaauaguaaaaccgggagacauacuuuugauuaacagcacagggaaucuaauugcuccucgggguuacuucaaaauacgaagugggaaaagcucaauaaugaggucagaugcacccauuggcaaaugcaauucugaaugcauuacuccaaauggaagcauucccaaugacaaaccauuucaaaauguaaacagaaucacauauggggccugucccagauauguuaagcaaaacacucugaaauuggcaacagggaugcggaauguaccagagaaacaaacuagaggcauauucggcgcaaucgcggguuucauagaaaaugguugggagggaaugguggacgguugguacgguuucaggcaucaaaauucugagggcacaggacaagcagcagaucuuaaaagcacucaagcagcaaucaaccaaaucaacgggaaacugaauagguuaaucgagaaaacgaacgagaaauuccaucaaauugaaaaagaauucucagaaguagaagggagaauucaggaccucgagaaauauguugaggacacuaaaauagaucucuggucguacaacgcggagcuucuuguugcccuggagaaccaacauacaauugaucuaacugacucagaaaugaacaaacuguuugaaagaacaaggaagcaacugagggaaaaugcugaggauaugggcaaugguuguuucaaaauauaccacaaaugugacaaugccugcauagggucaaucagaaauggaacuuaugaccaugauguauacagagacgaagcauuaaacaaccgguuccaaaucaaagguguugagcugaagucaggauacaaagauuggauccuauggauuuccuuugccauaucauguuuuuugcuuuguguuguuuugcugggguucaucaugugggccugccaaaaaggcaacauuaggugcaacauuugcauuuga

SEQ ID NO: 40532 - RNA, 1701 nt, Artificial Sequence
  derived and/or modified CDS sequence (wt) from hemagglutinin__InfluenzaA__AFG72801
augaagacuaucauugcuuugagcuacauuuuaugucugguuuucgcucaaaaacuucccggaaaugacaacagcacggcaacgcugugccuggggcaccaugcagugucaaacggaacgcuagugaaaacaaucacgaaugaccaaauugaagugacuaaugcuacugagcugguucagaguuccucaacagguagaauaugcgacaguccucaccaaauccuugauggagaaaacugcacacuaauagaugcucuauugggagacccucauugugauggcuuccaaaauaaggaaugggaccuuuuuguugaacgcagcaaagccuacagcaacuguuacccuuaugaugugccggauuaugccucccuuaggucacuaguugccucauccggcacacuggaguuuaacaaugaaagcuucaauuggacuggagucgcucagaauggaacaagcucugcuugcaaaaggagaucuaauaaaaguuucuuuaguagauugaauugguugcaccaauuaaaauacaaauauccagcacugaacgugacuaugccaaacaaugaaaaauuugacaaauuguacauuugggggguucaccacccgaguacggacagugaccaaaucagcauauaugcucaaucaucagggagagucacagucucuaccaaaagaagccaacaaacuguaaucccgaauaucggaucuagucccuggguaaggggugucuccagcagaauaagcaucuauuggacaauaguaaaaccgggagacauacuuuugauuaacagcacagggaaucuaauugcuccucgggguuacuucaaaauacgaagugggaaaagcucaauaaugaggucagaugcacccauuggcaaaugcaauucugaaugcaucacuccaaauggaagcauucccaaugacaaaccauuucaaaauguaaacaggaucacauauggggccugucccagauauguuaagcaaaacacucugaaauuggcaacagggaugcggaauguaccagagaaacaaacuagaggcauauucggcgcaaucgcggguuucauagaaaaugguugggagggaaugguggacgguugguacgguuucaggcaucaaaauucugagggcacaggacaagcagcagaucuuaaaagcacucaagcagcaaucaaccaaaucaacgggaaacugaauagguuaaucgagaaaacgaacgagaaauuccaucaaauugaaaaagaauucucagaaguagaagggagaauucaggaccucgagaaauauguugaggacacuaaaauagaucucuggucguacaacgcggagcuucuuguugcccuggagaaccaacauacaauugaucuaacugacucagaaaugaacaaacuguuugaaagaacaaagaagcaacugagggaaaaugcugaggauaugggcaaugguuguuucaaaauauaccacaaaugugacaaugccugcauagggucaaucagaaauggaacuuaugaccaugauguauacagagacgaagcauuaaacaaccgguuccagaucaaagguguugagcugaagucaggauacaaagauuggauccuauggauuuccuuugccauaucaugcuuuuugcuuuguguuguuuugcugggguucaucaugugggccugccaaaaaggcaacauuaggugcaacauuugcauuuga

SEQ ID NO: 40533 - RNA, 1701 nt, Artificial Sequence
  derived and/or modified CDS sequence (wt) from hemagglutinin__InfluenzaA__AFG72812
augaagacuaucauugcuuugagcuacauuuuaugucugguuuucgcucaaaaacuucccggaaaugacaacagcacggcaacgcugugccuggggcaccaugcagugccaaacggaacgcuagugaaaacaaucacgaaugaccaaauugaagugacuaaugcuacugagcugguucagaguuccucaacagguagaauaugcgacaguccucaccaaauccuugauggagaaaacugcacacuaauagaugcucuauugggagacccucauugugauggcuuccaaaauaaggaaugggaccuuuuuguugaacgcagcaaagccuacagcaacuguuacccuuaugaugugccggauuaugucucccuuaggucacuaguugccucaucaggcacgcuggaguuuaacaaugaaagcuucaauuggacuggagucgcucagaauggaacaagcucugcuugcaaaaggagaucuaauaaaaguuucuuuaguagauugaauugguugcaccaauuaaaauacaaauauccagcacugaacgugacuaugccaaacaaugaaaaauuugacaaauuguacauuugggggguucaccacccggguacagacagugaccaaaucagccuauaugcucaagcaucagggagagucacagucucuaccaaaagaagccaacaaacuguaaucccgaauaucggaucuagacccuggguaaggggugucuccagcagaauaagcaucuauuggacaauaguaaaaccgggagacauacuuuugauuaacagcacagggaaucuaauugcuccucgggguuacuucaaaauacgaagugggaaaagcucaauaaugaggucagaugcacccauuggcaaaugcaauucugaaugcaucacuccaaauggaagcauucccaaugacaaaccauuucaaaauguaaacaggaucacauauggggccugucccagauauguuaagcaaaacacucugaaauuggcaacagggaugcggaaugugccagagaaacaaacuagaggcauauucggugcaaucgcgggcuucauagaaaaugguugggagggaaugauggacgguugguacgguuucaggcaucuaaauucugagggcacagggcaagcagcagaucuuaaaagcacucaagcagcaaucaaccaaaucaacgggaaacugaauagguuaaucgagaaaacgaacgagaaauuccaucaaauugaaaaagaauucucagaaguagaagggagaauucaggaccucgagaaauauguugaggacacuaaaauagaucucuggucguacaaugcggagcuucuuguugcccuggagaaccaacauacaauugaucuaacugacucagaaaugaacaaacuguuugaaagaacaaagaagcaacugagggaaaaugcugaggauaugggcaaugguuguuucaaaauauaccacaaaugugacaaugccugcauagggucaaucagaaauggaacuuaugaccaugauguauacagagacgaagcauugaacaaccgguuccagaucaaagguguugagcugaagucaggauacaaagauuggauccuauggauuuccuuugccauaucauguuuuuugcuuuguauuguuuugcugggguucaucaugugggccugccaaaaaggcaacauuaggugcaacauuugcauuuga

SEQ ID NO: 40534 - RNA, 1701 nt, Artificial Sequence
  derived and/or modified CDS sequence (wt) from hemagglutinin__InfluenzaA__AFG72823
augaagacuaucauugcuuugagcuacauucuaugucugguuuucgcucaaaaacuucccggaaaugacaacagcacggcaacgcugugccuugggcaccaugcaguaccaaacggaacgauagugaaaacaaucacgaaugaccaaauugaaguuacuaaugcuacugagcugguucagaguuccucaacagguggaauaugcgacaguccucaucagauccuugauggagaaaacugcacacuaauagaugcucuauugggagacccucagugugauggcuuccaaaauaagaaaugggaccuuuuuguugaacgcagcaaagccuacagcaacuguuacccuuaugaugugccggauuaugccucccuuaggucacuaguugccucauccgguacacuggaguuuaacaaugaaagcuucaauuggacuggagucacucagaauggaacaagcucugcuugcaaaaggagaucuaauaaaaguuucuuuaguagauugaauugguugacccauuuaaaauacaaauacccagcauugaacgugacuaugccaaacaaugaaaaauuugacaaauuguacauuugggggguucuccacccggguacggacagugaccaaaucagccuauaugcucaagcaucaggaagaaucacagucucuaccaaaagaagccaacaaacuguaaucccgaauaucggaucuagacccaggguaaggggugucuccagcagaauaagcaucuauuggacaauaguaaaaccgggagacauacuuuugauuaacagcacagggaaucuaauugcuccuagggguuacuucaaaauacgaagugggaaaagcucaauaaugagaucagaugcacccauuggcaaaugcaauucugaaugcaucacuccaaauggaagcauucccaaugacaaaccauuucaaaauguaaacaggaucacauauggggccugucccagauauauuaagcaaaacacucugaaauuggcaacagggaugcgaaauguaccagagaaacaaacuagaggcauauuuggcgcaaucgcggguuucauagaaaaugguugggagggaaugguggacgguugguacgguuucaggcaucaaaauucugagggcacaggacaagcagcagaucucaaaagcacucaagcagcaaucaaccaaaucaaugggaaacugaauagguuaaucgggaaaacaaacgagaaauuccaucagauugaaaaagaauucucagaaguagaagggagaauucaggaccucgagaaauauguugaggacacuaaaauagaucucuggucauacaacgcggagcuucuuguugcccuggagaaccaacauacaauugaucuaacugacucagaaaugaacaaacuguuugaaagaacaaagaagcaacugagggaaaaugcugaggauaugggcaaugguuguuucaaaauauaccacaaaugugacaaugccugcauagggucaaucagaaauggaacuuaugaccaugauguauacagagaugaagcauuaaacaaccgguuccagaucaaagguguugagcugaagucaggauacaaagauuggauccuauggauuuccuuugccauaucauguuuuuugcuuuguguugcuuuguugggguucaucaugugggccugccaaaaaggcaacauuaggugcaacauuugcauuuga

SEQ ID NO: 40535 - RNA, 1701 nt, Artificial Sequence
  derived and/or modified CDS sequence (wt) from hemagglutinin__InfluenzaA__AFG72834
augaagacuaucauugcuuugagcuacauuuuaugucugguuuucgcucaaaaacuucccggaaaugacaacagcacggcaacgcugugccuggggcaccaugcagugccaaacggaacgcuagugaaaacaaucacgaaugaccaaauugaagugacuaaugcuacugagcugguucagaguuccucaacagguagaauaugcgacaguccucaccaaauccuugauggagaaaacugcacacuaauagaugcucuauugggagacccucauugugauggcuuccaaaauaaggaaugggaccuuuuuguugaacgcagcaaagccuacagcaacuguuacccuuaugaugugccggauuaugucucccuuaggucacuaguugccucaucaggcacgcuggaguuuaacaaugaaagcuucaauuggacuggagucgcucagaauggaacaagcucugcuugcaaaaggagaucuaauaaaaguuucuuuaguagauugaauugguugcaccaauuaaaauacaaauauccagcacugaacgugacuaugccaaacaaugaaaaauuugacaaauuguacauuugggggguucaccacccggguacagacagugaccaaaucagccuauaugcucaagcaucagggagagucacagucucuaccaaaagaagccaacaaacuguaaucccgaauaucggaucuagacccuggguaaggggugucuccagcagaauaagcaucuauuggacaauagugaaaccgggagacauacuuuugauuaacagcacagggaaucuaauugcuccucgggguuacuucaaaauacaaagugggaaaagcucaauaaugaggucagaugcacccauuggcaaaugcaauucugaaugcaucacuccaaauggaagcauucccaaugacaaaccauuucaaaauguaaacaggaucacauauggggccugucccagauauguuaagcaaaacacucugaaauuggcaacagggaugcggaaugugccagagaaacaaacuagaggcauauucggugcaaucgcgggcuucauagaaaaugguugggagggaaugauggacgguugguacgguuucaggcaucaaaauucugagggcacagggcaagcagcagaucuuaaaagcacucaagcagcaaucaaccaaaucaacgggaaacugaauagguuaaucgagaaaacgaacgagaaauuccaucaaauugaaaaagaauucucagaaguagaagggagaauucaggaccucgagaaauauguugaggacacuaaaauagaucucuggucguacaaugcggagcuucuuguugcccuggagaaccaacacacaauugaucuaacugacucagaaaugaacaaacuguuugaaagaacaaagaagcaacugagggaaaaugcugaggauaugggcaaugguuguuucaaaauauaccacaaaugugacaaugccugcauagggucaaucagaaauggaacuuaugaccaugauguauacagagacgaagcauugaacaaccgguuccagaucaaagguguugagcugaagucaggauacaaagauuggauccuauggauuuccuuugccauaucauguuuuuugcuuuguauuguuuugcugggguucaucaugugggccugccaaaaaggcaacauuaggugcaacauuugcauuuga

SEQ ID NO: 40536 - RNA, 1701 nt, Artificial Sequence
  derived and/or modified CDS sequence (wt) from hemagglutinin__InfluenzaA__AFG72845
augaagacuaucauugcuuugagcuacauuuuaugccugguuuucgcucaaaaacuucccggaaaugacaacagcacggcaacgcugugccuggggcaccaugcagugccaaacggaacgcuagugaaaacaaucacgaaugaccaaauugaaguaacuaaugcuacugagcugguucagaguuccucaacaaguagaauaugcgacaguccucaccaaauccuugauggagaaaacugcacacuaauagaugcucuauugggagacccucauugugauggcuuccaaaauaaggaaugggaccuuuuuguugaacgcagcaaagccuacagcaacuguuacccuuaugaugugccggauuaugucucccuuaggucacuaguugccucaucaggcacgcuggaguuuaacaaugaaagcuucaauuggacuggagucgcucagaauggaacaagcucugcuugcaaaaggagaucugauaaaaguuucuuuaguagauugaauugguugcaccaauuaagauacaaauauccagcacugaacgugacuaugccaaacaaugaaaaauuugacaaauuguacauuugggggguccaccacccggguacagacagugaccaaaucagccuauaugcucaagcaucagggagagucacaaucucuaccaaaagaagccaacaaacuguaaucccgaauaucggaucuagacccuggguaaggggugucuccagcagaauaagcauccauuggacaauaguaaaaccgggggacauacuuuugauuaacagcacagggaaucuaauugcuccucgggguuacuucaaaauacgaagugggaaaagcucaauaaugaggucagaugcacccauuggcaaaugcaauucugaaugcaucacuccaaauggaagcauucccaaugacaaaccauuucaaaauguaaacaggaucacauauggggccugucccagauauguuaagcaaaaaacucugaaauuggcaacagggaugcggaaugugccagagaaacaaacuagaggcauauucggugcaaucgcgggcuucauagaaaaugguugggagggaaugauggacgguugguacgguuucaggcaucaaaauucugagggcacagggcaagcagcagaucuuaaaagcacucaagcagcaaucaaccaaaucaacgggaaacugaauagguugauugagaaaacgaaugagaaauuccaucaaauugaaaaagaauucucagaaguagaagggagaauucaggaccucgagaaauaugucgaggacacuaaaauagaucucuggucguacaaugcggagcuucuuguugcccuggagaaccaacauacaauugaucuaacugacucagaaaugaacaaacuguuugaaagaacaaagaagcaacugagggaaaaugcugaggauaugggcaaugguuguuucaaaauauaccacaaaugugacaaugccugcauagggucaaucagaaauggaacuuaugaccaugauguauacagagacgaggcauugaacaaccgguuccagaucaaagguguugagcugaagucaggauacaaagauuggauccuauggauuuccuuugccauaucauguuuuuugcuuuguauuguuuuacugggguucaucaugugggccugccaaaaaggcaacauuaggugcaacauuugcauuuga

SEQ ID NO: 40537 - RNA, 1701 nt, Artificial Sequence
  derived and/or modified CDS sequence (wt) from hemagglutinin__InfluenzaA__AFG72856
augaagacuaucauugcuuugagcuacauucuaugucugguuuucgcucaaaaacuucccggaaaugacaacagcacggcaacgcugugccuugggcaccaugcaguaccaaacggaacgauagugaaaacaaucacgaaugaccaaauugaaguuacuaaugcuacugagcugguucagaguuccucaacagguggaauaugcgacaguccucaucagauccuugauggagaaaacugcacacuaauagaugcucuauugggagacccucagugugauggcuuccaaaauaagaaaugggaccuuuuuguugaacgcagcaaagccuacagcaacuguuacccuuaugaugugccggauuaugccucccuuaggucacuaauugccucauccggcacacuggaguuuaccaaugaaagcuucaauuggacuggagucacucagaauggaacaagcucugcuugcaaaaggagaucuaauaaaaguuucuuuaguagauugaauugguugacccauuuaaaauacaaauacccagcauugaacgugacuaugccaaacaaugaaaaauuugacaaauuguacauuugggggguucaccacccggguacggacagugaccaaaucagccuauaugcucaagcaucaggaagaaucacagucucuaccaaaagaagccaacaaacuguaaucccgaauaucggaucuagacccaggguaagggauaucuccagcagaauaagcaucuauuggacaauaguaaaaccgggagacauacuuuugauuaacagcacagggaaucuaauugcuccucgggguuacuucaaaauacgaagugggaaaagcucaauaaugagaucagaugcacccauuggcaaaugcaauucugaaugcaucacuccaaauggaagcauucccaaugacaaaccauuucaaaauguaaacaggaucacauauggggccugucccagauauguuaagcaaaacacucugaaauuggcaacagggaugcgaaauguaccagagaaacaaacuagaggcauauuuggcgcaaucgcggguuucauagaaaaugguugggagggaaugguggacgguugguacgguuucaggcaucaaaauucugagggcacaggacaagcagcagaucucaaaagcacucaagcagcaaucaaccaaaucaaugggaaacugaauaaguuaaucgggaaaacaaacgagaaauuccaucagauugaaaaagaauucucagaaguagaagggagaauucaggaccucgagaaauauguugaggacacuaaaauagaucucuggucauacaacgcggagcuucuuguugcccuggagaaccaacauacaauugaucuaacugacucagaaaugaacaaacuguuugaaagaacaaagaagcaacugagggaaaaugcugaggauaugggcaaugguuguuucaaaauauaccacaaaugugacaaugccugcauagggucaaucagaaauggaacuuaugaccaugauguauacagagaugaagcauuaaacaaccgguuccagaucaaagguguugagcugaagucaggauacaaagauuggauccuauggauuuccuuugccauaucauguuuuuugcuuuguguuguuuuguugggguucaucaugugggccugccaaaaaggcaacauuaggugcaacauuugcauuuga

SEQ ID NO: 40538 - RNA, 1701 nt, Artificial Sequence
  derived and/or modified CDS sequence (wt) from hemagglutinin__InfluenzaA__AFG72867
augaagacuaucauagcuuugagcuacauuuuaugucugguuuucgcucaaaaacuucccggaaaugacaacagcacggcaacgcugugccuggggcaccaugcagugccaaacggaacgcuagugaaaacaaucacgaaugaccaaauugaagugacuaaugcuacugagcugguucagaguuccucaacagguagaauaugcgacaguccucaccaaauccuugauggagaaaacugcacacuaauagaugcucuauugggagacccucauugugauggcuuccaaaauaaggaaugggaccuuuuuguugaacgcagcaaagccuacagcaauuguuacccuuaugaugugccggauuaugucucccuuaggucacuaguugccucaucaggcacgcuggaguuuaacaaugaaagcuucaauuggacuggagucgcucagaauggaacaagcucugcuugcaaaaggagaucuaauaaaaguuucuuuaguagauugaauugguugcaccaauuaaaaaacaaauauccagcgcugaacgugacuaugccaaacaaugaaaaauuugacaaauuguacauuugggggguucaccacccggguacagacagugaccaaaucagccuauaugcucaagcaucagggagagucacagucucuaccaaaagaagccaacaaacuguaaucccgaauaucggaucuagacccaggguaagggauaucuccagcagaauaagcaucuauuggacaauaguaaaaccgggagacauacuuuugauuaacagcacagggaaucuaauugcuccucgggguuacuucaaaauacgaagugggaaaagcucaauaaugaggucagaugcacccauuggcaaaugcaauucugaaugcaucacuccaaauggaagcauuccuaaugacaaaccauuucaaaauguaaacaggaucacauauggggccugucccagauauguuaagcaaaacacucugaaauuggcaacagggaugcggaaugugccagagaaacaaacuagaggcauauucggugcaaucgcgggcuucauagaaaaugguugggagggaaugauggacgguugguacgguuucaggcaucaaaauucugagggcacaggacaagcagcagaucuuaaaagcacucaagcagcaaucaaccaaaucaacgggaaacugaauagguuaaucgagaaaacgaacgagaaauuccaccaaauugaaaaagaauucucagaaguagaagggagaauucaggaccucgagaaauauguugaggacacuaaaauagaucucuggucguacaaugcggagcuucuuguugcccuggagaaccaacauacaauugaucuaacugacucagaaaugaacaaacuguuugaaagaacaaagaagcaacugagggaaaaugcugaggauaugggcaaugguuguuucaaaauauaccacaaaugugacaaugccugcauagggucaaucagaaauggaacuuaugaccaugauguauacagagacgaagcauuaaacaaccgguuccagaucaaagguguugagcugaagucaggauacaaagauuggauccuauggauuuccuuugccauaucauguuuuuugcuuuguauuguuuugcugggguucaucaugugggccugccaaaaaggcaacauuaggugcaacauuugcauuuga

SEQ ID NO: 40539 - RNA, 1701 nt, Artificial Sequence
  derived and/or modified CDS sequence (wt) from hemagglutinin__InfluenzaA__AFG72922
augaagacuaucauugcuuugagcuacauucuaugucugguuuucgcucaaaaacuuccuggagaugacaacagcacggcaacgcugugccuugggcaccaugcaguaccaaacggaacgauagugaaaacaaucacgaaugaccaaauugaaguuacuaaugcuacugagcugguucagaguuccucaacaggugaaauaugcgacaguccucaucagauccuugauggagaaaacugcacacuaauagaugcucuauugggagacccucagugugauggcuuccaaaauaagaaaugggaccuuuuuguugaacgcagcaaagccuacagcaacuguuacccuuaugaugugccggauuaugccucccuuaggucacuaguugccucauccggcacacuggaguuuaacaaugaaagcuucaauuggacuggagucacucaaaacggaacaagcucuucuugcauaaggaaaucuaauaacaguuucuuuaguagauugaauugguugacccacuuaaaauucaaauacccagcauugaacgugacuaugccaaacaaugaacaauuugacaaauuguacauuugggggguucaccacccggguacggacaaugaccaaaucuuccuguaugcucaagcaucaggaagaaucacagucucuaccaaaagaagccaacaaacuguaaucccgaauaucggaucuagacccagaguaaggaauaucccuagcagaauaagcaucuauuggacaauaguaaaaccgggagacauacuuuugauuaacagcacagggaaucuaauugcuccuagggguuacuucaaaauacgaagugggaaaagcucaauaaugagaucagaugcacccauuggcaaaugcaauucugaaugcaucacuccaaauggaagcauucccaaugacaaaccauuccaaaauguaaacaggaucacauacggggccugucccagauauguuaagcaaaacacucugaaauuggcaacagggaugcgaaauguaccagagaaacaaacuagaggcauauuuggcgcaaucgcggguuucauagaaaaugguugggagggaaugguggaugguugguacgguuucaggcaucaaaauucugagggaagaggacaagcagcagaucucaaaagcacucaagcagcaaucgaucaaaucaaugggaagcugaauagauugaucgggaaaaccaacgagaaauuccaucagauugaaaaagaauucucagaagucgaagggaggauucaggaccuugagaaauauguugaggacaccaaaauagaucucuggucauacaacgcggagcuucuuguugcccuggagaaccaacauacaauugaucuaacugacucagaaaugaacaaacuguuugaaaaaacaaagaagcaacugagggaaaaugcugaagauaugggcaaugguuguuucaaaauauaccacaaaugugacaaugccugcauaggaucaaucagaaauggaacuuaugaccacgauguauacagagaugaagcauuaaacaaccgguuccagaucaagggaguugagcugaagucaggguacaaagauuggauccuauggauuuccuuugccauaucauguuuuuugcuuuguguugcuuuguugggguucaucaugugggccugccaaaaaggcaacauuaggugcaacauuugcauuuga

SEQ ID NO: 40540 - RNA, 1701 nt, Artificial Sequence
  derived and/or modified CDS sequence (wt) from hemagglutinin__InfluenzaA__AFG72933
augaagacuaucauugcuuugagcuacauucuaugucugguuuucgcucaaaaacuuccuggaaaugacaacagcacggcaacgcugugccuugggcaccaugcaguaccaaacggaacgauagugaaaacaaucacgaaugaccaaauugaaguuacuaaugcuacugagcugguucagaguuccucaacaggugaaauaugcgacaguccucaucagauccuugauggagaaaacugcacacuaauagaugcucuauugggagacccucagugugauggcuuccaaaauaagaaaugggaccuuuuuguugaacgcagcaaagccuacagcaacuguuacccuuaugaugugccggauuaugccucccuuaggucacuaguugccucauccggcacacuggaguuuaacaaugaaagcuucaauuggacuggagucacucaaaacggaacaagcucugcuugcguaaggagaucuaauaacaguuucuuuaguagauugaauugguugacccacuuaaaauucaaauacccagcauuaaacgugacuaugccaaacaaugaacaauuugacaaauuguacauuugggggguucaccacccggguacggacaaugaccaaaucuuccuguaugcucaagcaucaggaagaaucacagucucuaccaaaagaagccaacaaacuguaaucccgaauaucggaucuagacccagaguaaggaauaucccuagcagaauaagcaucuauuggacaauaguaaaaccgggagacauacuuuugauuaacagcacagggaaucuaauugcuccuagggguuacuucaaaauacgaagugggaaaagcucaauaaugagaucagaugcacccauuggcaaaugcaauucugaaugcaucacuccaaauggaagcauucccaaugacaaaccauuccaaaauguaaacaggaucacauacggggcaugucccagauauguuaagcaaaacacucugaaauuggcaacagggaugcgaaauguaccagagaaacaaacuagaggcauauuuggcgcaaucgcggguuucauagaaaaugguugggagggaaugguggaugguugguacgguuucaggcaucaaaauucugagggaagaggacaagcagcagaucucaaaagcacucaagcagcaaucgaucaaaucaaugggaagcugaauagauugaucgggaaaaccaacgagaaauuccaucagauugaaaaagaauucucagaagucgaagggagaauucaggaccuugagaaauauguugaggacaccaaaauagaucucuggucauacaacgcggagcuucuuguugcccuggagaaccaacauacaauugaucuaacugacucagaaaugaacaaacuguuugaaaaaacaaagaagcaacugagggaaaaugcugaggauaugggcaaugguuguuucaaaauauaccacaaaugugacaaugccugcauaggaucaaucagaaauggaacuuaugaccacgauguauacagagaugaagcauuaaacaaccgguuccagaucaagggaguugagcugaagucaggguacaaagauuggauccuauggauuuccuuugccauaucauguuuuuugcuuuguguugcuuuguugggguucaucaugugggccugccaaaaaggcaacauuaggugcaacauuugcauuuga

SEQ ID NO: 40541 - RNA, 1701 nt, Artificial Sequence
  derived and/or modified CDS sequence (wt) from hemagglutinin__InfluenzaA__AFG72955
augaagacuaucauugcuuugagcuacauucuaugucugguuuucgcucaaaaacuuccuggaaaugacaacagcacggcaacgcugugccuugggcaccaugcaguaccaaacggaacgauagugaaaacaauaacgaaugaccaaauugaaguuacuaaugcuacugagcugguucagaguuccucaacaggugaaauaugcgacaguccucaucagauccuugauggagaaaacugcacacuaauagaugcucuauugggagacccucagugugauggcuuccaaaauaagaaaugggaccuuuuuguugaacgcagcaaagccuacagcaacuguuacccuuaugaugugccggauuaugccucccuuaggucacuaauugccucauccggcacacuggaguuuaacaaugaaagcuucaauuggacuggagucacucaaaauggaacaagcucugcuugcauaaggagaucuaauaacaguuucuuuaguagauuaaauugguugacccacuuaagauucaaguacccagcauugaacgugacuaugccaaacaaugaacaauuugacaaauuguacauuugggggguucaccacccggguacggacaaugaccaaaucuuccuguaugcucaagcaucaggaagaaucacagucucuaccaaaagaagccaacaaacuguaaucccgaauaucggaucuagacccagaguaaggaauaucccuagcagaauaagcaucuauuggacaauaguaaaaccgggagacauacuuuugauuaacagcacagggaaucuaauugcuccuagggguuacuucaaaauacgaagugggaaaagcucaauaaugagaucagaugcacccauuggcaaaugcaauucugaaugcaucacaccaaauggaagcauucccaaugacaaaccauuccaaaauguaaacaggaucacauacggggccugucccagauauguuaagcaaaacacucugaaauuggcaacagggaugcgaaauguaccagagaaacaaacuagaggcauauuuggcgcaaucgcggguuucauagaaaaugguugggagggaaugguggaugguugguacgguuucaggcaucaaaauucugagggaagaggacaagcagcagaucucaaaagcacucaagcagcaaucgaucaaaucaaugggaagcugaauagauugaucggaaaaaccaacgagaaauuccaucagauugaaaaagaauucucagaagucgaagggagaauucaggaccuugagaaauauguugaggacaccaaaauagaucucuggucauacaacgcggagcuucuuguugcccuggagaaccaacauacaauugaucuaacugacucagaaaugaacaaacuguuugaaaaaacaaagaagcaacugagggaaaaugcugaggauaugggcaaugguuguuucaaaauauaccacaaaugugacaaugccugcauaggaucaaucaggaauggaacuuaugaccacgauguauacagagaugaagcauuaaacaaccgguuccagaucaagggaguugagcugaagucaggguacaaagauuggauccuauggauuuccuuugccauaucauguuuuuugcuuuguguugcuuuguugggguucaucaugugggccugccaaaaaggcaacauuaggugcaacauuugcauuuga

SEQ ID NO: 40542 - RNA, 1701 nt, Artificial Sequence
  derived and/or modified CDS sequence (wt) from hemagglutinin__InfluenzaA__AFG98808
augaagaccaucauugcuuugagcuacauuuucugucuggcucucggccaagaccuuccaggaaaugacaacagcacagcaacgcugugucugggacaucaugcggugccaaacggaacacuagugaaaacaaucacaaaugaucagauugaagugacuaaugcuacugagcuaguucagagcuccucaacggggaaaauaugcaacaauccucaucgaauccuugauggaauaaacugcacacugauagacgcucuauugggggacccucauugugauguuuuucaagaugagacaugggaccuuuucguugaacgcagcaaagcuuucagcaacuguuacccuuaugaugugccagauuaugccucccuuaggucacuaguugccucgucaggcacucuggaguuuaucacugaggguuucacuuggacuggggucacucagaaugggggaagcaaugcuugcaaaaggggaccugguagcgguuuuuucaguagacugaacugguugaccaaaucaggaagcacauauccagugcugaacgugacuaugccaaacaaugacaauuuugacaaacuauacauuugggggguucaccacccgagcacgaaccaagaacaaaccagccuguauguucaagcaucagggagagucacagucucuaccaggagaagccagcaaacuauaaucccgaauaucggguccagacccuggguaaggggucugucuaguagaauaagcaucuauuggacaauaguuaagccgggagacguacugguaauuaauaguaaugggaaccuaaucgcuccucgggguuauuucaaaaugcgcacugggaaaagcucaauaaugaggucagaugcaccuauugauaccuguauuucugaaugcaucacuccaaauggaagcauucccaaugacaagcccuuucaaaacguaaacaagaucacauauggagcaugccccaaguauguuaagcaaaacacccugaaguuggcaacagggaugcggaauguaccagagaaacaaacuagaggccuauucggcgcaauagcaggcuucauagaaaaugguugggagggaaugauagacgguugguacgguuucaggcaucaaaauucugagggcacaggacaagcagcagaucuuaaaagcacucaagcagccaucgaccaaaucaaugggaaauugaacaggguaaucgagaagacgaacgagaaauuccaucaaaucgaaaaggaauucucagaaguagaagggagaauucaggaccucgagaaauacguugaagacacuaaaauagaucucuggucuuacaaugcggagcuucuugucgcucuggagaaucaacauacaauugaccugacugacucggaaaugaacaagcuguuugaaaaaacaaggaggcaacugagggaaaaugcugaagacaugggcaaugguugcuucaaaauauaccacaaaugugacaacgcuugcauagagucaaucagaaaugggacuuaugaccaugauguauacagagacgaagcauuaaacaaccgguuucagaucaaagguguugaacugaagucuggauacaaagacuggauccuguggauuuccuuugccauaucaugcuuuuugcuuuguguuguuuugcugggguucaucaugugggccugccagagaggcaacauuaggugcaacauuugcauuuga

SEQ ID NO: 40543 - RNA, 1701 nt, Artificial Sequence
  derived and/or modified CDS sequence (wt) from hemagglutinin__InfluenzaA__AFG98819
augaagaccaucauugcuuugagcuacauuuucugucuggcucucggccaagaccuuccaggaaaugacaacagcacagcaacgcugugccugggacaucaugcggugccaaacggaacacuagugaaaacaaucacaaaugaucagauugaagugacuaaugcuacugagcuaguucagagcuccucaacggggaaaauaugcaacaauccucaucgaauccuugauggaauaaacugcacacugauagacgcucuauugggggacccucauugugauguuuuucaagaugagacaugggaccuuuucguugaacgcagcaaagcuuucagcaacuguuacccuuaugaugugccagauuaugccucccuuaggucacuaguugccucaucaggcacucuggaguuuaucacugaggguuucacuuggacuggggucacucagaaugggggaagcaaugcuugcaaaaggggaccugguagcgguuuuuucaguagacugaacugguugaccaaaucaggaagcacauauccagugcugaacgugacuaugccaaacaaugacaauuuugacaaacuauacauuugggggguucaccacccgagcacgaaccaagaacaaaccagccuguauguucaagcaucagggagagucacagucucuaccaggagaagccagcaaacuauaaucccgaauaucggguccagacccuggguaaggggucugucuaguagaauaagcaucuauuggacaauaguuaaaccgggagacguacugguaauuaauaguaaugggaaccuaaucgcuccucgggguuauuucaaaaugcgcacugggaaaagcucaauaaugaggucagaugcaccuauugauaccuguauuucugaaugcaucacuccaaauggaagcauucccaaugacaagcccuuucaaaacguaaacaagaucacauauggagcaugccccaaguauguuaagcaaaacacccugaaguuggcaacagggaugcggaauguaccagagaaacaaacuagaggccuauucggcgcaauagcaggcuucauagaaaaugguugggagggaaugauagacgguugguacgguuucaggcaucaaaauucugagggcacaggacaagcagcagaucuuaaaagcacucaagcagccaucgaccaaaucaaugggaaauugaacagaguaaucgagaagacgaacgagaaauuccaucaaaucgaaaaggaauucucagaaguagaagggagaauucaggaccucgagaaauacguugaagacacuaaaauagaucucuggucuuacaaugcggagcuucuugucgcucuggagaaucaacauacaauugaccugacugacucggaaaugaacaagcuguuugaaaaaacaaggagacaacugagggaaaaugcugaagacaugggcaaugguugcuucaaaauauaccacaaaugugacaacgcuugcauagagucaaucagaaaugggacuuaugaccaugauguauacagagacgaagcauuaaacaaccgguuucagaucaaagguguugaacugaagucuggauacaaagacuggauccuguggauuuccuuugccauaucaugcuuuuugcuuuguguuguuuugcugggguucaucaugugggccugccagagaggcaacauuaggugcaacauuugcaucuga

SEQ ID NO: 40544 - RNA, 1701 nt, Artificial Sequence
  derived and/or modified CDS sequence (wt) from hemagglutinin__InfluenzaA__AFG98830
augaagaccaucauugcuuugagcuacauuuucugucugguucucggccaagaccuuccaggaaaugacaaaagcacagcaacgcugugccugggacaucaugcggugccaaacggaacacuagugaaaacaaucacaaaugaucagauugaagugacuaaugcuacugagcugguucagagcuccucaacggggaaaauaugcaacaauccucaucgaauccuugauggaauagacugcacacugauagaugcucuauugggggacccucauugugauggcuuucaaaaugagacaugggaccuuuucguugaacgcagcaaagcuuucagcaacuguuacccuuaugaugugccagauuaugccucccuuaggucacuaguugccucgucaggcacucuggaguuuaucacugaggguuucacuuggacuggggucacucagaaugggggaagcagugcuugcaaaaggggaccugguagcgguuuuuucaguagacugaacugguugaccaaaucaggaagcacauauccagugcugaacgugacuaugccaaacaaugacaauuuugacaaacuauacauuugggggguucaccacccgagcacgaaccaagaacaaaccagccuguauguacaagcaucagggagagucacagucucuaccaggagaagccagcaaacuauaaucccgaauaucgggucuagacccuggguaaggggucugucuaguagaauaagcaucuauuggacaauaguuaaaccgggagacauacugauaauuaauaguaaugggaaccuaauugcuccucgggguuauuucaaaaugcgcacugggaaaagcucaauaaugaggucagaugcaccuauugauaccuguauuucugaaugcaucacuccaaauggaagcauucccaaugacaagcccuuucaaaauguaaacaagaucacauauggggcaugccccaaguauguuaagcaaaacacccugaaguuggcaacagggaugcggaauguaccagagaaacaaacuagaggccuauucggcgcaauagcagguuucauagaaaaugguugggagggaaugauagacgguugguacgguuucaggcaucaaaauucugagggcacaggacaagcagcagaucuuaaaagcacucaagcagccaucgaccaaaucaaugggaaacugaauaggguaaucgagaagacgaacgagaaauuccaucaaaucgaaaaggaauucucagaaguagaagggagaauucaggaccucgagaaauacguugaagacacuaaaauagaucucuggucuuacaaugcggagcuucuugucgcucuggagaaucaacauacaauugaucugacugacucggaaaugaacaagcuguuugaaaaaacaaggaggcaacugagggaaaaugcugaagacaugggcaaugguugcuucaaaauauaccacaaaugugacaacgcuugcauagggucaaucagaaaugggacuuaugaccaugauguauacagagacgaagcauuaaacaaccgguuucagaucaaagguguugaacugaagucaggauacaaagacuggauccuguggauuuccuuugccauaucaugcuuuuugcuuuguguuguuuugcugggguucaucaugugggccugccagaaaggcaacauuaggugcaacauuugcauuuga

SEQ ID NO: 40545 - RNA, 1701 nt, Artificial Sequence
  derived and/or modified CDS sequence (wt) from hemagglutinin__InfluenzaA__AFG98841
augaagaccaucauugcuuugagcuacauuuucugucugguucucggccaagaccuuccaggaaaugacaaaagcacagcaacgcugugccugggacaucaugcggugccaaacggaacacuagugaaaacaaucacaaaugaucagauugaagugacuaaugcuacugagcugguucagagcuccucaacggggaaaauaugcaacaauccucaucgaauccuugauggaauagacugcacacugauagaugcucuauugggggacccucauugugauggcuuucaaaaugagacaugggaccuuuucguugaacgcagcaaagcuuucagcaacuguuacccuuaugauguaccagauuaugccucccuuaggucacuaguugccucgucaggcacucuggaguuuaucacugaggguuucacuuggacuggggucacucagaaugggggaagcaaugcuugcaaaaggggaccugguagcgguuuuuucaguagacugaacugguugaccaaaucaggaagcacauauccagugcugaacgugacuaugccaaacaaugacaauuuugacaaacuauacauuugggggguucaccacccgagcacgaaccaagaacaaaccagccuguauguacaagcaucagggagagucacagucucuaccaggagaagccagcaaacuauaaucccgaauaucgggucuagacccuggguaaggggucugucuaguagaauaagcaucuauuggacaauaguuaaaccgggagacauacugauaauuaauaguaaugggaaccuaauugcuccucgggguuauuucaaaaugcgcacugggaaaagcucaauaaugaggucagaugcaccuauugguaccuguauuucugaaugcaucacuccaaauggaagcauucccaaugacaagcccuuucaaaauguaaacaagaucacauauggggcaugccccaaguauguuaagcaaaacacccugaaguuggcaacagggaugcggaauguaccagagaaacaaacuagaggccuauucggcgcaauagcagguuucauagaaaaugguugggagggaaugauagacgguugguacgguuucaggcaucaaaauucugagggcacaggacaagcagcagaucuuaaaagcacucaagcagccaucgaccaaaucaaugggaaacugaauaggguaaucgagaagacgaacgagaaauuccaucaaaucgaaaaggaauucucagaaguagaagggagaauucaggaccucgagaaauacguugaagacacuaaaauagaucucuggucuuacaaugcggagcuucuugucgcucuggagaaccaacauacaauugaucugacugacucggaaaugaacaagcuguuugaaaaaacaaggaggcaacugagggaaaaugcugaagacaugggcaaugguugcuucaaaauauaccacaaaugugacaacgcuugcauagggucaaucagaaaugggacuuaugaccaugauguauacagagacgaagcauuaaacaaccgguuucagaucaaagguguugaacugaagucaggauacaaagacuggauccuguggauuuccuuugccauaucaugcuuuuugcuuuguguuguuuugcugggguucaucaugugggccugccagaaaggcaacauuaggugcaacauuugcauuuga

SEQ ID NO: 40546 - RNA, 1701 nt, Artificial Sequence
  derived and/or modified CDS sequence (wt) from hemagglutinin__InfluenzaA__AFG98852
augaagacuaucauugcuuugagcuacauuuucugucugguucucggccaagacuuuccaggaaaugacaacagcacagcaacgcugugccugggacaucaugcggugccaaacggaacacuagugaaaacaaucacaaaugaucagauugaagugacuaaugcuacugagcugguucagaguuccucaacggggaaaauaugcaacaauccucaucgaauccuugauggaauagacugcacacugauagaugcucuauugggggacccucauugugauggcuuucaaaaugagacaugggaccuuuucguugaacgcagcaaagcuuucagcaacuguuacccuuaugaugugccagauuaugccucccuuaggucacuaguugccucgucaggaacucuggaguuuaucaaugaaggcuucacuuggacuggggucacucagaaugggggaagcaaugcuugcaaaaggggaccugauagcgguuuuuucaguagacugaacugguuguacaaaucaggaagcacauauccagugcugaacgugacuaugccaaacaaugacaauuuugacaaacuauacauuugggggguucaccacccgagcacggaccaagaacaaaccagccuauauguucaagcaucagggagagucacagucucuaccaagagaagccagcaaacuauaaucccgaauaucgggucuagacccuggguaaggggucugucuaguagaauaagcaucuauuggacaauaguuaaaccaggagacauacugguaauuaauaguaaugggaaccuaauugcuccucgggguuauuucaaaaugcgcacugggaaaagcucaauaaugaggucagaugcaccuauuggcaccugcauuucugaaugcaucacuccaaauggaagcauucccaaugacaagcccuuucaaaacguaaacaagaucacauauggggcaugucccaaguauguuaagcaaaacacccugaaguuggcaacagggaugcggaauguaccagagaaacaaacuagaggccuauucggcgcaauagcagguuucauagaaaaugguugggagggaaugauagacgguugguacgguuucaggcaucaaaauucugagggcacaggacaagcagcagaucuuaaaagcacucaagcagccaucgaccaaaucaaugggaaacugaauaggguaaucgagaagacgaacgagaaauuccaucaaaucgaaaaggaauucucagaaguagaagggagaauucaggaccucgagaaauacguugaagacacgaaaauagaucucuggucuuacaaugcggagcuucuugucgcucuggagaaccaacauacaauugaucugacugacucggaaaugaacaaacuguuugaaaaaacaaggaggcaacugagggaaaaugcugaggacaugggcaaugguugcuucaaaauauaccacaaaugugacaaugcuugcauagggucaaucagaaaugggacuuaugaccaugauguauacagagacgaagcauuaaacaaccgguuucagaucaaagguguugaacugaagucaggauacaaagacuggauccuguggauuuccuuugccauaucaugcuuuuugcuuuguguuguuuugcugggguucaucaugugggccugccagaaaggcaacauuaggugcaacauuugcauuuga

SEQ ID NO: 40547 - RNA, 1701 nt, Artificial Sequence
  derived and/or modified CDS sequence (wt) from hemagglutinin__InfluenzaA__AFG98863
augaagacuaucauugcuuugagcuacauuuucugucugguucucggccaagaucuuccaggaaaugacaacagcacagcaacgcugugccugggacaucaugcggugccaaacggaacacuagugaaaacaaucacaaaugaucagauugaagugacuaaugcuacugagcugguucagagcuccucaacggggaaaauaugcaacaauccucaucgaauccuugauggaauagacugcacacugauagaugcucuauugggggacccucauugugauggcuuucaaaaugagacaugggaccuuuucguugaacgcagcaaagcuuucagcaacuguuacccuuaugaugugccagauuaugccucccuuaggucacuaguugccucgucaggcacucuggaguuuaucaaugaggguuucacuuggacuggggucacucagaaugggggaagcagugcuugcaaaaggggaccugauagcgguuuuuucaguagacugaacugguuguacaaaucaggaagcacauauccagugcugaacgugacuaugccaaacaaugacaauuuugacaaacuauacauuugggggguucaccacccgagcacgaaccaagaacaaaccagccuauauguucaagcaucagggagagucacagucucuaccaagagaagccagcaaacuauaaucccgaauaucgggucuagacccuggguaaggggucugucuaguagaauaagcaucuauuggacaauaguuaaaccgggagacauacugguaauuaauaguaaugggaaccuaauugcuccucgggguuauuucaaaaugcgcacugggaaaagcucaauaaugaggucagaugcaccuauugguaccuguauuucugaaugcaucacuccaaauggaagcauucccaaugacaaacccuuucaaaacguaaacaagaucacauauggggcaugucccaaguauguuaagcaaaacacccugaaguuggcaacagggaugcggaauguaccagagaaacaaacuagaggccuauucggcgcaauagcagguuucauagaaaaugguugggagggaaugauagacgguugguacggcuucaggcaucaaaauucugagggcacaggacaagcagcagaucuuaaaagcacucaagcagccaucgaccaaaucaaugggaaacugaauaggguaaucgagaagacgaacgagaaauuccaucaaaucgaaaaggaauucucagaaguagaagggagaauucaggaccucgagaaauacguugaagacacuaaaauagaucucuggucuuacaaugcggagcuucuugucgcucuggagaaccaacauacaauugaucugacugacucggaaaugaacaagcuguuugaaaaaacaaggaggcaacugagggaaaaugcugaggacaugggcaaugguugcuucagaauauaccacaaaugugacaaugcuugcauagggucaaucagaaaugggacuuaugaccaugauguauacagagacgaagcauuaaacaaccgguuucagaucaaagguguugaacugaaaucaggauacaaagacuggauccuguggauuuccuuugccauaucaugcuuuuugcuuuguguuguuuugcugggguucaucaugugggccugccaaaaaggcaacauuaggugcaacauuugcauuuga

SEQ ID NO: 40548 - RNA, 1701 nt, Artificial Sequence
  derived and/or modified CDS sequence (wt) from hemagglutinin__InfluenzaA__AFG98874
augaagacuaucauugcuuugagcuacauuuucugucugguucucggccaagauuuuccaggaaaugacaacagcacagcaacgcugugccugggacaucaugcggugccaaacggaacacuagugaaaacaaucacaaaugaucagauugaagugacuaaugcuacugagcugguucagaguuccucaacggggaaaauaugcaacaauccucaucgaauccuugauggaauagacugcacacugauagaugcucuauugggggacccucauugugauggcuuucaaaaugagacaugggaccuuuucguugaacgcagcaaagcuuucagcaacuguuacccuuaugaugugccagauuaugccucccuuaggucacuaguugccucgucaggcacucuggaguuuaucaaugaaggcuucacuuggacuggggucacucagaaugggggaagcaaugcuugcaaaaggggaccugauaacgguuuuuucaguagacugaacugguuguacaaaucaggaagcacauauccagugcugaacgugacuaugccaaacaaugacaauuuugacaaacuauacauuugggggguucaccacccgagcacggaccaagaacaaaccagccuauauguucaagcaucagggagagucacagucucuaccaagagaagccagcaaacuauaaucccgaauaucgggucuagacccuggguaaggggucugucuaguagaauaagcaucuauuggacaauaguuaaaccaggagacauacugguaauuaauaguaaugggaaccuaauugcuccucgggguuauuucaaaaugcgcacugggaaaagcucaauaaugaggucagaugcaccuauuggcaccugcauuucugaaugcaucacuccaaauggaagcauucccaaugacaagcccuuucaaaacguaaacaagaucacauauggagcaugucccaaguauguuaagcaaaacacccugaaguuggcaacagggaugcgaaauguaccagagaaacaaacuagaggccuauucggcgcaauagcagguuucauagaaaaugguugggagggaaugauagacgguugguacgguuucaggcaucaaaauucugagggcacaggacaagcagcagaucuuaaaagcacucaagcagccaucgaccaaaucaaugggaaacugaauaggguaaucgagaagacgaacgagaaauuccaucaaaucgaaaaggaauucucagaaguagaagggagaauucaggaccucgagaaauacguugaagacacuaaaauagaucucuggucuuacaaugcggagcuucuugucgcucuggagaaccaacauacaauugaucugacugacucggaaaugaacaaacuguuugaaaaaacaaggaggcaacugagggaaaaugcugaggacaugggcaaugguugcuucaaaauauaccacaaaugugacaaugcuugcauagggucaaucagaaaugggacuuaugaccaugauguauacagagacgaagcauuaaacaaccgguuucagaucaaagguguugaacugaagucaggauacaaagacuggauccuguggauuuccuuugccauaucaugcuuuuugcuuuguguuguuuugcugggguucaucaugugggccugccagaaaggcaacauuaggugcaacauuugcauuuga

SEQ ID NO: 40549 - RNA, 1701 nt, Artificial Sequence
  derived and/or modified CDS sequence (wt) from hemagglutinin__InfluenzaA__AFG98885
augaagacuaucauugcuuugagcuacauuuucugucugguucucggccaagacuuuccagggaaugacaacagcacagcaacgcugugccugggacaucaugcggugccaaacgggacacuagugaaaacaaucacaaaugaucagauugaagugacuaaugcuacugagcugguucagaguuccucaacggggaaaauaugcaacaauccucaucgaauccuugauggaauagacugcacacugauagaugcucuauugggggacccucauugugauggcuuucaaaaugagacaugggaccuuuucguugaacgcagcaaagcuuucagcaacuguuacccuuaugaugugccagauuaugccucccuuaggucacuaguugccucuucaggcacucuggaguuuaucaaugaaggcuucacuuggacuggggucacucagaaugggggaagcaaugcuugcaaaaggggaacugauagcgguuuuuucaguagacugaacugguuguacaaaucaggaagcacauacccagugcugaacgugacuaugccaaacaaugacaauuuugacaaacuauacauuugggggguucaccacccgagcacggaccaagaacaaaccagccuauauguucaagcaucagggagagucacagucucuaccaagagaagccagcaaacuauaaucccgaauaucgggucuagacccuggguaaggggucugucuaguagaauaagcaucuauuggacaauaguuaaaccaggagacauacugguaauuaauaguaaugggaaccuaauugcuccucgggguuauuucaaaaugcgcacugggaaaagcucaauaaugaggucagaugcaccuauuggcaccugcauuucugaaugcaucacuccaaauggaagcauucccaaugacaagcccuuucaaaacguaaacaagaucacauauggggcaugucccaaguauguuaagcaaaacacccugaaguuggcaacagggaugcggaauguaccagagaaacaaacuagaggccuauucggcgcaauagcagguuucauagaaaaugguugggagggaaugauagacgguugguacgguuucaggcaucaaaauucugagggcacaggacaagcagcagaucuuaaaagcacucaagcagccaucgaccaaaucaaugggaaacugaauaggguaaucgagaagacgaacgagaaauuccaucaaaucgaaaaggaauucucagaaguagaagggagaauucaggaccucgagaaauacguugaagacacuaaaauagaucucuggucuuacaaugcggagcuucuugucgcucuggagaaccaacauacaauugaucugacugacucggaaaugaacaaacuguuugaaaaaacaaggaggcaacugagggaaaaugcugaggacaugggcaaugguugcuucaaaauauaccacaaaugugacaaugcuugcauagggucaaucagaaaugggacuuaugaccaugauguauacagagacgaagcauugaacaaccgguuucagaucaaagguguugaacugaagucaggauacaaagacuggauccuguggauuuccuuugccauaucaugcuuuuugcuuuguguuguuuugcugggguucaucaugugggccugccaaaaaggcaacauuaggugcaacauuugcauuuga

SEQ ID NO: 40550 - RNA, 1701 nt, Artificial Sequence
  derived and/or modified CDS sequence (wt) from hemagglutinin__InfluenzaA__AFG98896
augaagacuaucauugcuuugagcuacauuuucugucugguucucggccaagacuuuccaggaaaugacaacagcacagcaacgcugugccugggacaucaugcggugccaaacggaacacuagugaaaacaaucacaaaugaucagauugaagugacuaaugcuacugagcugguucagaguuccucaacggguaaaauaugcaacaauccucaucgaauccuugauggaauaaacugcacacugauagaugcucuguugggggacccucauugugauggcuuucaaaaugagacaugggaccuuuucguugaacgcagcaaagcuuucagcaacuguuacccuuaugaugugccagauuaugccucccuuaggucacuaguugccucgucaggcacucuggaguuuaucaaugaaggcuucacuuggacuggggucacucagaaugggggaagcaaugcuugcaaaaggggaccugauagcgguuuuuucaguagacugaacugguuguacaaaucaggaagcgcauauccagugcugaacgugacuaugccaaacaaugacaauuuugacaaacuauacauuugggggguucaccacccgagcacggaccaagaacaaaccaaccuauauguucaaacaucagggagagucacagucuccacaaagagaagccagcaaacuauaaucccgaauaucgggucuagacccuggguaaggggucugucuaguagaauaagcaucuauuggacaauaguuaaaccgggagacauacugguaauuaauaguaaugggaaccuaauugcuccucgggguuacuucaaaaugcgcacugggaaaagcucaauaaugaggucagaugcaccuauuggcaccugcauuucugaaugcaucacuccaaauggaagcauucccaaugacaagcccuuucaaaacguaaacaagaucacauauggggcaugucccaaguauguuaagcaaaacacucugaaguuggcaacagggaugcggaauguaccagagaaacaaacuagaggcauauucggcgcaauagcagguuucauagaaaaugguugggagggaaugauagacgguugguacgguuucaggcaucaaaauucugagggcacaggacaagcagcagaucuuaaaagcacucaagcagccaucgaccaaaucaaugggaaacugaauaggguaaucgagaagacgaacgagaaauuccaucaaaucgaaaaggaauucucagaaguagaagggagaauucaggaccucgagaaauacguugaagacacuaaaauagaucucuggucuuacaaugcggagcuucuugucgcucuggagaaccaacauacaauugaucugacugacucggaaaugaacaaacuguuugaaaaaacaaggaggcaacugagggaaaaugcugaggacaugggcaaugguugcuucaaaauauaccacaaaugugacaaugcuugcauagggucaaucagaaaugggacuuaugaccaugauguauacagagacgaagcauuaaacaaccgguuucagaucaaagguguugaacugaagucaggauacaaagacuggauccuguggauuuccuuugccauaucaugcuuuuugcuuuguguuguuuugcugggguucaucaugugggccugccaaaaaggcaacauuaggugcaacauuugcauuuga

SEQ ID NO: 40551 - RNA, 1701 nt, Artificial Sequence
  derived and/or modified CDS sequence (wt) from hemagglutinin__InfluenzaA__AFG98907
augaagacuaucauugcuuugagcuacauuuucugucugguucucggccaagaccuuccaggaaaugacaacagcacagcaacgcugugccugggacaucaugcggugccaaacggaacgcuagugaaaacaaucacgaaugaucagauugaagugacuaaugcuacugagcugguucagaguuccucaacggguaaaauaugcaacaauccucaucgaauccuugauggaauaaacugcacacugauagaugcucuauugggggacccucauugugauggcuuucaaaaugagaaaugggaccuuuuuguugaacgcagcaaagcuuucagcaauuguuacccuuaugaugugccagauuaugccucccuuaggucacuaguugccucgucaggcacucuggaguuuaucaaugaaggcuucaauuggacuggggucacucagaaugggggaagcaaugcuugcaaaaggggaccugacugcgguuuuuucaguagacugaacugguuguacaaaucaggaagcacauauccagugcugaacgugacuaugccaaacaaugacaauuuugacaaacuauacauuugggggguucaccacccgagcacggaccaagaacaaaccaaccuauauguucaagcaucagggagagucacagucuccaccaagagaagccagcaaacuauaaucccgaauaucgggucuagacccuggguaaggggucugucuaguagaauaagcaucuauuggacaauaguuaaaccgggagacauacugguaauuaauaguaaugggaaccuaauugcuccucgggguuacuucaaaaugcgcacugggaaaagcucaauaaugaggucagaugcaccuauuggcaccugcauuucugaaugcaucacuccaaacggaagcauucccaaugacaagcccuuucaaaacguaaacaagaucacauauggggcaugucccaaguauguuaagcaaaacacucugaaguuggcaacagggaugcggaauguaccagagaaacaaacuagaggcauauucggcgcaauagcagguuucauagaaaaugguugggagggaaugauagacgguugguacgguuucaggcaucaaaauucugagggcacaggacaagcagcagaucuuaaaagcacucaagcagccaucgaccaaaucaaugggaaacugaauaggguaaucgagaagacgaacgagaaauuccaucaaaucgaaaaggaauucucagaaguagaagggagaauucaggaccucgagaaauacguugaagacacuaaaauagaucucuggucuuacaaugcggagcuucuugucgcucuggagaaccaacauacaauugaucugacugacucggaaaugaacaaacuguuugaaaaaacaaggaggcaacugagggaaaaugcugaggacaugggcaaugguugcuucaaaauauaccacaaaugugacaaugcuugcauagggucaaucagaaaugggacuuauaaccaugauguauacagagacgaagcauuaaacaaccgguuucagaucaaagguguugaacugaagucaggauacaaagacuggauccuguggauuuccuuugccauaucaugcuuuuugcuuuguguuguuuugcugggguucaucaugugggccugccagaaaggcaacauuaggugcaacauuugcauuuga

SEQ ID NO: 40552 - RNA, 1701 nt, Artificial Sequence
  derived and/or modified CDS sequence (wt) from hemagglutinin__InfluenzaA__AFG98918
augaagacuaucauugcuuugagcuacauuuucugucugguucucggccaagaccuuccaggaaaugacaacagcacagcaacgcugugccugggacaucaugcggugccaaacggaacgcuagugaaaacaaucacgaaugaucagauugaagugacuaaugcuacugagcugguucagaguuccucaacggguaaaauaugcaacaauccucaucgaauccuugauggaauaaacugcacacugauagaugcucuauugggggacccucauugugauggcuuucaaaaugagaaaugggaccuuuuuguugaacgcagcaaagcuuucagcaauuguuacccuuaugaugugccagauuaugccucccuuaggucacuaguugccucgucaggcacucuggaguuuaucaaugaaggcuucaauuggacuggggucacucagaaugggggaagcaaugcuugcaaaaggggaccugacagagguuuuuucaguagacugaacugguuguacaaaucaggaagcacauauccagugcugaacgugacuaugccaaacaaugacaauuuugacaaacuauacauuugggggguucaccacccgagcacggaccaagaacaaaccaaccuauauguucaagcaucagggagagucacagucuccaccaagagaagccagcaaacuauaaucccgaauaucgggucuagacccuggguaaggggucugucuaguagaauaagcaucuauuggacaauaguuaaaccgggagacauacugguaauuaauaguaaugggaaccuaauugcuccucgggguuacuucaaaaugcgcacugggaaaagcucaauaaugaggucagaugcaccuauuggcaccugcauuucugaaugcaucacuccaaacggaagcauucccaaugacaagcccuuucaaaacguaaacaagaucacauauggggcaugucccaaguauguuaagcaaaacacucugaaguuggcaacagggaugcggaauguaccagagaaacaaacuagaggcauauucggcgcaauagcagguuucauagaaaaugguugggagggaaugauagacgguugguacgguuucaggcaucaaaauucugagggcacaggacaagcagcagaucuuaaaagcacucaagcagccaucgaccaaaucaaugggaaacugaauaggguaaucgagaagacgaacgagaaauuccaucaaaucgaaaaggaauucucagaaguagaagggagaauucaggaccucgagaaauacguugaagacacuaaaauagaucucuggucuuacaaugcggagcuucuugucgcucuggagaaccaacauacaauugaucugacugacucggaaaugaacaaacuguuugaaaaaacaaggaggcaacugagggaaaaugcugaggacaugggcaaugguugcuucaaaauauaccacaaaugugacaaugcuugcauagggucaaucagaaaugggacuuauaaccaugauguauacagagacgaagcauuaaacaaccgguuucagaucaaagguguugaacugaagucaggauacaaagacuggauccuguggauuuccuuugccauaucaugcuuuuugcuuuguguuguuuugcugggguucaucaugugggccugccagaaaggcaacauuaggugcaacauuugcauuuga

SEQ ID NO: 40553 - RNA, 1701 nt, Artificial Sequence
  derived and/or modified CDS sequence (wt) from hemagglutinin__InfluenzaA__AFG98929
augaagacugucauugcuuugagcuacauuuucugucugguucucggccaagaccuuccaggaaaugacaacagcacagcaacgcugugccugggacaucaugcggugccaaacggaacgcuagugaaaacaaucacgaaugaucagauugaagugacuaaugcuacugagcugguucagaguuccucaacggguaaaauaugcaacaauccucaucgaauccuggauggaauaaacugcacacugauagaugcucuauugggggacccucauugugauggcuuucaaaaugagaaaugggaccuuuucguugaacgcagcaaagcuuucagcaacuguuacccuuaugaugugccagauuaugccucccuuaggucacuaguugccucgucaggcacucuggaguuuaucaaugaaggcuucaauuggacuggggucacucagaaugggggaagcaaugcuugcaaaagaggaccugacaucgguuuuuucaguagacugaacugguuguacaaaucaggaagcacauauccagugcugaacgugacuaugccaaacaaugacaauuuugacaaacuauacauuugggggguucaccacccgagcacggaccaagaacaaaccaaccuauauguucaagcaucagggagagucacagucuccaccaagagaagccagcaaacuauaaucccgaauauugggucuagacccuggguaaggggucugucuaguagaauaagcaucuauuggacaauaguuaaaccgggagacauacugguaauuaauaguaaugggaaccuaauugcuccucgggguuacuucaaaaugcgcacugggaaaagcucaauaaugaggucagaugcaccuauuggcaccugcauuucugaaugcaucacuccaaauggaagcauucccaaugacaagcccuuucaaaacguaaacaagaucacauauggggcaugucccaaguaugugaagcaaaacacucugaaguuggcaacagggaugcggaauguaccagagaaacaaacuagaggcauauucggcgcaauagcagguuucauagaaaaugguugggagggaaugauagacgguugguacgguuucaggcaucaaaauucugagggcacaggacaagcagcagaucuuaaaagcacucaagcagccaucgaccaaaucaaugggaaacugaauaggguaaucgagaagacgaacgagaaauuccaucaaaucgaaaaggaauucucagaaguagaagggagaauucaggaccucgagaaauacguugaagacacuaaaauagaucucuggucuuacaaugcggagcuucuugucgcucuggagaaccaacauacaauugaucugacugacucggaaaugaacaaacuguuugaaaaaacaaggaggcaacugagggaaaaugcugaggacaugggcaaugguugcuucaaaauauaccacaaaugugacaaugcuugcauagggucaaucagaaaugggacuuauaaccaugauguauacagagacgaagcauuaaacaaccgguuucagaucaaagguguugaacugaagucaggauacaaagacuggauccuguggauuuccuuugccauaucaugcuuuuugcuuuguguuguuuugcugggguucaucaugugggccugccagaaaggcaacauuaggugcaacauuugcauuuga

SEQ ID NO: 40554 - RNA, 1701 nt, Artificial Sequence
  derived and/or modified CDS sequence (wt) from hemagglutinin__InfluenzaA__AFG98940
augaagacuaucauugcuuugagcuacauuuucugucugguucucggccaagaccuuccaggaaaugacaacagcacagcaacgcugugccugggacaucaugcggugccaaacggaacgcuagugaaaacaaucacgaaugaucagauugaagugacuaaugcuacugagcugguucagaguuccucaacggguaaaauaugcaacaauccucaucgaauccuugauggaauaaacugcacacugauagaugcucuauugggggacccccauugugauggcuuucaaaaugagaaaugggaccuuuucguugaacgcagcaaagcuuucagcaacuguuacccuuaugaugugccagauuaugccucccuuaggucacuaguugccucgucaggcacucuggaguuuaucaaugaaggcuucaauuggacuggggucacucagaaugggggaagcaaugcuugcaaaaggggaccugacagcgguuuuuucaguagacugaacugguuguacaaaucaggaagcacauauccagugcugaacgugacuaugccaaacaaagacaauuuugacaaacuauacauuugggggguucaccacccgagcacggaccaagaacaaaccaaccuauauguucaagcaucagggagagucacagucuccaccaagagaagccagcaaacuauaaucccgaauaucgggucuagacccuggguaagggguaugucuaguagaauaagcaucuauuggacaauaguuaaaccgggagacauacugguaauuaauaguaaugggaaccuaauugcuccucgggguuacuucaaaaugcgcacugggagaagcucaauaaugaggucagaugcaccuauuggcaccugcauuucugaaugcaucacuccaaauggaagcauucccaaugacaggcccuuucaaaacguaaacaagaucacauauggggcaugucccaaguauguuaagcaaaacacucugaaguuggcaacagggaugcggaauguaccagagaaacaaacuagaggcauauucggcgcaauagcagguuucauagaaaaugguugggagggaaugauagacgguugguacgguuucaggcaucaaaauucugagggcacaggacaagcagcagaucuuaaaagcacucaagcagccaucgaccaaaucaaugggaaacugaauaggguaaucgagaagacgaacgagaaauuccaucaaaucgaaaaggaauucucagaaguagaagggagaauucaggaccucgagaaauacguugaagacacuaaaauagaucucuggucuuacaaugcggagcuucuugucgcucuggagaaccaacauacaauugaucugacugacucggaaaugaacaaacuguuugaaaaaacaaggaggcaacugagggaaaaugcugaggacaugggcaaugguugcuucaaaauauaccacaaaugugacaaugcuugcauagagucaaucagaaaugggacuuauaaccaugauguauacagagacgaagcauuaaacaaccgguuucagaucaaagguguugaacugaagucaggguacaaagacuggauccuguggauuuccuuugccauaucaugcuuuuugcuuuguguuguuuugcugggguucaucaugugggccugccagaaaggcaacauuaggugcaacauuugcauuuga

SEQ ID NO: 40555 - RNA, 1701 nt, Artificial Sequence
  derived and/or modified CDS sequence (wt) from hemagglutinin__InfluenzaA__AFG98962
augaagacuaucauugcuuugagcuacauuuucugucugguucucgcccaagaccuuccaggaaaugacaacagcacagcaacgcugugccugggacaucaugcggugccaaacggaacgcuagugaaaacaaucacgaaugaucagauugaagugacuaaugcuacugagcugguucagagcuccucaacggguaaaauaugcaacaauccucaucgaauccuugauggaauaaacugcacacugauagaugcucuauugggggacccucauugugauggcuuucaaaaugagaaaugggaccuuuucguugaacgcagcaaagcuuucagcaacuguuacccuuaugaugugccagauuaugccucccuuaggucacuaguugccucgucaggcacucuggaguuuaucaaugaaggcuucaauuggacuggggucacucagaaugggggaagcaaugcuugcaaaaggggaccugauagcgguuuuuucaguagacugaacugguuguacaaaucaggaagcacauauccagugcugaacgugacuaugccaaacaaugacaauuuugacaaacuauacauuugggggguucaccacccgagcacggaccaagaacaaaccaaccuauauguucaagcaucagggagagucacagucuccaccaagagaagccagcaaacuauaaucccuaauguugggucuagacccuggguaaggggucugucuaguagaauaagcaucuauuggacaauaguuaaaccgggagacauacugguaauuaauaguaaugggaaccuaauugcuccucgggguuacuucaaaaugcgcacugggaaaagcucaauaaugaggucagaugcaccuauuggcaccugcaguucugaaugcaucacuccaaauggaagcauucccaaugacaagcccuuucaaaacguaaacaagaucacauauggggcaugucccaaguauguuaagcaaaacacucugaaguuggcaacagggaugcggaauguaccagagaaacaaacuagaggcauauucggcgcaauagcagguuucauagaaaaugguugggagggaaugauagacgguugguacgguuucaggcaucaaaauucugagggcacaggacaagcagcagaucuuaaaagcacucaagcagccaucgaccaaaucaaugggaaacugaauagaguaaucgagaagacgaacgagaaauuccaccaaaucgaaaaggaauucucagaaguagaagggagaauucaggaccucgagaaauacguugaagacacuaaaauagaucucuggucuuacaaugcggagcuucuugucgcucuggagaaccaacauacaauugaucugacugacucggaaaugaacaaacuguuugaaaaaacaaggaggcaacugagggaaaaugccgaggacaugggcaaugguugcuucaaaauauaccacaaaugugacaaugcuugcauagggucaaucagaaaugggacuuaugaccaugauguauacagagacgaagcauuaaacaaccgguuucagaucaaagguguugaacugaagucaggauacaaagacuggauccuguggauuuccuuugccauaucaugcuuuuugcuuuguguuguuuugcugggguucaucaugugggccugccagaaaggcaacauuaggugcaacauuugcauuuga

SEQ ID NO: 40556 - RNA, 1701 nt, Artificial Sequence
  derived and/or modified CDS sequence (wt) from hemagglutinin__InfluenzaA__AFG98973
augaagacuaucauugcuuugagcuacauuuucugucugguucucggccaagacuuuccaagaaaugacaacagcacagcaacgcugugccugggacaucaugcggugccaaauggaacacuagugaaaacaaucacaaaugaucagauugaagugacuaaugcuaaugaacugguucagaguuccucaacggggaaaauaugcaauaauccucaucgaauccucgauggaauggacugcacacugauagaugcucuauugggggacccucauugugauggccuucaaaaugagacaugggaccuuuucguugaacgcagcaaagcuuucagcaacuguuacccuuaugaugugccagauuaugccucccuuaggucacuaguugccucgucuggcacucuggaguuuaucaaugaaggcuucacuuggacuggggucacucagaaugggggaagcaaugcuugcaaaaggggaccugauagagguuuuuucaguagacugaacugguuguacaaaucaggaaacacauauccaguacugaacgugacuaugccaaacaaugacaauuuugacaaacuauacauuugggggguucaccacccgagcacggaccaagaccaaaccagccuauauguucaagcaucagggagagucacagucuccaccaagagaagccagcaaacuguaaucccgaauaucgggccuagacccuggguaaggggucugucuaguggaauaagcaucuauuggacaauaguuaaaccgggagacauacuguuaauuaauaguaaugggaaccuaauugcuccucgggguuauuucaaaaugcgcacugggaaaagcucaauaaugaggucagaugcaccuauuggcaccugcauuucugaaugcaucacuccaaauggaagcauucccaaugacaagcccuuucaaaacguaaacaagaucacauauggggcaugucccaaguauguuaagcaaaacacccugaaguuggcaacagggaugcggaauguaccagagaaacaaacuagaggcauauucggcgcaauagcagguuucauagaaaaugguugggagggaaugauagacgguugguacgguuucaggcaucaaaauucugagggcacagggcaagcagcagaucuuaaaagcacucaagcagccaucgaccaaaucaauggaaaacugaauaggguaaucgagaagacgaacgagaaauuccaucaaaucgaaaaggaguucucagaaguagaagggagaauucaggaccucgagaaauacguugaagacacuaaaauagaucucuggucuuacaaugcggagcuucuugucgcucuggagaaccaacauacaauugaucugacugacucggaaaugaacaaacuguuugaaaaaacaaggaggcaacugagggaaaaugcugaggacaugggcaaugguugcuucaaaauauaccacagaugugacaaugcuugcauagggucaaucagaaaugggacuuaugaccaugauguauacagagacgaagcauuaaacaaccgguuucagaucaaagguguugaacugaagucaggauacaaagacuggauccuguggauuuccuuugccauaucaugcuuuuugcuuuguguuguuuugcugggguucaucaugugggccugccaaaaaggcaacauuaggugcaacauuugcauuuga

SEQ ID NO: 40557 - RNA, 1701 nt, Artificial Sequence
  derived and/or modified CDS sequence (wt) from hemagglutinin__InfluenzaA__AFG98984
augaagacuaucauugcuuugagcuacauuuucugucugguucucggccaagacuuuccaagaaaugacaacagcacagcaacgcugugccugggacaucaugcggugccaaauggaacacuagugaaaacaaucacaaaugaucagauugaagugacuaaugcuacugaacugguucagaguuccucaacggggaaaauaugcaauaauccucaucgaauccucgauggaauggacugcacacugauagaugcucuauugggggacccucauugugauggccuucaaaaugagacaugggaccuuuucguugaacgcagcaaagcuuucagcaacuguuacccuuaugaugugccagauuaugccucccuuaggucacuaguugccucgucuggcacucuggaguuuaucaaugaaggcuucacuuggacuggggucacucagaaugggggaagcaaugcuugcaaaaggggaccugauagagguuuuuucaguagacugaacugguuguacaaaucaggaaacacauauccaguacugaacgugacuaugccaaacaaugacaauuuugacaaacuauacauuugggggguucaccacccgagcacggaccaagaccaaaccagccuauauguucaagcaucagggagagucacagucuccaccaagagaagccagcaaacuguaaucccgaauaucgggccuagacccuggguaaggggucugucuaguggaauaagcaucuauuggacaauaguuaaaccgggagacauacuguuaauuaauaguaaugggaaccuaauugcuccucgggguuauuucaaaaugcgcacugggaaaagcucaauaaugaggucagaugcaccuauuggcaccugcauuucugaaugcaucacuccaaauggaagcauucccaaugacaagcccuuucaaaacguaaacaagaucacauauggggcaugucccaaguauguuaagcaaaacacccugaaguuggcaacagggaugcggaauguaccagagaaacaaacuagaggcauauucggcgcaauagcagguuucauagaaaaugguugggagggaaugauagacgguugguacgguuucaggcaucaaaauucugagggcacagggcaagcagcagaucuuaaaagcacucaagcagccaucgaccaaaucaauggaaaacugaauaggguaaucgagaagacgaacgagaaauuccaucaaaucgaaaaggaguucucagaaguagaagggagaauucaggaccucgagaaauacguugaagacacuaaaauagaucucuggucuuacaaugcggagcuucuugucgcucuggagaaccaacauacaauugaucugacugacucggaaaugaacaaacuguuugaaaaaacaaggaggcaacugagggaaaaugcugaggacaugggcaaugguugcuucaaaauauaccacagaugugacaaugcuugcauagggucaaucagaaaugggacuuaugaccaugauguauacagagacgaagcauuaaacaaccgguuucagaucaaagguguugaacugaagucaggauacaaagacuggauccuguggauuuccuuugccauaucaugcuuuuugcuuuguguuguuuugcugggguucaucaugugggccugccaaaaaggcaacauuaggugcaacauuugcauuuga

SEQ ID NO: 40558 - RNA, 1704 nt, Artificial Sequence
  derived and/or modified CDS sequence (wt) from hemagglutinin__InfluenzaA__AFG98995
augaagacuaucauugcuuugagcuacauuuucugucugguuuucgcccaagaccuuccaggaaaugacaacaacagcacagcaacgcugugccugggacaucaugcggugccaaacggaacgcuagugaaaacaaucacgaaugaucagauugaagugacuaaugcuacugagcugguucagaguuccucaacggguaaaauaugcaacaauccucaucgaauccuugauggaauaaacugcacacugauagaugcucuauugggggacccucauugugauggauuucaaaaugagaaaugggaccuuuucguugaacgcagcaaagcuuucagcaacuguuacccuuaugaugugccagauuaugccucccuuaggucacuaguugccucgucaggcacucuggaguuuaucaaugaaggcuucaauuggacuggggucacucagaaugggggaagcaaugcuugcaaaagaggaccugauaucgguuuuuucaguagacugaacugguuguacaaaucaggaagcacauauccagugcaaaacgugaccaugccaaacaaugacaauucugacaaacuauacauuugggggguucaccacccgagcacggacaaagaacaaaccgaccuauauguucaagcaucagggaaagucacagucuccaccaagagaagccagcaaacuauaaucccgaaugucgggucuagacccuggguaaggggucugucuaguagaauaagcaucuauuggacaauaguuaaaccgggagacauacugguaauuaauaguaaugggaaccuaauugcuccucgggguuacuucaaaaugcgcacugggaaaagcucaauaaugaggucagaugcaccuauuggcaccugcagcucugaaugcaucacuccaaauggaagcauucccaaugacaagcccuuucaaaacguaaacaagaucacauauggggcaugucccaaguauguuaagcaaaacacucugaaguuggcaacagggaugcggaauguaccagagaaacaaacuagaggcauauucggcgcaauagcagguuucauagaaaaugguugggagggaaugauagacgguugguacgguuucaggcaucaaaauuccgagggcacaggacaagcagcagaucuuaaaagcacucaagcagccaucgaccaaaucaaugggaaacugaauaggguaaucgagaagacgaacgagaaauuccaucaaaucgaaaaggaauucucagaaguagaagggagaauucaggaccucgagaaauacguugaagacacuaaaauagaucucuggucuuacaaugcggagcuucuugucgcucuggagaaccaacauacaauugaucugacugacucggaaaugaacaaacuguuugaaaaaacaaggaggcaacugagggaaaaugcugaggacaugggcaaugguugcuucaaaauauaccacaaaugugacaaugcuugcauagggucaaucagaaaugggacuuaugaccaugauguauacagagacgaagcauuaaacaaccgguuucagaucaaagguguugaacugaagucaggauacaaagacuggauccuguggauuuccuuugccauaucaugcuuuuugcuuuguguuguuuugcugggguucaucaugugggccugccaaaaaggcaacauuaggugcaacauuugcauuuga

SEQ ID NO: 40559 - RNA, 1701 nt, Artificial Sequence
  derived and/or modified CDS sequence (wt) from hemagglutinin__InfluenzaA__AFG99006
augaagacuaucauugcuuugagcuacauuuucugucugguucucggccaagacuuuccaagaaaugacaacagcacagcaacgcugugccugggacaucaugcggugccaaauggaacacuagugaaaacaaucacaaaugaucagauugaagugacuaaugcuacugaacugguucagaguuccucaacggggaaaauaugcaacaauccucaucgaauccucgauggaauggacugcacacugauagaugcucuauugggggacccucauugugauggccuucaaaaugagacaugggaccuuuucguugaacgcagcaaagcuuucagcaacuguuacccuuaugaugugccagauuaugccucccuuaggucacuaguugccucgucuggcacucuggaguuuaucaaugaaggcuucacuuggacuggggucacucagaaugggggaagcaaugcuugcaaaaggggaccugauagagguuuuuucaguagacugaacugguuguacaaaucaggaaacacauauccaguacugaacgugacuaugccaaacaaugacaauuuugacaaacuauacauuugggggguucaccacccgagcacggaccaagaccaaaccagccuauauguucaagcaucagggagagucacagucuccacaaagagaagccagcaaacuguaaucccgaauaucgggccuagacccuggguaaggggucugucuaguagaauaagcaucuauuggacaauaguuaaaccgggagacauacuguuaauuaauaguaaugggaaccuaauugcuccucgggguuauuucaaaaugcgcacugggaaaagcucaauaaugaggucagaugcaccuauuggcaccugcauuucugaaugcaucacuccaaauggaagcauucccaaugacaagcccuuucaaaacguaaacaagaucacauauggggcaugucccaaguauguuaagcaaaacacccugaaguuggcaacagggaugcggaauguaccagagaaacaaacuagaggcauauucggcgcaauagcagguuucauagaaaaugguugggagggaaugauagacgguugguacgguuucaggcaucaaaauucugagggcacagggcaagcagcagaucuuaaaagcacucaagcagccaucgaccaaaucaauggaaaacugaauaggguaaucgagaagacgaacgagaaauuccaucaaaucgaaaaggaguucucagaaguagaagggagaauucaggaccucgagaaauacguugaagacacuaaaauagaucucuggucuuacaaugcggagcuucuugucgcucuggagaaccaacauacaauugaucugacugacucggaaaugaacaaacuguuugaaaaaacaaggaggcaacugagggaaaaugcugaggacaugggcaaugguugcuucaaaauauaccacagaugugacaaugcuugcauagggucaaucagaaaugggacuuaugaccaugauguauacagagacgaagcauuaaacaaccgguuucagaucaaagguguugaacugaagucaggauacaaagacuggauccuguggauuuccuuugccauaucaugcuuuuugcuuuguguuguuuugcugggguucaucaugugggccugccaaaaaggcaacauuaggugcaacauuugcauuuga

SEQ ID NO: 40560 - RNA, 1701 nt, Artificial Sequence; identical to SEQ ID NO: 32776
  derived and/or modified CDS sequence (wt) from hemagglutinin__InfluenzaA__AFG99017

SEQ ID NO: 40561 - RNA, 1701 nt, Artificial Sequence
  derived and/or modified CDS sequence (wt) from hemagglutinin__InfluenzaA__AFG99028
augaagacuaucauugcuuugagcuacauuuucugucugguuuucgcccaagaccuuccaggaaaugacaacagcacagcaacucugugccugggacaucaugcggugccaaacggaacgcuagugaaaacaaucacgaaugaucagauugaagugacuaaugcuacugaacugguucagaguuccucaacggguaaaauaugcggcaauccucaucgaauccuugauggaauaaacugcacacugauagaugcucuauugggggacccucauugugauggcuuucaaaaugagaaaugggaccuuuucguugaacgcagcaaagcuuucagcaacuguuacccuuaugaugugccagauuaugccucccuuaggucacuaguugccucgucaggcacucuggaguuuaucaaugaaggcuucaauuggacuggggucacucagaaugggggaagcagugcuugcaaaaggggaccugauaacgguuuuuucaguagacugaacugguuguacaaaucaggaagcacauauccagugcagaacgugaccaugccaaacaaugacaacucugacaaacuauacauuugggggguucaccacccgagcacggacaaagaacaaaccgaccuauauguucaagcaucagggaaagucacagucuccaccaagagaagccagcaaacuguaaucccgaaugucgggucuagacccuggguaaggggucugucuaguagaguaagcaucuauuggacaauaguuaaaccgggagacauacugguaauuaauaguaauggaaaccuaauugcuccucgggguuacuucaaaaugcgcacugggaaaagcucaauaaugaggucagaugcaccuauuggcaccugcagcucugaaugcaucacuccaaauggaagcauucccaaugacaagcccuuucaaaacguaaacaagaucacauauggggcaugucccaaguauguuaagcaaaacacucugaaguuggcaacagggaugcggaauguaccagagaaacaaacuagaggcauauucggcgcaauagcagguuucauagaaaaugguugggagggaaugauagacgguugguacgguuucaggcaucaaaauucugagggcacaggacaagcagcagaucuuaaaagcacucaagcagccaucgaccaaaucaaugggaaacugaauaggguaaucgagaagacgaacgagaaauuccaucaaaucgaaaaggaauucucagaaguagaagggagaauucaggaccucgagaaauacguugaagacacuaaaauagaucucuggucuuacaaugcggagcuucuugucgcucuggagaaccaacauacaauugaucugacugacucggaaaugaacaaacuguuugaaaaaacaaggaggcaacugagggaaaaugcugaggacaugggcaaugguugcuucaaaauauaccacaaaugugacaaugcuugcauagggucaaucagaaaugggacuuaugaccaugauguauacagagacgaagcauuaaacaaccgguuucagaucaaagguguugaacugaagucaggauacaaagacuggauccuguggauuuccuuugccauaucaugcuuuuugcuuuguguuguuuugcugggguucaucaugugggccugccagaaaggcaacauuaggugcaacauuugcauuuga

SEQ ID NO: 40562 - RNA, 1701 nt, Artificial Sequence
  derived and/or modified CDS sequence (wt) from hemagglutinin__InfluenzaA__AFG99039
augaagacuaucauugcuuugagcuacauuuucugucugguuuucgcccaagaccuuccaggaaaugacaacagcacagcaacucugugccugggacaucaugcggugccaaacggaacgcuagugaaaacaaucacgaaugaucagauugaagugacuaaugcuacugaacugguucagaguuccucaacggguaaaauaugcgacaauccucaucgaauccuugauggaauaaacugcacacugauagaugcucuauugggggacccucauugugauggcuuucaaaaugagaaaugggaccuuuucguugaacgcagcaaagcuuucagcaacuguuacccuuaugaugugccagauuaugccucccuuaggucacuaguugccucgucaggcacucuggaguuuaucaaugaaggcuucaauuggacuggggucacucagaaugggggaagcagugcuugcaaaaggggaccugauaacgguuuuuucaguagacugaacugguuguacaaaucaggaagcacauauccagugcagaacguggccaugccaaacaaugacaacucugacaaacuauacauuugggggguucaccacccgagcacggacaaagaacaaaccgaccuauauguucaagcaucagggaaagucacagucuccaccaagagaagccagcaaacuguaaucccgaaugucgggucuagacccuggguaaggggucugucuaguagaguaagcaucuauuggacaauaguuaaaccgggagacauacugguaauuaauaguaauggaaaccuaauugcuccucgggguuacuucaaaaugcgcacugggaaaagcucaauaaugaggucagaugcaccuauuggcaccugcagcucugaaugcaucacuccaaauggaagcauucccaaugacaagcccuuucaaaacguaaacaagaucacauauggggcaugucccaaguauguuaagcaaaacacucugaaguuggcaacagggaugcggaauguaccagagaaacaaacuagaggcauauucggcgcaauagcagguuucauagaaaaugguugggagggaaugauagacgguugguacgguuucaggcaucaaaauucugagggcacaggacaagcagcagaucuuaaaagcacucaagcagccaucgaccaaaucaaugggaaacugaauaggguaaucgagaagacgaacgagaaauuccaucaaaucgaaaaggaauucucagaaguagaagggagaauucaggaccucgagaaauacguugaagacacuaaaauagaucucuggucuuacaaugcggagcuucuugucgcucuggagaaccaacauacaauugaucugacugacucggaaaugaacaaacuauuugaaaaaacaaggaggcaacugagggaaaaugcugaggacaugggcaaugguugcuucaaaauauaccacaaaugugacaaugcuugcauagggucaaucagaaaugggacuuaugaccaugauguauacagagacgaagcauuaaacaaccgguuucagaucaaagguguugaacugaagucaggauacaaagacuggauccuguggauuuccuuugccauaucaugcuuuuugcuuuguguuguuuugcugggguucaucaugugggccugccagaaaggcaacauuaggugcaacauuugcauuuga

SEQ ID NO: 40563 - RNA, 1701 nt, Artificial Sequence
  derived and/or modified CDS sequence (wt) from hemagglutinin__InfluenzaA__AFG99050
augaagacuaucauugcuuugagcuacauuuucugucugguuuucgcccaagaccuuccaggaaaugacaacagcacagcaacucugugccugggacaucaugcggugccaaacggaacgcuagugaaaacaaucacgaaugaucagauugaagugacuaaugcuacugaacugguucagaguuccucaacggguaaaauaugcgacaauccucaucgaauccuugauggaauaaacugcacacugauagaugcucuauugggggacccucauugugauggcuuucaaaaugagaaaugggaccuuuucguugaacgcagcaaagcuuucagcaacuguuacccuuaugaugugccagauuaugccucccuuaggucacuaguugccucgucaggcacucuggaguuuaucaaugaaggcuucaauuggacuggggucacucagaaugggggaagcagugcuugcaaaaggggaccugauaacgguuuuuucaguagacugaacugguuguacaaaucaggaagcacauauccagugcagaacgugaccaugccaaacaaugacaacucugacaaacuauacauuugggggguucaccacccgagcacggacaaagaacaaaccgaccuauauguucaagcaucagggaaagucacagucuccaccaagagaagccagcaaacuguaaucccgaaugucgggucuagacccuggguaaggggucugucuaguagaguaagcaucuauuggacaauaguuaaaccgggagacauacugguaauuaauaguaauggaaaccuaauugcuccucgggguuacuucaaaaugcgcacugggaaaagcucaauaaugaggucagaugcaccuauuggcaccugcagcucugaaugcaucacuccaaauggaagcauucccaaugacaagcccuuucaaaacguaaacaagaucacauauggggcaugucccaaguauguuaagcaaaacacucugaaguuggcaacagggaugcggaauguaccagagaaacaaacuagaggcauauucggcgcaauagcagguuucauagaaaaugguugggagggaaugauagacgguugguacgguuucaggcaucaaaauucugagggcacaggacaagcagcagaucuuaaaagcacucaagcagccaucgaccaaaucaaugggaaacuaaauaggguaaucgagaagacgaacgagaaauuccaucaaaucgaaaaggaauucucagaaguagaagggagaauucaggaccucgagaaauacguugaagacacuaaaauagaucucuggucuuacaaugcggagcuucuugucgcucuggagaaccaacauacaauugaucugacugacucggaaaugaacaaacuguuugaaaaaacaaggaggcaacugagggaaaaugcugaggacaugggcaaugguugcuucaaaauauaccacaaaugugacaaugcuugcauagggucaaucagaaaugggacuuaugaccaugauguauacagagacgaagcauuaaacaaccgguuucagaucaaagguguugaacugaagucaggauacaaagacuggauccuguggauuuccuuugccauaucaugcuuuuugcuuuguguuguuuugcugggguucaucaugugggccugccagaaaggcaacauuaggugcaacauuugcauuuga

SEQ ID NO: 40564 - RNA, 1701 nt, Artificial Sequence
  derived and/or modified CDS sequence (wt) from hemagglutinin__InfluenzaA__AFG99061
augaagacuaucauugcuuugagcuacauuuucugucugguuuucgcccaagaccuuccaggaaaugacaacagcacagcaacucugugccugggacaucaugcggugccaaacggaacgcuagugaaaacaaucacgaaugaucagauugaagugacuaaugcuacugaacugguucagaguuccucaacggguaaaauaugcgacaauccucaucgaauccuugauggaauaaacugcacacugauagaugcucuauugggggacccucauugugauggcuuucaaaaugagaaaugggaccuuuucguugaacgcagcaaagcuuucagcaacuguuacccuuaugaugugccagauuaugccucccuuaggucacuaguugccucgucaggcacucuggaguuuaucaaugaaggcuucaauuggacuggggucacucagaaugggggaagcagugcuugcaaaaggggaccugauaacgguuuuuucaguagacugaacugguuguacaaaucaggaagcacauauccagugcagaacgugaccaugccaaacaaugacaacucugacaaacuauacauuugggggguucaccacccgagcacggacaaagaacaaaccgaccuauauguucaagcaucagggaaagucacagucuccaccaagagaagccagcaaacuguaaucccgaaugucgggucuagacccuggguaaggggucugucuaguagaguaagcaucuauuggacaauaguuaaaccgggagacauacugguaauuaauaguaauggaaaccuaauugcuccucgggguuacuucaaaaugcgcacugggaaaagcucaauaaugaggucagaugcaccuauuggcaccugcagcucugaaugcaucacuccaaauggaagcauucccaaugacaagcccuuucaaaacguaaacaagaucacauauggggcaugucccaaguauauuaagcaaaacacucugaaguuggcaacagggaugcggaauguaccagagaaacaaacuagaggcauauucggcgcaauagcagguuucauagaaaaugguugggagggaaugauagacgguugguacgguuucaggcaucaaaauucugagggcacaggacaagcagcagaucuuaaaagcacucaagcagccaucgaccaaaucaaugggaaacugaauaagguaaucgagaagacgaacgagaaauuccaucaaaucgaaaaggaauucucagaaguagaagggagaauucaggaccucgagaaauacguugaagacacuaaaauagaucucuggucuuacaaugcggagcuucuugucgcccuggagaaccaacauacaauugaucugacugacucggaaaugaacaaacuguuugaaaaaacaaggaggcaacugagggaaaaugcugaggacaugggcaaugguugcuucaaaauauaccacaaaugugacaaugcuugcauagggucaaucagaaaugggacuuaugaccaugauguauacagagacgaagcauuaaacaaccgguuucagaucaaagguguugaacugaagucaggauacaaagacuggauccuguggauuuccuuugccauaucaugcuuuuugcuuuguguuguuuugcugggguucaucaugugggccugccagaaaggcaacauuaggugcaacauuugcauuuga

SEQ ID NO: 40565 - RNA, 1701 nt, Artificial Sequence
  derived and/or modified CDS sequence (wt) from hemagglutinin__InfluenzaA__AFG99072
augaagacuaucauugcuuugagcuacauuuucugucugguuuucgcccaagaccuuccaggaaaugacaacagcacagcaacucugugccugggacaucaugcggugccaaacggaacgcuagugaaaacaaucacgaaugaucagauugaagugacuaaugcuacugaacugguucagaguuccucaacggguaaaauaugcgacaauccucaucgaauccuugauggaaaaaacugcacacugauagaugcucuauugggggacccucauugugauggcuuucaaaaugagaaaugggaccuuuucguugaacgcagcaaagcuuucagcaacuguuacccuuaugaugugccagauuaugccucccuuagaucacuaguugccucgucaggcacucuggaguuuaucaaugaaggcuucaauuggacuggggucacucagaaugggggaagcagugcuugcaaaaggggaccugauaacgguuuuuucaguagacugaacugguuguacaaaucaggaagcacauauccagugcagaacgugaccaugccaaacaaugacaacucugacagacuauacauuugggggguucaccacccgagcacggacaaagaacaaaccgaccuauauguucaagcaucagggaaagucacagucuccaccaagagaagccagcaaacuguaaucccgaaugucgggucuagacccuggguaaggggucugucuaguagaguaagcaucuauuggacaauaguuaaaccgggagacauacugguaauuaauaguaauggaaaccuaauugcuccucgggguuacuucaaaaugcgcacugggaaaagcucaauaaugaggucagaugcaccuauuggcaccugcagcucugaaugcaucacuccaaauggaagcauucccaaugacaagcccuuucaaaacguaaacaagaucacauauggggcaugucccaaguauguuaagcaaaacacucugaaguuggcaacagggaugcggaauguaccagagaaacaaacuagaggcauauucggcgcaauagcagguuucauagaaaaugguugggagggaaugauagacgguugguacgguuucaggcaucaaaauucugagggcacaggacaagcagcagaucuuaaaagcacucaagcagccaucgaccaaaucaaugggaaacugaauaggguaaucgagaagacgaacgagaaauuccaucaaaucgaaaaggaauucucagaaguagaggggagaauucaggaccucgagaaauacguugaagacacuaaaauagaucucuggucuuacaaugcggagcuucuugucgcucuggagaaccaacauacaauugaucugacugacucggaaaugaacaaacuguuugaaaaaacaaggaggcaacugagggaaaaugcugaggacaugggcaaugguugcuucaaaauauaccacaaaugugacaaugcuugcauagggucaaucagaaaugggacuuauaaccaugauguauacagagacgaagcauuaaacaaccgguuucagaucaaagguguugaacugaagucaggauacaaagacuggauccuguggauuuccuuugccauaucaugcuuuuugcuuuguguuguuuugcugggguucaucaugugggccugccagaaaggcaacauuaggugcaacauuugcauuuga

SEQ ID NO: 40566 - RNA, 1701 nt, Artificial Sequence
  derived and/or modified CDS sequence (wt) from hemagglutinin__InfluenzaA__AFG99083
augaagaccaucauugcuuugagcuacauuuucugucugguuuucgcccaagaccuuccaggaaaugauaacagcacagcaacucugugccugggacaucaugcggugccaaacggaacgcuagugaaaacaaucacgaaugaucagauugaagugacuaaugcuacugaacugguucagaguuccucaacggguaaaauaugcgacaauccucaucgaauccuugauggaauaaacugcacacugauagaugcucuauugggagacccucauugugauggcuuucaaaaugagaaaugggaccuuuucguugaacgcagcaaagcuuucagcaacuguuacccuuaugaugugccagauuaugccucccuuaggucacuaguugccucgucaggcacucuggaguuuaucaaugaaggcuucaauuggacuggggucacucagaaugggggaagcagugcuugcaaaaggggaccugauaaagguuuuuucaguagacugaacugguuguacaaaucaggaagcacauauccagugcagaacgugaccaugccaaacaaugacaacucugacaaacuauacauuugggggguucaccacccgagcacggacaaagaacaaaccgaccuauauguucaagcaucagggaaagucacagucuccaccaagagaagccagcaaacuguaaucccgaaugucgggucuagacccuggguaaggggucugucuaguagaguaagcaucuauuggacaauaguuaaaccgggagacauacugguaauuaauaguaauggaaaccuaauugcuccucgggguuacuucaaaaugcucacugggaaaagcucaauaaugaggucagaugcaccuauuggcaccugcagcucugaaugcaucacuccaaauggaagcauucccaaugacaagcccuuucaaaacguaaacaagaucacauauggggcaugucccaaguauguuaagcaaaacacucugaaguuggcaacagggaugcggaauguaccagagaaacaaacuagaggcauauucggcgcaauagcagguuucauagaaaaugguugggagggaaugauagacgguugguacgguuucaggcaucaaaauucugagggcacagggcaagcagcagaucuuaaaagcacucaagcagccaucgaucaaaucaaugggaaacugaauaggguaaucgagaagacgaacgagaaauuccaucaaaucgaaaaggaauucucagaaguagaagggagaauucaugaccucgagaaauacguugaagacacuaaaauagaucucuggucuuacaaugcggagcuucuugucgcucuggagaaccaacauacaauugaucugacugacucggaaaugaacaaacuguuugaaaaaacaaggaggcaacugagggaaaaugcugaggacaugggcaaugguugcuucaaaauauaccacaaaugugacaaugcuugcauagggucaaucagaaaugggacuuaugaccaugauguauacagagacgaagcauuaaacaaccgguuucagaucaaagguguugaacugaagucaggauacaaagacuggauccuguggauuuccuuugccauaucaugcuuuuugcuuuguguuguuuugcugggguucaucaugugggccugccagaaaggcaacauuaggugcaacauuugcauuuga

SEQ ID NO: 40567 - RNA, 1701 nt, Artificial Sequence
  derived and/or modified CDS sequence (wt) from hemagglutinin__InfluenzaA__AFG99094
augaagaccaucauugcuuugagcuacauuuucugucugguuuucgcccaagaccuuccaggaaaugacaacagcacagcaacucugugccugggacaucaugcggugccaaacggaacgcuagugaaaacaaucacgaaugaucagauugaagugacuaaugcuacugaacugguucagaguuccucaacggguaaaauaugcgacaauccucaucgaauccuugauggaauaaauugcacacugauagaugcucuauugggagacccucauugugauggcuuucaaaaugagaaaugggaccuuuucguugaacgcagcaaagcuuucagcaacuguuacccuuaugaugugccagauuaugccucccuuaggucacuaguugccucgucaggcacucuggaguuuaucaaugaaggcuucaauuggacuggggucacucagaaugggggaagcggugcuugcaaaaggggaccugauaacgguuuuuucaguagacugaacugguuguacaaaucaggaagcacauauccagugcagaacgugaccaugccaaacaaugacaacucugacaaacuauacauuugggggguucaccacccgagcacggacaaagaacaaaccgaccuauauguucaagcaucagggaaagucacagucuccaccaaaagaagccagcaaacuguaaucccgaaugucgggucuagacccuggguaaggggucugucuaguagaguaagcaucuauuggacaauaguuaaaccgggagacauacugguaauuaauaguaauggaaaccuaauugcuccucgggguuacuucaaaaugcgcacugggaaaagcucaauaaugaggucagaugcaccuauuggcaccugcagcucugaaugcaucacuccaaauggaagcauucccaaugacaagcccuuucaaaacguaaacaagaucacauauggggcaugucccaaguauguuaagcaaaacacucugaaguuggcaacagggaugcggaauguaccagagaaacaaacuagaggcauauucggcgcaauagcagguuucauagaaaaugguugggagggaaugauagacgguugguacgguuucaggcaucaaaauucugagggcacaggacaagcagcagaucuuaaaagcacucaagcagccaucgaccaaaucaaugggaaacugaauaggguaaucgagaagacgaacgagaaauuccaucaaaucgaaaaggaauucucagaaguagaagggagaauucaggaccucgagaaauacguugaagacacuaaaauagaucucuggucuuacaaugcggagcuucuugucgcucuggagaaccaacauacaauugaucugacugacucggaaaugaacaaacuguuugaaaaaacaaggaggcaacugagggaaaaugcugaggacaugggcaaugguugcuucaaaauauaccacaaaugugacaaugcuugcauagggucaaucagaaaugggacuuaugaccaugauguauacagagacgaagcauuaaacaaccgguuucagaucaaagguguugaacugaagucaggauacaaagacuggauccuguggauuuccuuugccauaucaugcuuuuugcuuuguguuguuuugcugggguucaucaugugggccugccagaaaggcaacauuaggugcaacauuugcauuuga

SEQ ID NO: 40568 - RNA, 1701 nt, Artificial Sequence
  derived and/or modified CDS sequence (wt) from hemagglutinin__InfluenzaA__AFG99116
augaagacuaucauugcuuugagcuacauuuucugucugguuuucgcccaaaaccuucccggaaaugacaacagcacagcaacgcugugccugggacaccaugcagugccaaacggaacgcuagugaaaacaaucacgaaugaucagauugaagugacuaaugcuacugagcugguucagaguuccucaacagguagaauaugcgacaguccucaccgaauccuugaugggaaaaacugcacacugguagaugcucuauugggagacccucauugugauggcuuucaaaaugagaaaugggaccuuuuuguugaacgcagcaaagcuuucagcaacuguuacccuuaugaugugccagauuaugccucccuuaggucacuaguugccucgucaggcacccuggaguuuaucaaugaaagcuucaauuggacuggagucacucagagugggggaagcuaugcuugcaaaaggggaucugauaacaguuucuucaguagacugaauugguuguacgaaucagaaagcaaauauccagugcugaacgugacuaugccaaacaauggcaauuuugacaaacuguacauuugggggguucaccacccgagcacggacaaagaacaaaccaaccuauauguucgagcaucagggagagucacaguaucuaccaagagaagccagcaaacuauaaucccgaauaucgggucuagacccuggguaaggggucugucuagcagaauaagcaucuauuggacaauaguaaaaccgggagacauacuguuaauuaauaguaauggaaaccuaauugcuccucgggguuacuucaaaauacgcacugggaaaagcucaauaaugaggucagaugcaccuauuggcaccugcaguucugaaugcaucacuccaaauggaagcauucccaaugacaagcccuuucaaaauguaaacaagaucacauauggggcaugucccaaguauguuaagcaaaacacucugaaguuggcaacaggaaugcgaaauguaccagagaaacaaacuagaggcauauucggcgcaauagcagguuucauagaaaaugguugggagggaaugguagacgguugguacgguuucaggcaucaaaauucugagggcacaggacaagcagcagaucuuaaaagcacucaagcagcaaucgaccaaaucaaugggaaacugaauaggguaaucgagaaaacgaacgagaaauuccaucaaaucgaaaaggaauucucagaaguagaagggagaauucaggaccucgagaaauacguugaagacacuaaaauagaucucuggucuuacaacgcggagcuucuugucgcucuggagaaccaacauacaauugaucugacugacucggaaaugaacaaacuguuugaaaaaacaaggaggcaacugagggaaaaugcugaggacaugggcaaugguugcuucaaaauauaccacaaaugugacaaugcuugcauagggucaaucagaaauggaacuuaugaccaugauguauacagagacgaagcauuaaacaaccgguuucagaucaaagguguugagcugaagucaggauacaaagacuggauccuguggauuuccuuugccauaucaugcuuuuugcuuuguguuguuuugcugggguucaucaugugggccugccaaaaaggcaacauuaggugcaacauuugcauuuga

SEQ ID NO: 40569 - RNA, 1701 nt, Artificial Sequence
  derived and/or modified CDS sequence (wt) from hemagglutinin__InfluenzaA__AFG99127
augaagacuaucauugcuuugagcuacauucucugucugguuuucgcccaaaaccuucccggaaaugacaacagcacagcaacgcugugccugggacaccaugcagugccaaacggaacgcuagugaaaacaaucacgaaugaucagauugaagugacuaaugcuacugagcugguucagaguuccucaacagguagaauaugcgacaguccucaccgaauccuugaugggaaaaacugcacacugguagaugcucuauuaggagacccucauugugauggcuuucaaaaugagaaaugggaccucuuuguugaacgcagcaaagcuuucagcaacuguuacccuuaugaugugccagauuaugccucccuuaggucacuaguugccucgucaggcacccuggaguuuaucaaugaaagcuucaauuggacuggagucacucagagugggggaagcuaugcuugcaaaaggggaucugauaacaguuucuucaguagacugaauugguuguacgaaucagaaagcaaauauccagugcugaacgugaccaugccaaacaauggcaauuuugacaaacuguacauuugggggguucaccacccgagcacggacaaagaacaaaccaaccuauauguucgagcaucagggagagucacagucucuaccaagagaagccagcaaacuauaaucccgaauaucggaucuagacccuggguaaggggucugucuagcagaauaagcaucuauuggacaauaguaaaaccgggagacauacuguuaauuaauaguaaugggaaccuaauugcuccucgggguuacuucaaaauacgcacugggaaaagcucaauaaugaggucagaugcaccuauuggcaccugcaguucugaaugcaucacuccaaauggaagcauucccaaugacaagcccuuucaaaauguaaacaagaucacauauggggcaugucccaaguauguuaagcaaaacacucugaaguuggcaacagggaugcggaauguaccagagaaacaaacuagaggcauauucggcgcaauagcagguuucauagaaaaugguugggagggaaugguagacgguugguacgguuucaggcaucaaaauucugagggcacaggacaagcagcagaucuuaaaagcacucaagcagcaaucgaccaaaucaaugggaaacugaauaggguaaucgagaaaacgaacgagaaauuccaucaaaucgaaaaggaauucucagaaguagaagggagaauucaggaccucgagaaauacguugaagacacuaaaauagaucucuggucuuacaacgcggagcuucuugucgcucuggagaaccaacauacaauugaucugacugacucggaaaugaacaaacuguuugaaaaaacaaggaggcaacugagggaaaaugcugaggacaugggcaaugguugcuucaaaauauaccacaaaugugacaaugcuugcauagggucaaucagaaauggaacuuaugaccaugauguauacagagacgaagcauuaaacaaccgguuucagaucaaagguguugagcugaagucaggauacaaagacuggauccuguggauuuccuuugccauaucaugcuuuuugcuuuguguuguuuugcugggguucaucaugugggccugccaaaaaggcaacauuaggugcaacauuugcauuuga

SEQ ID NO: 40570 - RNA, 1701 nt, Artificial Sequence
  derived and/or modified CDS sequence (wt) from hemagglutinin__InfluenzaA__AFG99138
augaagacuaucauugcuuuaagcuacauuuucugucugguuuucgcccaaaaccuucccggaaaugacaacagcacagcaacgcugugccugggacaccaugcagugccaaacggaacgcuagugaaaacaaucacgaaugaucagauugaagugacuaaugcuacugagcugguucagaguuccucaacagguagaauaugcgacaguccucaccgaauccuugaugggaaaaacugcacacugguagaugcucuauugggagacccccauugugauggcuuucaaaaugagaaaugggaccuuuuuguugaacgcagcaaagcuuucagcaacuguuacccuuaugaugugccagauuaugccucccuuaggucacuaguugccucgucaggcacccuggaguuuaucaaugaaagcuucaauuggacuggagucacucagagugggggaagcucugcuugcaaaaggggaucugauaacaguuucuucaguagacugaauugguuguacgaaucagaaagcaaauauccagugcugaacgugacuaugccaaacaauggcaauuuugacaaacuguacauuugggggguucaccacccgagcacggacaaagaacaaaccaaccuauauguucgagcaucagggagagucacagucucuaccaagagaaaccagcaaacuguaaucccgaauaucgggucuagacccuggguaaggggucugucuagcagaauaagcaucuauuggacaauaguaaaaccgggagacauacugcuaauuaauaguaaugggaaccuaauugcuccucgggguuacuucaaaauacgcaaugggaaaagcucaauaaugaggucagaugcaccuauuggcaccugcaguucugaaugcaucacuccaaauggaagcauucccaaugacaagcccuuucaaaauguaaacaagaucacauauggggcaugucccaaguacguuaagcaaaacacucugaaguuggcaacagggaugcggaauguaccagagaaacaaacuagaggcauauucggcgcaauagcagguuucauagaaaaugguugggagggaaugguagacgguugguacgguuucaggcaucgaaauucugagggcacaggacaagcagcagaucuuaaaagcacucaagcagcaaucgaccaaaucaaugggaaacugaauaggguaaucgagaaaacgaacgagaaauuccaucaaaucgaaaaggaauucucagaaguagaagggagaauucaggaccucgagaaauacguugaagacacuaaaauagaucucuggucuuacaacgcggagcuucuugucgcucuggagaaccaacauacaauugaucugacugacucggaaaugaacaaacuguuugaaaaaacaaggaggcaacugagggaaaaugcugaggacaugggcaaugguugcuucaaaauauaccacaaaugugacaaugcuugcauagggucaaucagaaauggaacuuaugaccaugauguauacagagacgaagcauuaaacaaccgguuucagaucaaagguguugagcugaagucaggauacaaagacuggauccuguggauuuccuuugccauaucaugcuucuugcuuuguguuguuuugcugggguucaucaugugggccugccaaaaaggcaacauuaggugcaacauuugcauuuga

SEQ ID NO: 40571 - RNA, 1701 nt, Artificial Sequence
  derived and/or modified CDS sequence (wt) from hemagglutinin__InfluenzaA__AFG99149
augaagacuaucauugccuugagcuacauccucugucugguuuucgcccaaaaccuucccggaaaugacaacagcacagcaacgcugugccugggacaucaugcagugccaaacggaacgcuagugaaaacaaucacgaaugaucagauugaagugacuaaugcuacugagcugguucagaguuccucaacagguagaauaugcgacaguccucaccgaauccuugaugggaaaaacugcacacugauagaugcucuauugggagacccucauugugauggcuuccaaaaugagaaaugggaccuuuuuguugaacgcagcagagcuuucagcaacuguuacccuuaugaugugccagauuaugccucccuuaggucacuaguugccucaucaggcacccuggaguuuaucaaugaaggcuucaauuggacuggagucacucagagugggggaagcuaugcuugcaaaaggggaucugauaacaguuucuucaguagacugaacuggcuguacgaaucagaaagcaaauauccagugcugaacgugacuaugccaaacaauggcaaauuugacaaauuguacauuugggggguucaccacccgagcacggacaaagaacaaaccaaccuauauguucgagcaucagggagagucaccgucucuaccaagagaagccagcaaacuguaaucccgaauaucgggucuagacccuggguaaggggucugucuaguagaauaaguaucuauuggacaauaguaaaaccgggagacauacuguuaauuaauagcacugggaaccuaauugcuccucgggguuacuucaaaauacgcacugggaaaagcucaauaaugaggucagaugcacccauuggcaccugcaguucugaaugcaucacuccaaauggaagcauucccaaugacaagcccuuucaaaacguaaacaagaucacauauggggcaugucccagguauguuaagcaaaacacucugaaguuggcaacagggaugcggaauguaccagagaaacaaacuagaggcauauucggcgcaauagcagguuucauagaaaaugguugggagggaaugguagacgguugguacgguuucaggcaucaaaauucugagggcacaggacaagcagcagaucuuaaaagcacucaagcagcaaucgaccaaaucaaugggaaacugaauaggguaaucgagaaaacgaacgagaaauuccaucaaaucgaaaaggaauucucagaaguagaagggagaauucaggaccucgagaaauauguugaagacacuaaaauagaucucuggucuuacaacgcggagcuucuugucgcucuggagaaccaacauacaauugaucugacugacgcagaaaugaacaaacuguuugaaaaaacaaggaagcaacugagggaaaaugcugaggacaugggcaaugguugcuucaaaauauaccacaaaugugacaaugcuugcauagggucaaucagaaauggaacauaugaccaugauguauacagagacgaagcauuaaacaaccgauuucagaucaaagguguugagcugaagucaggauacaaagacuggauccuguggauuuccuuugccauaucaugcuuuuugcuuuguguuguuuugcugggguucaucaugugggccugccaaaaaggcaacauuaggugcaacauuugcauuuga

SEQ ID NO: 40572 - RNA, 1701 nt, Artificial Sequence
  derived and/or modified CDS sequence (wt) from hemagglutinin__InfluenzaA__AFG99171
augaagacuaucauugcuuuaagcuacauuuucugucugguuuucgcccaaaaccuucccggaaaugacaacagcacggcaacgcugugccugggacaccaugcagugccaaacggaacgcuagugaaaacaaucacgaaugaucagauugaagugacuaaugcuacugagcugguucagaguuccucaacagguagaauaugcgacaguccucaccgaauccuugaugggaaaaacugcacacugguagaugcucuauugggagacccucauugugauggcuuucaaaaugagaaaugggaccuuuuuguugaacgcagcaaagcuuucagcaacuguuacccuuaugaugugccagauuaugccucccuuaggucacuaguugccucgucaggcacccuggaguuuaccaaugaaagcuucaauuggacuggagucacucagagugggggaagcuaugcuugcaaaaggggaucugauaacaguuucuucaguagacugaauugguuguacgaaucagaaagcaaauauccagugcugaacgugacuaugccaaacaauggcaauuuugacaaacuguacauuugggggguucaccacccgagcacggacaaagaacaaaccaaccuauauguucgagcaucagggagagucacagucucuaccaagagaaaccagcaaacuguaaucccgaauaucgggucuagacccuggguaaggggucugucuagcagaauaagcaucuauuggacaauaguaaaaccgggagacauacugcuaauuaauaguaacgggaaccuaauugcuccucgggguuacuucaaaauacgcaaugggaaaagcucaauaaugaggucagaugcaccuauuggcaccugcaguucugaaugcaucacuccaaauggaagcauucccaaugacaagcccuuucaaaauguaaacaagaucacauauggggcaugucccaaguacguuaagcaaaauacucugaaguuggcaacagggaugcggaauguaccagagaaacaaacuagaggcauauucggcgcaauagcagguuucauagaaaaugguugggagggaaugguagacgguugguacgguuucaggcaucgaaauucugagggcacaggacaagcagcagaucuuaaaagcacucaagcagcaaucgaccaaaucaaugggaaacugaauaggguaaucgagaaaacgaacgagaaauuccaucaaaucgaaaaggaauucucagaaguagaagggagaauucaggaccucgagaaauacguugaagacacuaaaauagaucucuggucuuacaacgcggagcuucuugucgcucuggagaaccaacauacaauugaucugacugacucggaaaugaacaaacuguuugaaaaaacaaggaggcaacuaagggaaaaugcugaggacaugggcaaugguugcuucaaaauauaccacaaaugugacaaugcuugcauagggucaaucagaaauggaacuuaugaccaugauguauacagagacgaagcauuaaacaaccgguuucagaucaaagguguugagcugaagucaggauacaaagacuggauccuguggauuuccuuugccauaucaugcuucuugcuuuguguuguuuugcugggguucaucaugugggccugccaaaaaggcaacauuaggugcaacauuugcauuuga

SEQ ID NO: 40573 - RNA, 1701 nt, Artificial Sequence
  derived and/or modified CDS sequence (wt) from hemagglutinin__InfluenzaA__AFG99182
augaagacuaucauugcuuugagcuacauuuucugucugguuuucgcccaaaaacugcccggaaaugacaacagcacagcaacgcugugccugggacaucaugcagugccaaacggaacgcuagugaaaacaaucacgaaugaucagauugaagugacuaaugcuacugagcugguucagaguuccucaacagguagaauaugcgacaguccucaccgaauccuugauggaaaaaacugcacacugauagaugcucuauugggagacccucauugugauggcuuccaaaaugagaaaugggaccuuuuuguugaacgcagcaaagcuuucagcaacuguuacccuuaugaugugccggauuaugccucccuuaggucacuaguugccucaucaggcacccuggaguuuaucaaugaaggcuucaauuggacuggagucacucagagugggggaagcuaugcuugcaaaaggggaucuguuaacaguuucuucaguagauugaauugguuguacgaaucagaauacaaauauccagcgcugaacgugacuaugccaaacaauggcaaauuugacaaauuguacauuugggggguucaccacccgagcacggacaaagaacaaaccaaccuauauguucgagcaucagggagagucacagucucuaccaagagaagccagcaaacuguaaucccgaauaucgggucuagacccuggguaagaggucuguccaguagaauaagcaucuauuggacaauaguaaaaccgggagacauacuguugauuaauagcacugggaaccuaauugcuccucgggguuacuucaaaauacgcacugggaaaagcucaauaaugaggucagaugcaccuauuggcaccugcaguucugaaugcaucacuccaaauggaagcauucccaaugacaaacccuuucaaaauguaaacaagaucacauauggggcaugucccagguauguuaagcaaaacacucugaaauuggcaacagggaugcggaauguaccagagaaacaaacuagaggcauauucggcgcaauagcagguuucauagaaaaugguugggagggaaugguagacgguugguacgguuucaggcaucaaaauucugagggcacaggacaagcagcagaucuuaaaagcacucaagcagcaaucgaccaaaucaacgggaaacugaauagguuaaucgagaaaacgaacgagaaauuccaucaaaucgaaaaggaauucucagaaguagaagggagaauucaggaccucgagaaauauguugaagacacuaaaauagaucucuggucuuacaacgcggagcuucuugucgcccuggagaaccaacauacaauugaucugacugacucagaaaugaacaaacuguuugaaaaaacaaggaagcaacugagggaaaaugcugaggacaugggcaaugguugcuucaaaauauaccacaaaugugacaaugcuugcauagggucaaucagaaauggaacuuaugaccaugauguauacagagacgaagcauuaaacaaccgguuucagaucaaagguguugagcugaagucaggauacaaagacuggauccuauggauuuccuuugccauaucaugcuuuuugcuuuguguuguuuugcugggguucaucaugugggccugccaaaaaggcaacauuaggugcaacauuugcauuuga

SEQ ID NO: 40574 - RNA, 1701 nt, Artificial Sequence
  derived and/or modified CDS sequence (wt) from hemagglutinin__InfluenzaA__AFG99193
augaagacuaucauugcuuugagcuacauuuccugucugguuuucgcccaaaaacuucccggaaaugacaacagcacagcaacgcugugccugggacaucaugcagugccaaacggaacgcuagugaaaacaaucacgaaugaucagauugaagugacuaaugcuacugagcugguucagaguuccucaacagguagaauaugcgacaguccucaccgaauccuugauggaaaaaacugcacacugauagaugcucuauugggagacccucauugugauggcuuccaaaaugagaaaugggaucuuuuuguugaacgcagcaaagcuuucagcaacugcuacccuuaugaugugccggauuaugccucccuuaggucacuaguugccucaucaggcacccuggaguuuaucaaugaaggcuucaauuggacuggagucacucagagugggggaagcuaugcuugcaaaaggggaucuguuaacaguuucuucaguagauugaauugguuguaugagucagaaagcaaauauccagcgcugaacgugacuaugccaaacaauggcaaauuugaaaaauuguacauuugggggguucaccacccuagcacggacaaagaacaaaccaaccuauauguucgagcaucagggagagucacagucucuaccaagagaagccagcaaacuguaaucccgaauaucgggccuagacccuggguaaggggucugucuaguagaauaaguaucuauuggacaauaguaaaaccgggagacauacuguugauuaauagcacugggaaccuaauugcuccccgggguuacuucaaaauacgcacugggaaaagcucaauaaugaggucagaugcaccuauuggcaccugcaguucugaaugcaucacuccaaauggaagcauucccaaugacaaacccuuucaaaauguaaacaagaucacauauggggcaugucccagguauguuaagcaaaacacucugaaguuggcaacagggaugcggaauguaccugagaaacaaacuagaggcauauucggcgcaauagcagguuucauagaaaaugguugggaggggaugguagacgguugguacgguuucaggcaucaaaauucugagggcacaggacaagcagcagaucuuaaaagcacucaagcagcaaucgaccaaaucaacgggaaacugaauagguuaaucgagaaaacgaacgagaaauuccaucaaaucgaaaaggaauucucagaaguagaagggagaauucaggaccucgagaaauauguugaagacacuaaaauagaucucuggucuuacaacgcggagcuucuugucgcccuggagaaccaacauacaauugauaugacugacucagaaaugaacaaacuguuugaaaaaacaaggaagcaacugagggaaaaugcugaggacaugggcaaugguugcuucaaaauauaccacaaaugugacaaugcuugcauagggucaaucagaaauggaacuuaugaccaugauguauacagagacgaagcauuaaacaaccgguuucagaucaaagguguugagcugaagucaggauacaaagacuggauccuauggauuuccuuugccauaucaugcuuuuugcuuuguguuguuuugcugggguucauaaugugggccugccaaaaaggcaacauuaggugcaacauuugcauuuga

SEQ ID NO: 40575 - RNA, 1701 nt, Artificial Sequence
  derived and/or modified CDS sequence (wt) from hemagglutinin__InfluenzaA__AFG99204
augaagacuaucauugcuuugagcuacauuuucugucuggguuucgcccaaaaacuucccggaaaugacaacagcacagcaacgcugugccugggacaccaugcagugccaaacggaacgcuagugaaaacaaucacgaaugaucagauugaagugacuaaugcuacugagcugguucagaguuccucaacagguagaauaugcgacaguccucaccgaauccuugaugggaaaaacugcacacugauagaugcucuauugggagacccucauugugauggcuuccaaaaugagaaaugggaccuuuuuguugaacgcagcaaagcuuucagcaacuguuacccuuaugaugugccggauuaugccucccuuaggucacuaguugccucaucaggcacccuggaguuuaucaaugaaggcuucaauuggacuggagucacucagagugggggaagcuaugcuugcaaaaggggaucuguuaacaguuucuucaguagauugaauugguuauacaaaucagaaagcaaauauccagcgcugaacgugacuaugccaaacaauggcaaauuugacaaauuguacauuugggggguucaccacccgagcacggacaaagaacaaaccaaccuauauguucgagcaucagggagagucacagucucuaccaagagaagccagcaaacuguaaucccgaauaucgggucuagacccuggguaaggggucugucuaguagaauaagcaucuauuggacaauaguaaaaccgggagacauacuguugauuaauagcacuggaaaccuaauugcuccucgggguuacuucaaaauacgcacugggaaaagcucaauaauaaggucagaugcaccuauuggcaccugcaguucugaaugcaucacuccaaauggaagcauucccaaugacaaacccuuucaaaauguaaacaagaucacauauggggcaugucccagguauguuaaacaaaacacucugaaauuggcaacagggaugcggaauguaccagagaaacaaacuagaggcauauucggcgcaauagcagguuucauagaaaaugguugggagggaaugguagacgguugguacgguuucaggcaucaaaauucugagggcacaggacaagcagcagaucuuaaaagcacucaagcagcaaucgaccaaaucaacgggaaacugaauagguuaaucgagaaaacgaacgagaaauuccaucaaaucgaaaaggaauucucagaaguagaagggagaauucaggaccucgagaaauauguugaagacacuaaaauagaucucuggucuuacaacgcggagcuucuugucgcccuggagaaccaacauacaauugaucugacugacucagaaaugaacaaacuguuugaaaaaacaaggaagcaacugagggaaaaugcugaggacaugggcaaugguugcuucaaaauauaccacaaaugugacaaugcuugcauaggaucaaucagaaauggaacuuaugaccaugauguauacagagacgaagcauugaacaaccgguuucagaucaaagguguugagcugaagucaggauacaaagacuggauccuauggauuuccuuugccauaucaugcuuuuugcuuuguguuguuuugcugggguuuaucaugugggccugccaaaaaggcaacauuaggugcaacauuugcauuuga

SEQ ID NO: 40576 - RNA, 1701 nt, Artificial Sequence
  derived and/or modified CDS sequence (wt) from hemagglutinin__InfluenzaA__AFG99215
augaagacuaucauugcuuugagcuacauuuucugucugguuuucgcccaaaaacuucccggaaaugacaacagcacagcaacgcugugccugggacaucaugcagugccaaacggaacgcuagugaaaacaaucacgaaugaucagauugaagugacuaaugcuacugagcugguucagaguuccucaacagguagaauaugcgacaguccucaccgaauccuugauggaaaaaacugcacacugauagaugcucuauugggagacccucauugugauggauuccaaaaugagaaaugggaccuuuuuauugaacgcagcaaagcuuucagcaacuguuacccuuaugaugugccggauuaugccucccuuaggucacuaguugccucaucaggcacccuggaguuuaucaaugaaggcuucaauuggacuggagucacucagagugggggaagcuaugcuugcaaaaggggaucuguuaacaguuucuucaguagauugaauugguuguacgaaucagaauacaaauauccagcgcugaacgugacuaugccaaacaauggcaaauuugacaaacuguacauuugggggguucaccacccgagcacggaaaaagaacaaaccaaccuauauguucgagcaucagggagagucacagucucuaccaagagaagccagcaaacuguaaccccgaauaucgggucuagacccuggguaaggggucuguccaguagaauaagcaucuauuggacaauaguaaaaccgggagacauacuguugauuaauagcacugggaaccuaauugcuccucgggguuacuucaaaauacgcacugggaaaagcucaauaaugaggucagaugcaccuauuggcaccugcaguucugaaugcaucacuccaaauggaagcauucccaaugacaaacccuuucaaaauguaaacaagaucacauauggggcaugucccagguauguuaagcaaaacacucugaaauuggcaacagggaugcggaauguaccagagaaacaaacuagaggcauauucggcgcaauagcagguuucauagaaaaugguugggagggaaugguagacgguugguacgguuucaggcaucaaaauucugagggcacaggacaagcagcagaucuuaaaagcacucaagcagcaaucgaccaaaucaacgggaaacugaauagguuaaucgagaaaacgaacgagaaauuccaucaaaucgaaaaggaauucucagaaguagaagggagaauucaggaccucgagaaauauguugaagacacuaaaauagaucucuggucuuacaacgcggagcuucuugucgcccuggagaaccaacauacaauugaucugacugacucagaaaugaacaaacuguuugaaaaaacaaggaagcaacugagggaaaaugcugaggacaugggcaaugguugcuucaaaauauaccacaaaugugacaaugcuugcauagggucaaucagaaauggaacuuaugaccaugauguauacagagacgaagcauuaaacaaccgguuucagaucaaagguguugagcugaagucaggauacaaagacuggauccuauggauuuccuuugccauaucaugcuuuuugcuuuguguuguuuugcugggguucaucaugugggccugccaaaaaggcaacauuaggugcaacauuugcauuuga

SEQ ID NO: 40577 - RNA, 1701 nt, Artificial Sequence
  derived and/or modified CDS sequence (wt) from hemagglutinin__InfluenzaA__AFG99226
augaagacuaucauugcuuugagcuacauuuucugucugguuuucgcccaaaaacugccuggaaaugacaacagcacagcaacgcugugccugggacaucaugcagugccaaacggaacgcuagugaaaacaaucacgaaugaucagauugaagugacuaaugcuacugagcugguucagaguuccucaacagguagaauaugcgacaguccucaccgaauccuugauggaaaaaacugcacacugauagaugcucuauugggagacccucauugugauggcuuccaaaaugagaaaugggaccuuuuuguugaacgcagcaaagcuuucagcaacuguuacccuuaugaugugccugauuaugccucccuuaggucacuaguugccucaucaggcacccuggaguuuaucaaugaaggcuucaauuggacuggagucacucagagugggggaagcuaugcuugcaaaaggggaucuguuaacaguuucuucaguagauugaauugguuguacgaaucagaauacaaauauccagcgcugaacgugacuaugccaaacaauggcaaauuugacaaauuguacauuugggggguucaccacccgagcacggacaaagaacaaaccaaccuauauguucgagcaucagggagagucacagucucuaccaagagaagccagcaaacuguaaucccgaauaucgggucuagacccuggguaagaggucuguccaguagaauaagcaucuauuggacaauaguaaaaccgggagacauacugucgauuaauagcacugggaaccuaauugcuccucgggguuacuucaaaauacgcacugggaaaagcucaauaaugaggucagaugcaccuauuggcaccugcaguucugaaugcaucacuccaaauggaagcauucccaaugacaaacccuuucaaaauguaaacaagaucacauauggggcaugucccagguauguuaagcaaaacacucugaaauuggcaacagggaugcggaauguaccagagaaacaaacuagaggcauauucggcgcaauagcagguuucauagaaaaugguugggagggaaugguagacgguugguacgguuucaggcaucaaaauucugagggcacaggacaagcagcagaucuuaaaagcacucaagcagcaaucgaccaaaucaacgggaaacugaauagguuaaucgagaaaacgaacgagaaauuccaucaaaucgaaaaggaauucucagaaguagaagggagaauucaggaccucgagaaauauguugaagacacuaaaauagaucucuggucuuacaacgcggagcuucuugucgcccuggagaaccaacauacaauugaccugacugacucagaaaugaacaaacuguuugaaaaaacaaggaagcaacugagggaaaaugcugaggacaugggcaaugguugcuucaaaauauaccacaaaugugacaaugcuugcauagggucaaucagaaauggaacuuaugaccaugauguauacagagacgaagcauuaaacaaccgguuucagaucaaagguguugagcugaagucaggauacaaagacuggauccuauggauuuccuuugccauaucaugcuuuuugcuuuguguuguuuugcugggguucaucaugugggccugccaaaaaggcaacauuaggugcaacauuugcauuuga

SEQ ID NO: 40578 - RNA, 1701 nt, Artificial Sequence
  derived and/or modified CDS sequence (wt) from hemagglutinin__InfluenzaA__AFG99237
augaagacuaucauugcuuugagcuacauuuucugucugguuuucgcccagaaacugcccggaaaugacaacagcacagcaacgcugugccugggacaucaugcagugccaaacggaacgcuagugaaaacaaucacgaaugaucagauugaagugacuaaugcuacugagcugguucaaaguuccucaacaggucgaauaugcgacaguccucaccgaauccuugauggaaaaaacugcacacugauagaugcucuauugggagacccucauugugauggcuuccaaaaugagaaaugggaccuuuuuguugaacgcagcaaagcuuucagcaacuguuacccuuaugaugugccggauuaugccucccuuaggucacuaguugccucaucaggcacccuggaguuuaucaaugaagacuucaauuggacuggagucacucagagugggggaagcuaugcuugcaaaagggaaucuguuaacaguuucuucaguagauugaauugguuguacgaaucagaauacaaauauccagcgcugaacgugacuaugccaaacaauggcaaauuugaaaaauuguacauuugggggguucaccacccgagcacggacaaagaacaaaccaaccuauauguucgagcaucagggagagucacagucucuaccaagagaagccagcaaacuguaaucccgaauaucgggucuagacccugggugagaggucuguccaguagaauaagcaucuauuggacaauaguaaaaccgggagacauacuguugauuaauagcacugggaaccuaauugcuccucgggguuacuuuaaaauacgcacugggaaaagcucaauaaugaggucagaugcacccauuggcaccugcaguucugaaugcaucacuccaaauggaagcauucccaaugacaaacccuuucaaaauguaaacaagaucacauauggggcaugucccagguauguuaggcaaaacacccugaaauuggcaacagggaugcggaauguaccagagaaacaaacuagaggcauauucggcgcaauagcagguuucauagaaaaugguugggagggaaugguagacgguugguacgguuucaggcaucaaaauucugagggcacaggacaagcagcagaucuuaaaagcacucaagcagcaaucgaccaaaucaacgggaaacugaauagguuaaucgagaaaacgaacgagaaauuccaucaaaucgaaaaggaauucucagaaguagaagggagaauucaggaccucgagaaauauguugaagacacuaaaauagaucucuggucuuacaacgcggagcuucuugucgcccuggagaaccaacauacaauugaucugacugacucagaaaugaacaaacuguuugaaaaaacaaggaagcaacugagggaaaaugcugaggacaugggcaaugguugcuucaaaauauaccacaaaugugacaaugcuugcauagggucaaucagaaauggaacuuaugaccaugauguauacagagacgaagcauuaaacaaccgguuucagaucaaagguguugagcugaagucaggauacaaagacuggauccuauggauuuccuuugccauaucaugcuuuuugcuuuguguuguuuugcugggguucaucaugugggccugccaaaaaggcaacauuaggugcaacauuugcauuuga

SEQ ID NO: 40579 - RNA, 1701 nt, Artificial Sequence
  derived and/or modified CDS sequence (wt) from hemagglutinin__InfluenzaA__AFG99248
augaagacuaucauugcuuugagcuacauuuucugucugguuuucgcccaaaaacuucccggaaaugacaacagcacagcaacgcugugccugggacaucaugcagugccaaacggaacgcuagugaaaacaauaacgaaugaucagauugaagugacuaaugcuacugagcugguucagaguuccucaacagguagaauaugcgacaguccucaccgaauccuugauggaaaaaacugcacacugauagaugcucuauugggagacccucauugugauggcuuccaaaaugagaaaugggaccuuuuuguugaacgcagcaaagcuuacagcaacuguuacccuuaugaugugccggauuaugccucccuuaggucacuaguugccucaucaggcacccuggaguuuaucaaugaagacuucaauuggacuggagucacucagagugggggaagccaugcuugcaaaaggggaucuguuaacaguuucuucaguagauugaauugguugcacgaaucagaauacaaauauccagcgcugaacgugacuaugccaaacaauggcaaauuugacaaauuguacauuugggggguucaccacccgaucacggacagagaacaaaccaaccuauauguucgagcaucagggagagucacagucucuaccaagagaagccagcaaacuguaaucccgaauaucggguuuagacccuggguaaggggucuguccaguagaauaagcaucuauuggacaauaguaaaaccgggagacauacuguugauuaauagcaccgggaaccuaauugcuccucgggguuacuucaaaauacgcaaugggaaaagcucaauaaugaggucagaugcaccuauuggcaccugcaguucugaaugcaucacuccaaauggaagcauucccaaugacaaacccuuucaaaauguaaacaagaucacauauggggcaugucccagguauguuaagcaaaacacucugaaauuggcaacagggaugcggaauguaccagagaaacaaacuagaggcauauucggcgcaauagcagguuucauagaaaaugguugggagggaaugguagacgguugguacgguuucaggcaucaaaauucugagggcacaggacaagcagcagaucuuaaaagcacucaagcagcaaucgaccaaaucaacgggaaacugaauagguuaaucgagaaaacgaacgagaaauuccaucaaaucgaaaaggaauucucagaaguagaagggagaauucaggaccucgagaaauauguugaagacacuaaaauagaucucuggucuuacaacgcggagcuucuugucgcccuggagaaccaacauacaauugaucugacugacucagaaaugaacaaacuguuugaaaaaacaaggaagcaacugagggaaaaugcugaggacaugggcaaugguugcuucaagauauaccacaaaugugacaaugccugcauagggucaaucagaaauggaacuuaugaccaugauguauacagagacgaagcauuaaacaaccgguuccagaucaaagguguugagcugaagucaggauacaaagacuggauccuauggauuuccuuugccauaucaugcuuuuugcuuuguguuguuuugcugggguucaucaugugggccugccaaaaaggcaacauuaggugcaacauuugcauuuga

SEQ ID NO: 40580 - RNA, 1701 nt, Artificial Sequence
  derived and/or modified CDS sequence (wt) from hemagglutinin__InfluenzaA__AFG99259
augaagacuaucauugcuuugagcuacauuuucugucugguuuucgcccaaaaacuucccggaaaugacaacagcacagcaacgcugugccugggacaucaugcagugccaaacggaacgcuagugaaaacaaucacgaaugaucagguugaagugacuaaugcuacugagcugguucagaguuccucaacagguagaauaugcgacaguccucaccgaauccuugaugggaaaaacugcacgcugauagaugcucuauugggagacccucauugugauggcuuccaaaaugagaaaugggaccuuuuuguugaacgcagcaaagcuuacagcaacuguuacccuuaugauguaccggauuaugcuucccuuaggucacuaguugccucaucaggcacccuggaguuuaucaaugaagacuucaauuggacuggagucacucagagugggggaagcuaugcuugcaaaaggggaucuguuaacaguuucuucaguagauugaauugguugcacaaaucagaauacaaauauccagcgcugaacgugacuaugccaaacaauggcaaauuugacaaauuguacauuugggggguucaccacccgagcacagacagagaacaaaccaaccuauauguucgagcaucagggagagucacagucucuaccaagagaagccagcaaacuguaaucccgaauaucgggucuagacccuggguaaggggccuguccaguagaauaagcaucuauuggacaauaguaaaaccgggagacauacuguugauuaauagcaccgggaaccuaauugcuccucgggguuacuucaaaauacgcacugggaaaagcucaauaaugaggucagaugcaccuauuggcaccugcaguucugaaugcaucacuccaaaugggagcauucccaaugacaaacccuuucaaaauguaaacaagaucacauauggggcaugucccagguauguuaagcaaaacacucugaaauuggcaacagggaugcggaauguaccagagaaacaaacuagaggcauauucggcgcaauagcagguuucaucgaaaaugguugggagggaaugguagacgguugguacgguuucaggcaucaaaauucugagggcacaggacaagcagcagaucuuaaaagcacucaagcagcaaucgaccaaaucaacgggaaacugaauagguuaaucgagaaaacgaacgagaaauuccaucaaaucgaaaaggaauucucagaaguagaagggagaauucaggaccucgagaaauauguugaagacacuaaaauagaucucuggucuuacaaugcggagcuucuugucgcccuggagaaccaacauacaauugaucugacugacucagaaaugaacaaacuguuugaaaaaacaaggaagcaacugagggaaaaugcugaggacaugggcaaugguugcuucaagauauaccacaaaugugacaaugccugcauagggucaaucagaaauggaacuuaugaccaugauguauacagagacgaagcauuaaacaaccgguuccagaucaaagguguugagcugaagucaggauacaaagacuggauccuauggauuuccuuugccauaucaugcuuuuugcuuuguguuguuuugcugggguucaucaugugggccugccaaaaaggcaacauuaggugcaacauuugcauuuga

SEQ ID NO: 40581 - RNA, 1701 nt, Artificial Sequence
  derived and/or modified CDS sequence (wt) from hemagglutinin__InfluenzaA__AFG99270
augaagacuaucauugcuuugagcuacauuuucugucugguuuucgcccaaaaacuucccggaaaugacaacagcacagcaacgcugugccugggacaucaugcagugccaaacggaacgcuagugaaaacaaucacgaaugaucaaauugaagugacuaaugcuacugagcugguucagaguuccucaacagguagaauaugcgacaguccucaccgaauccuugauggaaaaaacugcacacugauagaugcucuauugggagacccucauugugauggcuuccaaaauaaggaaugggaccuuuuuguugaacgcagcaaagcuuacagcaacuguuacccuuaugaugugccggauuaugccucccuuaggucacuaguugccucaucaggcacccuggaguuuaucaaugaagacuucaauuggacuggagucgcucagagugggggaagcuaugcuugcaaaaggggaucuguuaacaguuucuuuaguagauugaauugguugcacaaaucagaauacaaauauccagcgcugaacgugacuaugccaaacaauggcaaauuugacaaauuguacauuugggggguucaccacccgagcacggacagagaacaaaccaaccuauauguucgagcaucagggagagucacagucucuaccaaaagaagccagcaaacuguaaucccgaauaucgggucuagacccuggguaaggggucuguccaguaggauaagcaucuauuggacaauaguaaaaccgggagacauacuguugauuaauagcaccgggaaccuaauugcuccucgggguuacuucaaaauacgaacugggaaaagcucaauaaugaggucagaugcacccauuggcaccugcaguucugaaugcaucacuccaaauggaagcauucccaaugacaaacccuuucaaaauguaaacaggaucacauauggggcaugucccagauauguuaaacaaaacacucugaaauuggcaacagggaugcggaauguaccagagaaacaaacuagaggcauauucggcgcaaucgcagguuucauagaaaaugguugggagggaaugguagacgguugguacgguuucaggcaucauaauucugagggcacaggacaagcagcagaucuuaaaagcacucaagcagcaaucgaccaaaucaacgggaaacugaauagguuaaucgagaaaacgaacgagaaauuccaucaaaucgaaaaggaauucucagaaguagaagggagaauucaggaccucgagaaauauguugaagacacuaaaauagaucucuggucuuacaacgcggagcuucuugucgcccuggagaaccaacauacaauugaucugacugacucagaaaugaacaaacuguuugaaaaaacaaggaagcaacugagggaaaaugcugaggacaugggcaaugguugcuucaaaauauaccacaaaugugacaaugccugcauagggucaaucagaaauggaacuuaugaccaugauguauacagagacgaagcauuaaacaaccgguuccagaucaaagguguugagcugaagucaggauacaaagacuggauccuauggauuuccuuugccauaucaugcuuuuugcuuuguguuguuuugcugggguucaucaugugggccugccaaaaaggcaacauuaggugcaacauuugcauuuga

SEQ ID NO: 40582 - RNA, 1701 nt, Artificial Sequence
  derived and/or modified CDS sequence (wt) from hemagglutinin__InfluenzaA__AFG99281
augaagacuaucauugcuuugagcuacauuuucugucugguuuucgcccaaaaacuucccggaaaugacaacagcacagcaacgcugugccugggacaucaugcagugccaaacggaacgcuagugaaaacaaucacgaaugaucagauugaagugacuaaugcuacugagcugguucagaguuccucaacagguagaauaugcgacaguccucaccgaauccuugaugggaaaaacugcacacugauagaugcucuauugggagacccucauugugauggcuuccaaaaugagaaaugggaccuuuuuguugaacgcagcaaagcuuucagcaacuguuacccuuaugaugugccggauuaugccucccuuaggucacuaguugccucaucaggcacccuggaguuuaucaaugaagaauucaauuggacuggagucacucagagugggggaagcuaugcuugcaaaaggggaucuguuaacaguuucuucaguagauugaauugguugcacaaaucagaauacaaauauccagcgcugaacgugacuaugccaaacaauggcagauuugacaaauuguacauuugggggguucaccacccuagcacggacagagaacaaaccaaccuauauguucgagcaucagggagagucacagucucuaccaagagaagccagcaaacuguaaucccgaauaucgggccuagacccuggguaaggggucuguccaguagaauaagcaucuauuggacaauaguaaaaccgggggacauacuguugauuaauagcacugggaaccuaauugcuccucgggguuacuucaaaauacacacugggaaaagcucaauaaugaggucagaugcaccuauuggcaccugcaguucugaaugcaucacuccaaauggaagcauucccaaugacaaacccuuucaaaauguaaacaagaucacauauggggcaugucccagguauguuaagcaaaacacucuaaaauuggcaacagggaugcggaauguaccagauaaacaaacuagaggcauauucggcgcaauagcagguuucauagaaaaugguugggagggaaugguagacgguugguacgguuucaggcaucaaaauucugagggcacaggacaagcagcagaucuuaaaagcacucaagcagcaaucgaccaaaucaacgggaaacugaauagguuaaucgagaaaacgaacgagaaauuccaucaaaucgaaaaggaauucucagaaguagaagggagaauucaggaccucgagaaauauguugaagacacuaaaauagaucucuggucuuacaacgcggagcuucuugucgcccuggagaaccaacauacaauugaucugacugacucagaaaugaacaaacuguuugaaaaaacaagaaagcaacugagggaaaaugcugaggacaugggcaaugguugcuucaaaauauaccacaaaugugacaaugcuugcauagggucaaucagaaauggaacuuaugaccaugauguauacagagacgaagcauuaaacaaccgguuccagaucaaagguguugagcugaagucaggauacaaagacuggauccuauggauuuccuuugccauaucaugcuuuuugcuuuguguuguuuugcugggauucaucaugugggccugccaaaaaggcaacauuaggugcaacauuugcauuuga

SEQ ID NO: 40583 - RNA, 1701 nt, Artificial Sequence
  derived and/or modified CDS sequence (wt) from hemagglutinin__InfluenzaA__AFG99292
augaagacuaucauugcuuugagcuacauuuucugucugguuuucgcccaaaaacuuccuggaaaugacaacagcacagcaacgcugugccugggacaucaugcagugccaaacggaacgcuagugaaaacaaucacgaaugaucagguugaagugacuaaugcuacugagcugguucagaguuccucaacagguagaauaugcgacaguccucaccgaauccuugaugggaaaaacugcacgcugauagaugcucuauugggagacccucauugugauggcuuccaaaaugagaaaugggaccuuuuuguugaacgcagcaaagcuuacagcaacuguuacccuuaugauguaccggauuaugcuucccuuaggucacuaguugccucaucaggcacccuggaguuuaucaaugaagacuucaauuggacuggagucacucagagugggggaagcuaugcuugcaaaaggggaucuguuaacaguuucuucaguagauugaauugguugcacgaaucagaauacaaauauccagcgcugaacgugacuaugccaaacaauggcaaauuugacaaauuguacauuugggggguucaccacccgagcacagacagagaacaaaccaaccuauauguucgagcaucagggagagucacagucucuaccaagagaagccagcaaacuguaaucccgaauaucgggucuagacccuggguaaggggccuguccaguagaauaagcaucuauuggacaauaguaaaaccgggagacauacuguugauuaauagcaccgggaaccuaauugcuccucgggguuacuucaaaauacgcacugggaaaagcucaauaaugaggucagaugcaccuauuggcaccugcaguucugaaugcaucacuccaaaugggagcauucccaaugacaaacccuuucaaaauguaaacaagaucacauauggggcaugucccagguauguuaagcaaaacacucugaaauuggcaacagggaugcggaauguaccagagaaacaaacuagaggcauauucggcgcaauagcagguuucaucgaaaaugguugggagggaaugguagacgguugguacgguuucaggcaucaaaauucugagggcacaggacaagcagcagaucuuaaaagcacucaagcagcaaucgaccaaaucaacgggaaacugaauagguuaaucgagaaaacgaacgagaaauuccaucaaaucgaaaaggaauucucagaaguagaagggagaauucaggaccucgagaaauauguugaagacacuaaaauagaucucuggucuuacaaugcggagcuucuugucgcccuggagaaccaacauacaauugaucugacugacucagaaaugaacaaacuguuugaaaaaacaaggaagcaacugagggaaaaugcugaggacaugggcaaugguugcuucaagauauaccacaaaugugacaaugccugcauagggucaaucagaaauggaacuuaugaccaugauguauacagagacgaagcauuaaacaaccgguuccagaucaaagguguugagcugaagucaggauacaaagacuggauccuauggauuuccuuugccauaucaugcuuuuugcuuuguguuguuuugcugggguucaucaugugggccugccaaaaaggcaacauuaggugcaacauuugcauuuga

SEQ ID NO: 40584 - RNA, 1701 nt, Artificial Sequence
  derived and/or modified CDS sequence (wt) from hemagglutinin__InfluenzaA__AFG99303
augaagaccaucauugcuuugagcuacauuuucugucugguugucgcccaaaaacuucccggaaaugacaacagcacagcaacgcugugccugggacaucaugcagugccaaacggaacgcuagugaaaacaaucacgaaugaccaaauugaagugacuaaugcuacugagcugguucagaguuccucaacaggucgaauaugcgacaguccucaccgaauccuugauggaaaaaacugcacacugauagaugcucuauugggagauccucauugugauggcuuccaaaauaaggaaugggaccuuuuuguugaacgcagcaaagcuuacagcaacuguuacccuuaugaugugccggauuaugccucccuuaggucacuaguugccucaucaggcacccuggaguuuaucaaugaagacuucaauuggacuggagucgcucagagugggggaagcuaugcuugcaaaaggggaucuguuaacaguuucuucaguagauugaauugguugcacgaaucagaauacaaauauccagcgcugaacgugacuaugccaaacaauggcaaauuugacaaauuguacauuugggggguucaccacccgagcacggacagagaacaaaccaaccuauauguucgagcaucagggagagucacagucuccaccaaaagaagccagcaaacuguaaucccgaauaucgggucuagacccuggguaaggggucuguccaguagaauaagcaucuauuggacaauaguaaaaccgggagacauacuguugauuaauagcaccgggaaccuaauugcuccucgggguuacuucaaaauacgaacuggaaaaagcucaauaaugaggucagaugcacccauuggcaccugcaguucugaaugcaucacuccaaauggaagcauuuccaaugacaaacccuuucaaaauguaaacaggaucacauauggggcaugucccagauauguuaagcaaaacacucugaaauuggcaacagggaugcggaaugugccagaaaaacaaacuagaggcauauucggcgcaaucgcagguuucauagaaaaugguugggagggaaugguagacgguugguacgguuucaggcaucaaaauucugagggcacaggacaagcagcagaucuuaaaagcacucaagcagcaaucgaccaaaucaacggaaaacugaauagguuaaucgagaaaacgaacgagaaauuccaucaaaucgaaaaggaauucucagaaguagaagggagaauucaggaccucgagaaauauguugaagacacuaaaauagaucuuuggucuuacaacgcggagcuucuugucgcccuggagaaccaacauacaauugaucugacugacucagaaaugaacaaacuguuugaaaaaacaaggaagcaacugagggaaaaugcugaggacaugggcaaugguugcuucaagauauaccacaaaugugacaaugccugcauagggucaaucagaaauggaacuuaugaccaugauguauacagagacgaagcauuaaacaaccgguuccagaucaaagguguugagcugaagucaggauacaaagacuggauccuauggauuuccuuugccauaucaugcuuuuugcuuuguguuguuuugcugggguucaucaugugggccugccaaaaaggcaacauuaggugcaacauuugcauuuga

SEQ ID NO: 40585 - RNA, 1701 nt, Artificial Sequence
  derived and/or modified CDS sequence (wt) from hemagglutinin__InfluenzaA__AFG99314
augaagacuaucauugcuuugagcuacauuuucugucugguuuucgcccaaaaacuucccggaaaugacaacagcacagcaacgcugugccugggacaucaugcagugccaaacggaacgcuagugaaaacaaucacgaaugaucagauugaagugacuaaugcuacugagcugguucagaguuccucaacagguagaauaugcgacaguccucaccgaauccuugauggaaaaaacugcacacugauagaugcucuauugggagacccucauugugauaguuuccaaaaugagaaaugggaccuuuuuguugaacgcagcaaagcuuacagcaacuguuacccuuaugaugugccggauuaugccucccuuaggucacuaguugccucaucaggcacccuggaguuuaucaaugaagacuucaauuggacuggagucacucagagugggggaagcuaugcuugcaaaaggggaucuguuaacaguuucuucaguagauugaauugguuacacgaaucagaauacaaauauccagcgcugaacgugacuaugccaaacaauggcaaauuugacaaauuguacauuugggggauccaccacccgagcacggacagagaacaaaccaaccuauauguucgagcaucagggagagucacagucucuaccaagagaagccagcaaacuguaaucccgaauaucgggucuagacccuggguaaggggucuauccaguagaauaagcaucuauuggacaauaguaaaaccgggagacauacuguugauuaauagcaccgggaaccuaauugcuccucgggguuacuucaaauuacgcacugggaaaagcucaauaaugaggucagaugcaccuauuggcaccugcaguucugaaugcaucacuccaaauggaagcauucccaaugacaaaccauuucaaaauguaaacaagaucaccuauggggcaugucccagguauguuaagcaaaacacucugaaauuggcaacagggaugcggaauguaccagagaaacaaacuagaggcauauucggcgcaauagcagguuucauagaaaaugguugggagggaaugguagacgguugguacgguuucaggcaucaaaauucugagggcacaggacaagcagcagaucuuaaaagcacucaagcagcaaucgaccaaaucaacggaaaacugaauagguuaaucgagaaaacgaacgagaaauuccaucaaaucgaaaaggaauucucagaaguagaagggagaauucaggaccucgagaaauauguugaagacacuaaaauagaucucuggucuuacaacgcggagcuucuugucgcccuggagaaccaacauacaauugaucugacugacucagaaaugaacaaacuguuugaaaaaacaaggaagcaacugagggaaaaugcugaggacaugggcaaugguugcuucaagauauaccacaaaugugacaaugccugcauagggucaaucagaaauggaacuuaugaccaugauguauacagagacgaagcauuaaacaaccgguuccagaucaaagguguugagcugaagucaggauacaaagacuggauccuauggauuuccuuugccauaucaugcuuuuugcuuuguguuguuuugcugggguucaucaugugggccugccaaaaaggcaacauuaggugcaacauuugcauuuga

SEQ ID NO: 40586 - RNA, 1701 nt, Artificial Sequence
  derived and/or modified CDS sequence (wt) from hemagglutinin__InfluenzaA__AFG99336
augaagaccaucauugcuuugagcuacauuuucugucugguuuucgcccaaaaacuucccggaaaugacaacagcacagcaacgcugugccuaggacaucaugcagugccaaacggaacgcuagugaaaacaaucacgaaugaccaaauugaagugacuaaugcuacugagcugguucagaguuccucaacaggucgaauaugcgacaguccucaccgaauccuugauggaaaaaacugcacacugauagaugcucuauugggagacccucauugugauggcuuccaaaauaaggaaugggaccuuuuuguugaacgcagcaaagcuuacagcaacuguuacccuuaugaugugccggauuaugccucccuuaggucccuaguugccucaucaggcacccuggaguuuaucaaugaagacuucaauuggacuggagucgcucagagugggggaagcuaugcuugcaaaaggggaucuguuaacaguuucuucaguagauugaauugguugcacaaaucagaauacaaauauccagcgcugaacgugacuaugccaaacaauggcaaauuugacaaauuguacauuugggggguucaccacccgagcacggacagagaacaaaccaaccuauauguucgagcaucagggagagucacagucucuaccaaaagaagccagcaaacuguaaucccgaauaucgggucuagacccuggguaaggggucuguccaguagaauaagcaucuauuggacaauaguaaaaccgggagacauacuguugauuaauagcaccgggaaccuaauugcuccucgggguuacuucaaaauacgaacuggaaaaagcucaauaaugaggucagaugcacccauuggcaccugcaguucugaaugcaucacuccaaauggaagcauucccaaugacaaacccuuucaaaauguaaacaggaucacauauggggcaugucccagauauguuaagcaaaacacucugaaauuggcaacagggaugcggaauguaccagagaaacaaacuagaggcauauucggcgcaaucgcagguuucauagaaaaugguugggagggaaugguagacgguugguacgguuucaggcaucaaaauucugagggcacaggacaagcagcagaucuuaaaagcacucaagcagcaaucgaccaaaucaacgggaaacugaauagguuaaucgagaaaacgaacgagaaauuccaucaaaucgaaaaggaauucucagaaguagaagggagaauucaggaccucgagaaauauguugaagacacuaaaauagaucucuggucuuacaacgcggagcuucuugucgcucuggagaaccaacauacaauugaucugacugacucagaaaugaacaaacuguuugaaaaaacaaggaagcaacugagggaaaaugcugaggacaugggcaaugguugcuucaagauauaccacaaaugugacaaugccugcauagggucaaucagaaauggaacuuaugaccaugauguauacagagacgaagcauuaaacaaccgguuccagaucaaagguguugagcugaagucaggauacaaagacuggauccuauggauuuccuuugccauaucaugcuuuuugcuuuguguuguuuugcugggguucaucaugugggccugccaaaaaggcaacauuaggugcaacauuugcauuuga

SEQ ID NO: 40587 - RNA, 1701 nt, Artificial Sequence
  derived and/or modified CDS sequence (wt) from hemagglutinin__InfluenzaA__AFG99347
augaagaccaucauugcuuugagcuacauuuucugucugguuuucgcccaaaaacuucccggaaaugacaacagcacagcaacgcugugccuaggacaucaugcagugccaaacggaacgcuagugaaaacaaucacgaaugaccaaauugaagugacuaaugcuacugagcugguucagaguuccucaacaggucgaauaugcgacaguccucaccgaauccuugauggaaaaaacugcacacugauagaugcucuauugggagacccucauugugauggcuuccaaaauaaggaaugggaccuuuuuguugaacgcagcaaagcuuacagcaacuguuacccuuaugaugugccggauuaugccucccuuaggucccuaguugccucaucaggcacccuggaguuuaucaaugaagacuucaauuggacuggagucgcucagagugggggaagcuaugcuugcaaaaggggaucuguuaacaguuucuucaguagauugaauugguugcacaaaccagaauacaaauauccagcgcugaacgugacuaugccaaacaauggcaaauuugacaaauuguacauuugggggguucaccacccgagcacggacagagaacaaaccaaccuauauguucgagcaucagggagagucacagucucuaccaaaagaagccagcaaacuguaaucccgaauaucgggucuagacccuggguaaggggucuguccaguagaauaagcaucuauuggacaauaguaaaaccgggagacauacuguugauuaauagcaccgggaaccuaauugcuccucgggguuacuucaaaauacgaacuggaaaaagcucaauaaugaggucagaugcacccauuggcaccugcaguucugaaugcaucacuccaaauggaagcauucccaaugacaaacccuuucaaaauguaaacaggaucacauauggggcaugucccagauauguuaagcaaaacacucugaaauuggcaacagggaugcggaauguaccagagaaacaaacuagaggcauauucggcgcaaucgcagguuucauagaaaaugguugggagggaaugguagacgguugguacgguuucaggcaucaaaauucugagggcacaggacaagcagcagaucuuaaaagcacucaagcagcaaucgaccaaaucaacgggaaacugaauagguuaaucgauaaaacgaacgagaaauuccaucaaaucgaaaaggaauucucagaaguagaagggagaauucaggaccucgagaaauauguugaagacacuaaaauagaucucuggucuuacaacgcggagcuucuugucgcucuggagaaccaacauacaauugaucugacugacucagaaaugaacaaacuguuugaaaaaacaaggaagcaacugagggaaaaugcugaggacaugggcaaugguugcuucaagauauaccacaaaugugacaaugccugcauagggucaaucagaaauggaacuuaugaccaugauguauacagagacgaagcauuaaacaaccgguuccagaucaaagguguugagcugaagucaggauacaaagacuggauccuauggauuuccuuugccauaucaugcuuuuugcuuuguguuguuuugcugggguucaucaugugggccugccaaaaaggcaacauuagaugcaacauuugcauuuga

SEQ ID NO: 40588 - RNA, 1701 nt, Artificial Sequence
  derived and/or modified CDS sequence (wt) from hemagglutinin__InfluenzaA__AFG99358
augaagacuaucauugcuuugagccacauuuuaugucugguuuucgcucaaaaacuucccggaaaugacaacagcacagcaacgcuaugccugggacaucaugcagugccaaacggaacgcuagugaaaacaaucacgaaugaucaaauugaagugacuaaugcuacugaguugguucagaguucuucaacagguagaauaugcgacaguccucaccgaauccuugauggaaaaaacugcacacugauagaugcucuauugggagacccucauugugauggcuuccaaaauaaggaaugggaccuuuuuguugaacgcagcaaagcuuacagcaacuguuacccuuaugaugugccggauuaugccucccuuaggucacuaguugccucaucaggcacccuggaauuuaucaaugaagacuucaauuggacuggagucgcucaggaugggggaagcuaugcuugcaaaaggggaucuguuaacaguuucuuuaguagauugaauugguugcacaaauuagaauacaaauauccagcgcugaacgugacuaugccaaacaauggcaaauuugacaaauuguacauuugggggguucaccacccgagcacggacagugaccaaaccagccuauauguucgagcaucagggagagucacagucucuaccaaaagaagccaacaaacuguaaccccgaauaucgggucuagacccuggguaaggggucuguccaguagaauaagcaucuauuggacaauaguaaaaccgggagacauacuuuugauuaauagcauagggaaucuaauugcuccucgggguuacuucaaaauacgaaaugggaaaagcucaauaaugaggucagauguacccauuggcaacugcaguucugaaugcaucacuccaaauggaagcauucccaaugacaaaccuuuucaaaauguaaacaggaucacauauggggccugccccagauauguuaagcaaaacacucugaaauuggcaacagggaugcggaauguaccagagaaacaaacuagaggcauauucggcgcaaucgcagguuucauagaaaaugguugggagggaaugguagacgguugguaugguuucaggcaucaaaauucugagggcacaggacaagcagcagaucuuaaaagcacucaagcagcaaucgaccaaaucaacgggaaacugaauagguuaaucgagaaaacgaacgagaaauuccaucaaaucgaaaaagaauucucagaaguggaagggagaauucaggaccucgagaaauauguugaagacacuaaaauagaucucuggucuuacaacgcggagcuucuuguugcccuggagaaccaacauacaauugaucuaacugacucagaaaugaacaaacuguuugaaaaaacaaggaagcaacugagggaaaaugcugaggacaugggcaaugguugcuucaaaauauaccacaaaugugacaaugccugcauagggucaaucagaaauggaacuuaugaccaugauguauacagagacgaagcauuaaacaaccgguuccagaucaaagguguugagcugaagucaggauacaaagauuggauccuauggauuuccuuugccauaucaugcuuuuugcuuuguguuguuuugcugggguucaucaugugggccugccaaaaaggcaacauuaggugcaacauuugcauuuga

SEQ ID NO: 40589 - RNA, 1701 nt, Artificial Sequence
  derived and/or modified CDS sequence (wt) from hemagglutinin__InfluenzaA__AFG99369
augaagacuaucauugcuuugagcuacauuuucugucugguuuucgcccaaaaacuucccggaaaugacaacagcacagcaacgcugugccugggacaucaugcagugccaaacggaacacuagugaaaacaaucacgaaugaucaaauugaagugacuaaugcuacugagcugguucagaguuccucaacagguagaauaugcgacaguccucaccgaauccuugauggaaaaaacugcacacugauagaugcucuauugggagacccucauugugauggcuuucaaaauaaggaaugggaccuuuuuguugaacgcagcaaagcuuacagcaacuguuacccuuaugaugugccggauuaugccucccuuaggucacuaguugccucaucaggcacccuggaguuuaucaaugaagacuucaauugggcuggagucgcucagagugggggaagcuaugcuugcaaaaggggaucuguuaacaguuucuuuaguagauugaauugguugcacgaaucagaauacaaauauccagcgcugaacgugacuaugccaaacaauggcaaauuugacaaauuguacauuugggggguucaccacccgagcacggacagagaacaaaccaaccuauauguucgagcaucagggagagucacagucucaaccaaaagaagccagcaaacuguaaucccgaauaucgggucuagacccuggguaaggggucuguccaguagaauaagcaucuauuggacaauaguaaaaccgggagacauacuuuugauuaauagcaccgggaaccuaauugcuccucgggguuacuucaaaauacgaacugggaaaagcucaauaaugaggucagaugcacccauuggcaccugcaguucugaaugcaucacuccaaauggaagcauucccaaugacaaacccuuucaaaauguaaacaggaucacauauggggcaugucccagauauguuaagcaaaacacucugaaauuggcaacagggaugcggaauguaccagagaaacaaacuagaggcauauucggcgcaaucgcagguuucauagaaaaugguugggagggaaugguagacgguugguacgguuucaggcaucaaaauucugagggcacaggacaagcagcagaucuuaaaagcacucaagcagcaaucgaccaaaucaacgggaaacugaauagguuaaucgagaaaacgaacgagaaauuccaucaaaucgaaaaggaauucucagaaguagaagggagaauucaggaccucgagaaauauguugaagacacuaaaauagaucucuggucuuacaacgcggagcuucuugucgcccuggagaaccaacauacaauugaucugacugacucagaaaugaacaaacuguuugaaaaaacaaggaagcaacugagggaaaaugcugaggacaugggcaaugguugcuucaaaauauaccacaaaugugacaaugccugcauagggucaaucagaaauggaacuuaugaccaugauguauacagagacgaagcauuaaacaaccgguuccagaucaaagguguugagcugaagucaggauacaaagacuggauccuauggauuuccuuugccacaucaugcuuuuugcuuuguguuguuuugcugggguucaucaugugggccugccaaaaaggcaacauuaggugcaacauuugcauuuga

SEQ ID NO: 40590 - RNA, 1701 nt, Artificial Sequence
  derived and/or modified CDS sequence (wt) from hemagglutinin__InfluenzaA__AFG99380
augaagacuaucauugcuuugagcuacauuuucugucugguuuucgcccaaaaacuucccggaaaugacaacagcacagcaacgcugugccugggacaucaugcagugccaaacggaacgcuagugaaaacaaucacgaaugaucaaauugaagugacuaaugcuacugagcugguucagaguuccucaacagguagaauaugcgacaguccucaccgaauccuugauggaaaaaacugcacacugauagaugcucuauugggagacccucauugugauggcuuucaaaauaaggaaugggaccuuuuuguugaacgcagcaaagcuuacagcaacuguuacccuuaugaugugccggauuaugccucccuuaggucacuaguugccucaucaggcacccuggaguuuaucaaugaagacuucaauuggacuggagucgcucagagugggggaagcuaugcuugcaaaaggggaucuguuaacaguuucuuuaguagauugaauugguugcacgaaucagaauacaaauauccagcgcugaacgugacuaugccaaacaauggcaaauuugacaaauuguacauuugggggguucaccacccgagcacggacagagaacaaaccaaccuauauguucgagcaucagggagagucacagucucaaccaaaagaagccagcaaacuguaaucccgaauaucgggucuagacccuggguaaggggucuguccaguagaauaagcaucuauuggacaauaguaaaaccgggagacauacuuuugauuaauagcaccgggaaccuaauugcuccucgggguuacuucaaaauacgaacugggaaaagcucaauaaugaggucagaugcacccauuggcaccugcaguucugaaugcaucacuccaaauggaagcauucccaaugacaaacccuuucaaaauguaaacaggaucacauauggggcaugucccagauauguuaagcaaaacacucugaaauuggcaacagggaugcggaauguaccagagaaacaaacuagaggcauauucggagcaaucgcagguuucauagaaaaugguugggagggaaugguagacgguugguacgguuucaggcaucaaaauucugagggcacaggacaagcagcagaucuuaaaagcacucaagcagcaaucgaccaaaucaacgggaaacugaauagguuaaucgagaaaacgaacgagaaauuccaucaaaucgaaaaggaauucucagaaguagaagggagaauucaggaccucgagaaauauguugaagacacuaaaauagaucucuggucuuacaacgcggagcuucuugucgcccuggagaaccaacauacaauugaucugacugacucagaaaugaacaaacuguuugaaaaaacaaggaagcagcugagggaaaaugcugaggacaugggcaaugguugcuucaaaauauaccacaaaugugacaaugccugcauagggucaaucagaaauggaacuuaugaccaugauguauacagagacgaagcauuaaacaaccgguuccagaucaaagguguugagcugaagucaggguacaaagacuggauccuauggauuuccuuugccauaucaugcuuuuugcuuuguguuguuuugcugggguucaucaugugggccugccaaaaaggcaacauuaggugcaacauuugcauuuga

SEQ ID NO: 40591 - RNA, 1701 nt, Artificial Sequence
  derived and/or modified CDS sequence (wt) from hemagglutinin__InfluenzaA__AFG99391
augaagacuaucauugcuuugagcuacauuuucugucugguuuucgcccaaaaacuucccggaaaugacaacagcacagcaacgcugugccugggacaucaugcagugccaaacggaacgcuagugaaaacaaucacgaaugaucaaauugaagugacuaaugcuacugagcugguucagaguuccucaacagguagaauaugcgacaguccucaccgaauccuugauggaaaaaacugcacacugauagaugcucuauugggagacccucauugugauggcuuucaaaauaaggaaugggaccuuuuuguugaacgcagcaaagcuuacagcaacuguuacccuuaugaugugccggauuaugccucccuuaggucacuaguugccucaucaggcacccuggaguuuaucaaugaagacuucaauuggacuggagucgcucagagugggggaagcuaugcuugcaaaaggggaucuguuaacaguuucuuuaguagauugaauugguugcacgaaucagaauacaaauauccagcgcugaacgugacuaugccaaacaauggcaaauuugacaaauuguacauuugggggguucaccacccgagcacggacagagaacaaaccaaccuauauguucgagcaucagggagagucacagucucaaccaaaagaagccagcaaacuguaaucccgaauaucgggucuagacccuggguaaggggucuguccaguagaauaagcaucuauuggacaauaguaaaaccgggagacauacuuuugauuaauagcaccgggaaccuaauugcuccucgggguuacuucaaaauacgaacugggaaaagcucaauaaugaggucagaugcacccauuggcaccugcaguucugaaugcaucacuccaaauggaagcauucccaaugacaaacccuuucaaaauguaaacaggaucacauauggggcaugucccagauauguuaagcaaaacacucugaaauuggcaacagggaugcggaauguaccagagaaacaaacuagaggcauauucggagcaaucgcagguuucauagaaaaugguugggagggaaugguagacgguugguacggcuucaggcaucaaaauucugagggcacaggacaagcagcagaucuuaaaagcacucaagcagcaaucgaccaaaucaacgggaaacugaauagguuaaucgagaaaacgaacgagaaauuccaucaaaucgaaaaggaauucucagaaguagaagggagaauucaggaccucgagaaauauguugaagacacuaaaauagaucucuggucuuacaacgcggagcuucuugucgcccuggagaaccaacauacaauugaucugacugacucagaaaugaacaaacuguuugaaaaaacaaggaagcagcugagggaaaaugcugaggacaugggcaaugguugcuucaaaauauaccacaaaugugacaaugccugcauagggucaaucagaaauggaacuuaugaccaugauguauacagagacgaagcauuaaacaaccgguuccagaucaaagguguugagcugaagucaggguacaaagacuggauccuauggauuuccuuugccauaucaugcuuuuugcuuuguguuguuuugcugggguucaucaugugggccugccaaaaaggcaacauuaggugcaacauuugcauuuga

SEQ ID NO: 40592 - RNA, 1701 nt, Artificial Sequence
  derived and/or modified CDS sequence (wt) from hemagglutinin__InfluenzaA__AFG99402
augaagacuaucauugcuuugagcuacauuuucugucugguuuucgcccaaaaacuucccggaaaugacaacagcacagcaacgcugugccugggacaucaugcagugccaaacggaacgcuagugaaaacaaucacgaaugaucagauugaagugacuaaugcuacugagcugguucagaguuccucaacagguagaauaugcgacaguccucaccgaauccuugauggaaaaaacugcacacugauagaugcucuauugggagacccucauugugauggcuuccaaaaugagaaaugggaccuuuuuguugaacgcagcaaagcuuacagcaacuguuacccuuaugaugugccggauuaugccucccuuaggucacuaguugccucaucaggcacccuggaguuuaucaaugaagacuucaauuggacuggagucacucagagugggggaagcuaugcuugcaaaaggggaucuguuaacaguuucuucaguagauugaauugguugcacaaaucagaauacaaauauccagcgcugaacgugacuaugccaaacaauggcaaauuugacaaauuguacauuugggggguucaccacccggucacggacagagaacaaaccaaccuauauguucgagcaucagggagagucacagucucuaccaagagaagccagcaaacuguaaucccgaauaucgggucuagacccuggguaaggggucuguccaguagaauaagcaucuauuggacaauaguaaaaccgggagacauacuguugauuaauagcaccgggaaccuaauugcuccucgggguuacuucaaaauacgcacugggaaaagcucaauaaugaggucagaugcaccuauuggcaccugcaguucugaaugcaucacuccaaauggaagcauucccaaugacaaacccuuucaaaauguaaacaagaucacauauggggcaugucccagauauguuaagcaaaacacucugaaauuggcaacagggaugcggaauguaccagagaaacaaacuagaggcauauucggcgcaauagcagguuucauagaaaaugguugggagggaaugguagacggcugguacgguuucaggcaucaaaauucugagggcacaggacaagcagcagaucuuaaaagcacucaagcagcaaucgaccaaaucaacgggaaacugaauagguuaaucgagaaaacgaacgagaaauuccaucaaaucgaaaaggaauucucagaaguagaagggagaauucaggaccucgagaaauauguugaagacacuaaaauagaucucuggucuuacaacgcggagcuucuugucgcccuggagaaccaacauacaauugaucugacugacucagaaaugaacaaacuguuugaaaaaacaaggaagcaacugagggaaaaugcugaggacaugggcaaugguugcuucaagauauaccacaaaugugacaaugccugcauagggucaaucagaaauggaacuuaugaccaugauguauacagagacgaagcauuaaacaaccgguuccagaucaaagguguugagcugaagucaggauacaaagacuggauccuauggauuuccuuugccauaucaugcuuuuugcuuuguguuguuuugcugggguucaucaugugggccugccaaaaaggcaacauuaggugcaacauuugcauuuga

SEQ ID NO: 40593 - RNA, 1701 nt, Artificial Sequence
  derived and/or modified CDS sequence (wt) from hemagglutinin__InfluenzaA__AFG99413
augaagacuaucauugcuuugagcuacauuuucugucugguuuucgcccaaaaacuucccggaaaugacaacagcacagcaacgcugugccugggacaucaugcagugccaaacggaacgcuagugaaaacaaucacgaaugaucaaauugaagugacuaaugcuacugagcugguucagaguuccucaacagguagaauaugcgacaguccucaccgaauccuugauggaaaaaacugcacacugauagaugcucuauugggagacccucauugugauggcuuucaaaauaaggaaugggaccuuuuuguugaacgcagcaaagcuuacagcaacuguuacccuuaugaugugccggauuaugccucccuuaggucacuaguugccucaucaggcacccuggaguuuaucaaugaagacuucaauuggacuggagucgcucagagugggggaagcuaugcuugcaaaaggggaucuguuaacaguuucuuuaguagauugaauugguugcacgaaucagaauacaaauauccagcgcugaacgugacuaugccaaacaauggcaaauuugacaaauuguacauuugggggguucaccacccgagcacggacagagaacaaaccaaccuauauguucgagcaucagggagagucacagucucaaccaaaagaagccagcaaacuguaaucccgaauaucgggucuagacccuggguaaggggucuguccaguagaauaagcaucuauuggacaauaguaaaaccgggagacauacuuuugauuaauagcaccgggaaccuaauugcuccucgggguuacuucaaaauacgaacugggaaaagcucaauaaugaggucagaugcacccauuggcaccugcaguucugaaugcaucacuccaaauggaagcauucccaaugacaaacccuuucaaaauguaaacaggaucacauauggggcaugucccagauauguuaagcaaaacacucugaaauuggcaacagggaugcggaauguaccagagaaacaaacuagaggcauauucggagcaaucgcagguuucauagaaaaugguugggagggaaugguagacgguugguacgguuucaggcaucaaaauucugagggcacaggacaagcagcagaucuuaaaagcacucaagcagcaaucgaccaaaucaacgggaaacugaauagguuaaucgagaaaacgaacgagaaauuccaucaaaucgaaaaggaauucucagaaguagaagggagaauucaggaccucgagaaauauguugaagacacuaaaauagaucucuggucuuacaacgcggagcuucuugucgcccuggagaaccaacauacaauugaucugacugacucagaaaugaacaaacuguuugaaaaaacaaggaggcagcugagggaaaaugcugaggacaugggcaaugguugcuucaaaauauaccacaaaugugacaaugccugcauagggucaaucagaaauggaacuuaugaccaugauguauacagagacgaagcauuaaacaaccgguuccagaucaaagguguugagcugaagucaggguacaaagacuggauccuauggauuuccuuugccauaucaugcuuuuugcuuuguguuguuuugcugggguucaucaugugggccugccaaaaaggcaacauuaggugcaacauuugcauuuga

SEQ ID NO: 40594 - RNA, 1701 nt, Artificial Sequence
  derived and/or modified CDS sequence (wt) from hemagglutinin__InfluenzaA__AFG99424
augaagacuaucauugcuuugagcuacauuuucugucugguuuucgcccaaaaacuucccggaaaugacaacagcacagcaacgcugugccugggacaucaugcagugccaaacggaacgcuagugaaaacaaucacgaaugaucaaauugaagugacuaaugcuacugagcugguucagaguuccucaacagguagaauaugcgacaguccucaccgaauccuugauggaaaaaacugcacacugauagaugcucuauugggagacccucauugugauggcuuucaaaauaaggaaugggaccuuuuuguugaacgcagcaaagcuuacagcaacuguuacccuuaugaugugccggauuaugccucccuuaggucacuaguugccucaucaggcacccuggaguuuaucaaugaagacuucaauuggacuggagucgcucagagugggggaagcuaugcuugcaaaaggggaucuguuaacaguuucuuuaguagauugaauugguugcacaaaucagaauacaaauauccagcgcugaacgugacuaugccaaacaauggcaaauuugacaaauuguacauuugggggguucaccacccgagcacggacagagaacaaaccaaccuauauguucgagcaucagggagagucacagucucaaccaaaagaagccagcaaacuguaaucccgaauaucgggucuagacccuggguaaggggucuguccaguagaauaagcaucuauuggacaauaguaaaaccgggagacauacuuuugauuaauagcaccgggaaccuaauugcuccucgggguuacuucaaaauacgaacugggaaaagcucaauaaugaggucagaugcacccauuggcaccugcaguucugaaugcaucacuccaaauggaagcauucccaaugacaaacccuuucaaaauguaaacaggaucacauauggggcaugucccagauauguuaagcaaaacacucugaaauuggcaacagggaugcggaauguaccagagaaacaaacuagaggcauauucggagcaaucgcagguuucauagaaaaugguugggagggaaugguagacgguugguacgguuucaggcaucaaaauucugagggcacaggacaagcagcagaucuuaaaagcacucaagcagcaaucgaccaaaucaacgggaaacugaauagguuaaucgagaaaacgaacgagaaauuccaucaaaucgaaaaggaauucucagaaguagaagggagaauucaggaccucgagaaauauguugaagacacuaaaauagaucucuggucuuacaacgcggagcuucuugucgcccuggagaaccaacauacaauugaucugacugacucagaaaugaacaaacuguuugaaaaaacaaggaggcagcugagggaaaaugcugaggacaugggcaaugguugcuucaaaauauaccacaaaugugacaaugccugcauagggucaaucagaaauggaacuuaugaccaugauguauacagagacgaagcauuaaacaaccgguuccagaucaaagguguugagcugaagucaggguacaaagacuggauccuauggauuuccuuugccauaucaugcuuuuugcuuuguguuguuuugcugggguucaucaugugggccugccaaaaaggcaacauuaggugcaacauuugcauuuga

SEQ ID NO: 40595 - RNA, 1701 nt, Artificial Sequence
  derived and/or modified CDS sequence (wt) from hemagglutinin__InfluenzaA__AFG99435
augaagacuaucauugcuuugagcuacauuuucugucugguuuucgcccaaaaacuucccggaaaugacaacagcacagcaacgcugugccugggacaucaugcagugccaaacggaacgcuagugaaaacaaucacgaaugaucaaauugaagugacuaaugcuacugaguugguucagaauuccucaacagguagaauaugcgacaguccucaccgaauccuugacggaaaaaacugcacacugauagaugcucuauugggagacccucauugugauggccuccaaaauaaggaaugggaccuuuuuguugaacgcagcaaagcuuacagcaacuguuacccuuaugaugugccggauuaugccucccuuaggucacuaguugccucaucaggcacucuggaguuuaccaaggaagacuucaauuggacuggagucgcucagagugggggaagcuaugcuugcaaaaggggaucuguuaacaguuucuucaguagauugaauugguugcacgaaucagaauacaaauauccagcgcugaacgugacuaugccaaacaauggcaaauuugacaaauuguacauuugggggguucaccacccgagcacggacagagaacaaaccaaccuauauguucgagcaucagggagagucacagucucuaccaaaagaagccagcaaacuguaaucccgaauaucgggucuagacccuggguaaggggucuguccaguagaauaagcaucuauuggacaauaguaaaaccgggagacauacuguugauuaauagcaccgggaaccuaauugcuccucgggguuacuucaaaauacgaacuggaaaaagcucaauaaugaggucagaugcacccauuggcaccugcaguucugaaugcaucaccccaaauggaagcauucccaaugacaaacccuuucaaaauguaaacaggaucacauauggggcaugucccagauauguuaagcaaaacacucugaaauuggcaacagggaugcggaauguaccagagaaacaaacuaggggcauauucggcgcaaucgcagguuucauagaaaaugguugggagggaaugguagacgguugguacgguuucaggcaucaaaauucugagggcacaggacaagcagcagaucuuaaaagcacucaagcagcaaucgaccaaaucaacgggaaacugaauagguuaaucgagaaaacgaacgagaaauuccaucaaauagaaaaggaauucucagaaguagaagggagaauucaggaccucgagaaauauguugaagacacuaaaauagaucucuggucuuacaacgcggagcuucuugucgcccuggagaaccaacauacaauugaccugacugacucagaaaugaacaaacuguuugaaaaaacaaggaagcaacugagggaaaaugcugaggacaugggcaaugguugcuucaagauauaccacaaaugugacaaugccugcauagggucaaucagaaauggaacuuaugaccaugauguauacagagacgaagcauuaaacaaccgguuccagaucaaagguguugagcugaagucaggauacaaagacuggauccuauggauuuccuuugccauaucaugcuuuuugcuuuguguuguuuugcugggguucaucaugugggccugccaaaaaggcaacauuaggugcaacauuugcauuuga

SEQ ID NO: 40596 - RNA, 1701 nt, Artificial Sequence
  derived and/or modified CDS sequence (wt) from hemagglutinin__InfluenzaA__AFG99446
augaagacuaucauugcuuugagcuacauuuucugucugguuuucgcccaaaaacuucccggaaaugacaacagcacagcaacgcugugccugggacaucaugcagugccaaacggaacgcuagugaaaacaaucacgaaugaucaaauugaagugacuaaugcuacugaguugguucagaauuccucaacagguagaauaugcgacaguccucaccgaauccuugacggaaaaaacugcacacugauagaugcucuauugggagacccucauugugauggccuccaaaauaaggaaugggaccuuuuuguugaacgcagcaaagcuuacagcaacuguuacccuuaugaugugccggauuaugccucccuuaggucacuaguugccucaucaggcacucuggaguuuaccaaggaagacuucaauuggacuggagucgcucagagugggggaagcuaugcuugcaaaaggggaucuguuaacaguuucuucaguagauugaauugguugcacgaaucagaauacaaauauccagcgcugaacgugacuaugccaaacaauggcaaauuugacaaauuguacauuugggggguucaccacccgagcacggacagagaacaaaccaaccuauauguucgagcaucagggagagucacagucucuaccaaaagaagccagcaaacuguaaucccgaauaucgggucuagacccuggguaaggggucuguccaguagaauaagcaucuauuggacaauaguaaaaccgggagacauacuguugauuaauagcaccgggaaccuaauugcuccucgggguuacuucaaaauacgaacuggaaaaagcucaauaaugaggucagaugcacccauuggcaccugcaguucugaaugcaucaccccaaauggaagcauucccaaugacaaacccuuucaaaauguaaacaggaucacauauggggcaugucccagauauguuaagcaaaacacucugaaauuggcaacagggaugcggaauguaccagagaaacaaacuaggggcauauucggcgcaaucgcagguuucauagaaaaugguugggagggaaugguagaugguugguacgguuucaggcaucaaaauucugagggcacaggacaagcagcagaucuuaaaagcacucaagcagcaaucgaccaaaucaacgggaaacugaauagguuaaucgagaaaacgaacgagaaauuccaucaaauagaaaaggaauucucagaaguagaagggagaauucaggaccucgagaaauauguugaagacacuaaaauagaucucuggucuuacaacgcggagcuucuugucgcccuggagaaccaacauacaauugaccugacugacucagaaaugaacaaacuguuugaaaaaacaaggaagcaacugagggaaaaugcugaggacaugggcaaugguugcuucaagauauaccacaaaugugacaaugccugcauagggucaaucagaaauggaaccuaugaccaugauguauacagagacgaagcauuaaacaaccgguuccagaucaaagguguugagcugaagucaggauacaaagacuggauccuauggauuucuuuugccauaucaugcuuuuugcuuuguguuguuuugcugggguucaucaugugggccugccaaaaaggcaacauuaggugcaacauuugcauuuga

SEQ ID NO: 40597 - RNA, 1701 nt, Artificial Sequence
  derived and/or modified CDS sequence (wt) from hemagglutinin__InfluenzaA__AFG99457
augaagacuaucauugcuuugagcuacauuuuaugucugguuuucgcucaaaaacuucccggaaaugacaacagcacagcaacgcugugccugggacaucaugcagugccaaacggaacgcuagugaaaacaaucacgaaugaucaaauugaagugacuaaugcuacugagcugguucagaguuccucaacagguagaauaugcgacaguccucaccgaauucuugauggggaaaacugcacacugauagaugcucuauugggagacccucauugugauggcuuccaaaauaaggaaugggaccuuuuuguugaacgcagcaaagcuuacagcaacuguuacccuuaugaugugccggauuaugccucccuuaggucacuaguugccucaucaggcacccuggaguuuaucaaugaagacuucaauuggacuggagucgcucagagugggggaagcuaugcuugcaaaaggggaucuguuaacaguuucuuuaguagauugaauugguugcacaaaucagaauacaaauauccagcgcugaacgugacuaugccaaacaauggcaaauuugacaaauuguacauuugggggguucaccacccgagcacggacagagaccaaaccagccuauauguucgagcaucagggagagucacagucucuaccaaaagaagccaacaaacuguaaucccgaauaucgggucuagacccuggguaaggggucaguccaguagaauaagcaucuauuggacaauaguaaaaccgggagacauacuuuugauuaauagcaccgggaaccuaauugcuccucgggguuacuucaaaauacgaaaugggaaaagcucaauaaugaggucagaugcacccauuggcaccugcaguucugaaugcaucacuccaaauggaagcauucccaaugacaaaccuuuucaaaauguaaacaggaucacauauggggcaugucccagauauguuaagcaaaacacucugaaauuggcaacagggaugcggaauguaccagagaaacaaacuagaggcauauucggcgcaaucgcagguuucauagaaaaugguugggagggaaugguagacgguugguacgguuucaggcaucaaaauucugagggcacaggacaagcagcagaucuuaaaagcacucaagcagcaaucgaccaaaucaacgggaaacugaauagguuaaucgagaaaacgaacgagaaauuccaucaaaucgaaaaagaauucucagaaguagaagggagaauucaggaccucgagaaauauguugaagacacuaaaauagaucucuggucuuacaacgcggagcuucuuguugcccuggagaaccaacauacaauugaucugacugacucagaaaugaacaaacuguuugaaaaaacaaggaagcaacugagggaaaaugcugaggacaugggcaaugguugcuucaaaauauaccacaaaugugacaaugccugcauagggucaaucagaaauggaacuuaugaccaugauguauacagagacgaagcauuaaacaaccgguuccagaucaaagguguugagcugaagucaggauacaaagauuggauccuauggauuuccuuugccauaucaugcuuuuugcuuuguguuguuuugcugggguucaucaugugggccugccaaaaaggcaacauuaggugcaacauuugcauuuga

SEQ ID NO: 40598 - RNA, 1701 nt, Artificial Sequence
  derived and/or modified CDS sequence (wt) from hemagglutinin__InfluenzaA__AFG99468
augaagaccaucauugcuuugagcuacauuuucugucugguuuucgcccaaaaacuucccggaaaugacaacagcacagcaacgcugugccuaggacaucaugcagugccaaacggaacgcuagugaaaacaaucacgaaugaccaaauugaagugacuaaugcuacugagcugguucagaguuccucaacaggucgaauaugcgacaguccucaccggauccuugauggaaaaaacugcacacugauagaugcucuauugggagacccucauugugauggcuuccaaaauaaggaaugggaccuuuuuguugaacgcagcaaagcuuacagcaacuguuacccuuaugaugugccggauuaugccucccuuaggucacuaguugccucaucaggcacccuggaguuuaucaaugaagacuucaauuggacuggagucgcucagagugggggaagcuaugcuugcaaaaggggaucuguuaacaguuucuucaguagauugaauugguugcacgaaucagaauacaaauauccagcgcugaacgugacuaugccaaacaauggcaaauuugacaaauuguacauuugggggguucaccacccgagcacggacagagaacaaaccaaccuauauguucgagcaucagggagagucacagucucuaccaaaagaagccagcaaacuguaaucccgaauaucgggucuagacccuggguaaggggucuguccaguagaauaagcaucuauuggacaauaguaaaaccgggagacauacuguugauuaauagcacugggaaccuaauugcuccucggggcuacuucaaaauacgaacuggaaaaagcucaauaaugaggucagaugcacccauuggcaccugcaguucugaaugcaucacuccaaauggaagcauucccaaugacaaacccuuucaaaauguaaacaggaucacauauggggcaugucccagauauguuaagcaaaacacucugaaauuggcaacagggaugcggaauguaccagagaaacaaacuagaggcauauucggcgcaaucgcagguuucauagaaaaugguugggagggaaugguagacgguugguacgguuucaggcaucaaaauucugagggcacaggacaagcagcagaucuuaaaagcacucaagcagcaaucgaccaaaucaacgggaaacugaauagguuaaucgagaaaacgaacgagaaauuccaucaaaucgaaaaggaauucucagaaguagaagggagaauucaggaccucgagaaauauguugaagacacuaaaauagaucucuggucuuacaacgcggagcuucuugucgcccuggagaaccaacauacaauugaucugacugacucagaaauggacaaacuguuugaaaaaacaaggaagcaacugagggaaaaugcugaggacaugggcaaugguugcuucaagauauaccacaaaugugacaaugccugcauagggucaaucagaaauggaacuuaugaccaugauguauacagagacgaagcauuaaacaaccgguuccagaucaaagguguugagcugaagucaggauacaaagacuggauccuauggauuuccuuugccauaucaugcuuuuugcuuuguguuguuuugcugggguucaucaugugggccugccaaaaaggcaacauuaggugcaacauuugcauuuga

SEQ ID NO: 40599 - RNA, 1701 nt, Artificial Sequence
  derived and/or modified CDS sequence (wt) from hemagglutinin__InfluenzaA__AFG99490
augaagacuaucauugcuuugagcuacauuuuaugucugguuuucgcccaaaaacuucccggaaaugacaacagcacagcaacgcugugccugggacaucaugcagugccaaacggaacgcuagugaaaacaaucacgaaugaucaaauugaagugacuaaugcuacugagcugguucagaguuccucaacagguagaauaugcgacaguccucaccgaauccuugauggaaaaaacugcacacugauagaugcucuauugggagacccucauugugauggcuuccaaaauaaggaaugggaccuuuuuauugaacgcagcaaagcuuacagcaacuguuacccuuaugaugugccggauuaugccucccuuaggucacuaguugccucaucaggcacccuggaguuuaucaaugaagacuucaauuggacuggagucgcucagaguggggaaagcuaugcuugcaaaaggggaucuguuaaaaguuucuuuaguagauugaauugguugcacgaaucagaauacaaauauccagcgcugaacgugacuaugccaaacaauggcaaauuugacaaauuguacauuugggggguucaccacccgagcacggacagagaacaaaccagccuauauguucgagcaucagggagagucacagucucuaccaaaagaagccaacaaacuguaaucccgaauaucggguccagacccuggguaaggggucuguccaguagaauaagcaucuauuggacaauaguaaaaccgggagacauacuuuugauuaauagcaccgggaaccuaauugcuccucgggguuacuucaaaauacgaacugggaaaagcucgauaaugaggucagaugcacccauuggcaccugcaguucugaaugcaucacuccaaauggaagcauccccaaugacaaaccuuuucaaaauguaaacaggaucacauauggggcaugucccagauauguuaagcaaaacacucugaaauuggcaacagggaugcggaauguaccagagaaacaaacuagaggcauauucggcgcaaucgcagguuucauagaaaaugguugggagggaaugguagacgguugguacgguuucaggcaucaaaauucugagggcacaggacaagcagcagaucuuaaaagcacucaagcagcaaucgaccaaaucaacgggaaacugaauagguuaaucgagaaaacgaacgagaaauuccaucaaaucgaaaaggaauucucagaaguagaagggagaauucaggaccucgagaaauauguugaagacacuaaaauagaucucuggucuuacaacgcggagcuucuuguugcccuggagaaccaacauacaauugaucugacugacucagaaaugaacaaacuguuugaaaaaacaaggaagcaacugagggaaaaugcugaggacaugggcaaugguugcuucaaaauauaccacaaaugugacaaugccugcauagggucaaucagaaauggaacuuaugaccaugauguauacagagacgaagcauuaaacaaccgguuccagaucaaagguguugagcugaagucaggauacaaagauuggauccuauggauuuccuuugccauaucaugcuuuuugcuuuguguuguuuugcugggguucaucaugugggccugccaaaaaggcaacauuaggugcaacauuugcauuuga

SEQ ID NO: 40600 - RNA, 1701 nt, Artificial Sequence
  derived and/or modified CDS sequence (wt) from hemagglutinin__InfluenzaA__AFG99501
augaagaccaucauugcuuugagcuacauuuucugucugguugucgcccaaaaacuucccggaaaugacaacagcacagcaacgcugugccugggacaucaugcagugccaaacggaacgcuagugaaaacaaucacgaaugaccaaauugaagugacuaaugcuacugagcugguucagaguuccucaacaggucgaauaugcgacaguccucaccgaauccuugauggaaaaaacugcacacugauagaugcucuauugggagauccucauugugauggcuuccaaaauaaggaaugggaccuuuuuguugaacgcagcaaagcuuacagcaacuguuacccuuaugaugugccggauuaugccucccuuaggucacuaguugccucaucaggcacccuggaguuuaucaaugaagacuucaauuggacuggagucgcucagagugggggaagcuauacuugcaaaaggggaucuguuaacaguuucuucaguagauugaauugguugcacgaaucagaauacaaauauccagcgcugaacgugacuaugccaaacaauggcaaauuugacaaauuguacauuugggggguucaccacccgagcacggacagagaacaaaccaaccuauauguucgagcaucagggagagucacagucuccaccaaaagaagccagcaaacuguaaucccgaauaucgggucuagacccuggguaaggggucuguccaguagaauaagcaucuauuggacaauaguaaaaccgggagacauacuguugauuaauagcaccgggaaccuaauugcuccucgggguuacuucaaaauacgaacuggaaaaagcucaauaaugaggucagaugcacccauuggcaccugcaguucugaaugcaucacuccaaauggaagcauuuccaaugacaaacccuuucaaaauguaaacaggaucacauauggggcaugucccagauauguuaagcaaaacacucugaaauuggcaacagggaugcggaaugugccagaaaaacaaacuagaggcauauucggcgcaaucgcagguuucauagaaaaugguugggagggaaugguagacgguugguacgguuucaggcaucaaaauucugagggcacaggacaagcagcagaucuuaaaagcacucaagcagcaaucgaccaaaucaacggaaaacugaauagguuaaucgagaaaacgaacgagaaauuccaucaaaucgaaaaggaauucucagaaguagaagggagaauucaggaccucgagaaauauguugaagacacuaaaauagaucucuggucuuacaacgcggagcuucuugucgcccuggagaaccaacauacaauugaucugacugacucagaaaugaacaaacuguuugaaaaaacaaggaagcaacugagggaaaaugcugaggacaugggcaaugguugcuucaagauauaccacaaaugugacaaugccugcauagggucaaucagaaauggaacuuaugaccaugauguauacagagacgaagcauuaaacaaccgguuccagaucaaagguguugagcugaagucaggauacaaagacuggauccuauggauuuccuuugccauaucaugcuuuuugcuuuguguuguuuugcugggguucaucaugugggccugccaaaaaggcaacauuaggugcaacauuugcauuuga

SEQ ID NO: 40601 - RNA, 1701 nt, Artificial Sequence
  derived and/or modified CDS sequence (wt) from hemagglutinin__InfluenzaA__AFG99512
augaagacuaucauugcuuugagcuacauuuuaugucugguuuucgcccaaaaacuucccggaaaugacaacagcacagcaacgcugugccuggggcaucaugcagugccaaacggaacucuagugaaaacaaucacgaaugaucaaauugaagugacuaaugcuacugagcugguucagaguuccucaacagguagaauaugcgacaguccucaccgaauccuugauggaaaaaacugcacacugauagaugcucuauugggagacccucauugugauggcuuccaaaauaaggaaugggaccuuuuuguugaacgcagcaaagcuuacagcaacuguuacccuuaugaugugccagauuaugccucccuuaggucacuaguugccucaucaggcacccuggaguuuaucaaugaagacuucaauuggacuggagucgcucagaguggggacagcuaugcuugcaaaaggggaucuguuaaaaguuucuuuaguagauugaauugguugcacgaaucagaauacaaauauccagcgcugaacgugacuaugccaaacaaugacaaauuugacaaguuguacauuugggggguucaccacccgagcacggacagagaacaaaccagccuauauauucgagcaucagggagagucacagucucuaccaaaagaagccaacaaacuguaaucccgaauaucggguccagacccuggguaaggggucuguccaguagaauaagcaucuauuggacaauaguaaaaccgggagacauacuuuugauuaauagcaccgggaaucuaauugcuccucgggguuacuucaaaauacgaacugggaaaagcucgauaaugaggucagaugcacccauuggcaccugcaguucugaaugcaucacuccaaauggaagcauccccaaugacaaaccuuuucaaaauguaaacaggaucacauauggggcaugucccagauauguuaagcaaaacacucugaaauuggcaacagggaugcggaauguaccagagaaacaaacuagaggcauauucggcgcaauugcagguuucauagaaaaugguugggagggaaugguagacgguugguacgguuucaggcaucaaaauucugagggcacaggacaagcagcagaucuuaaaagcacucaagcagcaaucgaccaaaucaacgggaaacugaauagguuaaucgagaaaacgaacgagaaauuccaucaaaucgaaaaggaauucucagaaguagaagggagaauucaggaccucgagaaauauguugaagacacuaaaauagaucucuggucuuacaacgcggagcuucuuguugcccuggagaaccaacauacaauugaucugacugacucagaaaugaacaaacuguuugagaaaacaaggaagcaacugagggaaaaugcugaggacaugggcaaugguugcuucaaaauauaccacaaaugugacaaugccugcauagggucaaucagaaauggaacuuaugaccaugauguauacagagacgaagcauuaaacaaccgguuccagaucaaagguguugagcugaagucaggauacaaagauuggauccuauggauuuccuuugccauaucaugcuuuuugcuuuguguuguuuugcugggguucaucaugugggccugccaaaaaggcaacauuaggugcaacauuugcauuuga

SEQ ID NO: 40602 - RNA, 1701 nt, Artificial Sequence
  derived and/or modified CDS sequence (wt) from hemagglutinin__InfluenzaA__AFG99523
augaagaccaucauugcuuugagcuacauuuucugucugguuuucgcccaaaaacuucccggaaaugacaacagcacagcaacgcugugccuaggacaucaugcagugccaaacggaacgcuagugaaaacaaucacgaaugaccaaauugaagugacuaaugcuacugagcugguucagaguuccucaacaggucgaauaugcgacaguccucaccgaauccuugauggaaaaaacugcacacugauagaugcucuauugggagacccucauugugauggcuuccaaaauaaggaaugggaccuuuuuguugaacgcagcaaagcuuacagcaacuguuacccuuaugauguaccggauuaugccucccuuaggucacuaguugccucaucaggcacccuggaguuuaucaaugaagacuucaauuggacuggagucgcucagagugggggaagcuaugcuugcaaaaggggaucuguuaacaguuucuucaguagauugaauugguugcacgaaucacaauacaaauauccagcacugaacgugacuaugccaaacaauggcaaauuugacaaauuguacaucugggggguucaccacccgagcacggacagagaacaaaccaaccuauauguucgagcaucagggagagucacagucucuaccaaaagaagccagcaaacuguaaucccgaacaucgggucuagacccuggguaaggggucuguccaguagaauaagcaucuauuggacaauaguaaaaccgggagacauacuguugauuaauagcaccggaaaccuaauugcuccucgggguuacuucaaaauacgaacugggaaaagcucaauaaugaggucagaugcacccauuggcaccugcaguucugaaugcaucacuccaaauggaagcauucccaaugacaaacccuuucaaaauguaaacagaaucacauauggggcaugucccagauauguuaagcaaaacacucugaaauuggcaacagggaugcggaauguaccagagaaacaaacuagaggcauauucggugcaaucgcaggcuucauagaaaaugguugggaggggaugguagacgguugguacgguuucaggcaucaaaauucugagggcacaggacaagcagcagaucuuaaaagcacucaagcagcaaucgaccaaaucaacgggaaacugaauagguuaaucgaaaaaacgaacgagaaauuccaucaaaucgaaaaggaauucucagaaguagaagggagaauucaggaccucgagaaauauguugaagacacuaaaauagaucucuggucuuacaacgcggagcuucuugucgcucuggagaaccaacacacaauugaucugacugacucagaaaugaacaaacuguuugaaaaaacaaggaagcaacugagggaaaaugcugaggacaugggcaaugguugcuucaagauauaccacaaaugugacaaugccugcauagggucaaucagaaauggaacuuaugaccaugauguauacagagacgaagcauuaaacaaccgguuccagaucaaagguguugagcugaagucaggauacaaagacuggauccuauggauuuccuuugccauaucaugcuuuuugcuuuguguuguuuugcugggguucaucaugugggccugccaaaaaggcaacauuaggugcaacauuugcauuuga

SEQ ID NO: 40603 - RNA, 1701 nt, Artificial Sequence
  derived and/or modified CDS sequence (wt) from hemagglutinin__InfluenzaA__AFG99534
augaagacuaucauugcuuugagcuacauuuuaugucugguuuucgcccaaaaacuucccggaaaugacaacagcacagcaacgcugugccugggacaucaugcagugccaaacggaacgcuagugaaaacaaucacgaaugaucaaauugaagugacuaaugcuacugagcugguucagaguuccucaacagguagaauaugugacaguccucaccgaauccuugauggaaaaaauugcacacugauagaugcucuauugggagacccucauugugauggcuuccaaaauaaggaaugggaccuuuuuguugaacgcagcaaagcuuacagcaacuguuacccuuaugaugugccggauuaugccucccuuaggucacuaguugccucaucaggcacccuggaguuuaccaaugaagacuucaauuggacuggagucgcucagaguggggaaagcuaugcuugcaaaaggggaucuguuaaaaguuucuuuaguagauugaauugguugcacgaaucagauuacaaauauccagcgcugaacgugacuaugccaaacaauggcaaauuugacaaauuguacauuugggggguucaccacccgagcacggacagagaacaaaccagccuauauguucgagcaucagggagagucacagucuccaccaaaagaagccaacaaacugugaucccgaauaucggguccagacccuggguaaggggucuguccaguagaauaagcaucuauuggacaauagugaaaccaggagacauacuuuugauuaauagcaccgggaaccuaauugcuccucgggguuacuucaaaauacgaacugggaaaagcucgauaaugagaucagaugcacccauuggcaccugcaguucugaaugcaucacuccaaauggaagcauccccaaugacaaaccuuuucaaaacguaaacaggaucacauauggggcaugucccagauauguuaagcaaaacacucugaaauuggcaacagggaugcggaauguaccagagaaacaaacuagaggcauauucggcgcaaucgcagguuucauagaaaaugguugggagggaaugguagacgguugguacgguuucaggcaucaaaauucugagggcacaggacaagcagcagaucuuaaaagcacucaagcagcaaucgaccaaaucaacgggaaacugaauagguuaaucgagaaaacgaacgagaaauuccaucaaaucgaaaaggaauucucagaaguagaagggagaauucaggaccucgagaaauauguugaagacacuaaaauagaucucuggucuuacaacgcggagcuucuuguugcccuggagaaccaacauacaauugaucugacugacucagaaaugaacaaacuguuugaaaaaacaaggaagcaacugagggaaaaugcugaggacaugggcaaugguugcuucaaaauauaccacaaaugugacaaugccugcauagggucaaucagaaauggaaccuaugaccaugauguauacagagacgaagcauuaaacaaccgguuccagaucaaagguguugagcugaagucaggauacaaagauuggauccuauggauuuccuuugccauaucaugcuuuuugcuuuguguuguuuugcugggguucaucaugugggccugccaaaaaggcaacauuaggugcaacauuugcauuuga

SEQ ID NO: 40604 - RNA, 1701 nt, Artificial Sequence; identical to SEQ ID NO: 40499
  derived and/or modified CDS sequence (wt) from hemagglutinin__InfluenzaA__AFG99545

SEQ ID NO: 40605 - RNA, 1701 nt, Artificial Sequence
  derived and/or modified CDS sequence (wt) from hemagglutinin__InfluenzaA__AFG99556
augaagacuaucauugcuuugagcuacauuuuaugucugguuuucgcccaaaaacuucccggaaaugacaacagcacagcaacgcugugccugggacaucaugcagugccaaacggaacgcuagugaaaacaaucacgaaugaucaaauugaagugacuaaugcuacugagcugguucagaguuccucaacagguagaauaugugacaguccucaccgaauccuugauggaaaaaauugcacacugauagaugcucuauugggagacccucauugugauggcuuccaaaauaaggaaugggaccuuuuuguugaacgcagcaaagcuuacagcaacuguuacccuuaugaugugccggauuaugccucccuuaggucacuaguugccucaucaggcacccuggaguuuaccaaugaagacuucaauuggacuggagucgcucagaguggggaaagcuaugcuugcaaaaggggaucuguuaaaaguuucuuuaguagauugaauugguugcacgaaucagauuacaaauauccagcgcugaacgugacuaugccaaacaauggcaaauuugacaaauuguacauuugggggguucaccacccgagcacggacagagaacaaaccagccuauauguucgagcaucagggagagucacagucuccaccaaaagaagccaacaaacugugaucccgaauaucggguccagacccuggguaaggggucuguccaguagaauaagcaucuauuggacaauagugaaaccaggagacauacuuuugauuaauagcaccgggaaccuaauugcuccucgggguuacuucaaaauacgaacugggaaaagcucgauaaugagaucagaugcacccauuggcaccugcaguucugaaugcaucacuccaaauggaagcauccccaaugacaaaccuuuucaaaacguaaacaggaucacauauggggcaugucccagauauguuaagcaaaacacucugaaauuggcaacagggaugcggaauguaccagagaaacaaacuagaggcauauucggcgcaaucgcagguuucauagaaaaugguugggagggaaugguagacgguugguacgguuucaggcaucaaaauucugagggcacaggacaagcagcagaucguaaaagcacucaagcagcaaucgaccaaaucaacgggaaacugaauagguuaaucgagaaaacgaacgagaaauuccaucaaaucgaaaaggaauucucagaaguagaagggagaauucaggaccucgagaaauauguugaagacacuaaaauagaucucuggucuuacaacgcggagcuucuuguugcccuggagaaccaacauacaauugaucugacugacucagaaaugaacaaacuguuugaaaaaacaaggaagcaacugagggaaaaugcugaggacaugggcaaugguugcuucaaaauauaccacaaaugugacaaugccugcauagggucaaucagaaauggaaccuaugaccaugauguauacagagacgaagcauuaaacaaccgguuccagaucaaagguguugagcugaagucaggauacaaagauuggauccuauggauuuccuuugccauaucaugcuuuuugcuuuguguuguuuugcugggguucaucaugugggccugccaaaaaggcaacauuaggugcaacauuugcauuuga

SEQ ID NO: 40606 - RNA, 1701 nt, Artificial Sequence; identical to SEQ ID NO: 40499
  derived and/or modified CDS sequence (wt) from hemagglutinin__InfluenzaA__AFG99567

SEQ ID NO: 40607 - RNA, 1701 nt, Artificial Sequence
  derived and/or modified CDS sequence (wt) from hemagglutinin__InfluenzaA__AFG99578
augaagacuaucauugcuuugagcuacauuuuaugucugguuuucgcccaaaaacuucccggaaaugacaacagcacagcaacgcugugccugggacaucaugcagugccaaacggaacguuagugaaaacaaucacgaaugaucaaauugaagugacuaaugcuacugagcugguucagaguuccucaacagguagaauaugugacaguccucaccgaauccuugauggaaaaaauugcacacugauagaugcucuauugggagacccucauugugauggcuuccaaaauaaggaaugggaccuuuuuguugaacgcagcaaagcuuacagcaacuguuacccuuaugaugugccggauuaugccucccuuaggucacuaguugccucaucaggcacccuggaguuuaccaaugaagacuucaauuggacuggagucgcucagaguggggaaagcuaugcuugcaaaaggggaucuguuaaaaguuucuuuaguagauugaauugguugcacgaaucagauuacaaauauccagcgcugaacgugacuaugccaaacaauggcaaauuugacaaauuguacauuugggggguucaccacccgagcacggacagagaacaaaccagccuauauguucgagcaucagggagagucacagucuccaccaaaagaagccaacaaacugugaucccgaauaucggguccagacccuggguaaggggucuguccaguagaauaagcaucuauuggacaauagugaaaccgggagacauacuuuugauuaauagcaccgggaaccuaauugcuccucgggguuacuucaaaauacgaacugggaaaagcucgauaaugagaucagaugcacccauuggcaccugcaguucugaaugcaucacuccaaauggaagcauccccaaugacaaaccuuuucaaaacguaaacaggaucacauauggggcaugucccagauauguuaagcaaaacacucugaaauuggcaacagggaugcggaauguaccagagaaacaaacuagaggcauauucggcgcaaucgcagguuucauagaaaaugguugggagggaaugguagacgguugguacgguuucaggcaucaaaauucugagggcacaggacaagcagcagaucuuaaaagcacucaagcagcaaucgaccaaaucaacgggaaacugaauagguuaaucgagaaaacgaacgagaaauuccaucaaaucgaaaaggaauucucagaaguagaagggagaauucaggaccucgagaaauauguugaagacacuaaaauagaucucuggucuuacaacgcggagcuucuuguugcccuggagaaccaacauacaauugaucugacugacucagaaaugaacaaacuguuugaaaaaacaaggaagcaacugagggaaaaugcugaggacaugggcaaugguugcuucaaaauauaccacaaaugugacaaugccugcauagggucaaucagaaauggaacuuaugaccaugauguauacagagacgaagcauuaaacaaccgguuccagaucaaagguguugagcugaagucaggauacaaagauuggauccuauggauuuccuuugccauaucaugcuuuuugcuuuguguuguuuugcugggguucaucaugugggccugccaaaaaggcaacauuaggugcaacauuugcauuuga

SEQ ID NO: 40608 - RNA, 1701 nt, Artificial Sequence; identical to SEQ ID NO: 40499
  derived and/or modified CDS sequence (wt) from hemagglutinin__InfluenzaA__AFG99589

SEQ ID NO: 40609 - RNA, 1701 nt, Artificial Sequence
  derived and/or modified CDS sequence (wt) from hemagglutinin__InfluenzaA__AFG99600
augaagacuaucauugcuuugagcuacauuuuaugucugguuuucgcccaaaaacuucccggaaaugacaacagcacagcaacgcugugccugggacaucaugcagugccaaacggaacgcuagugaaaacaaucacgaaugaucaaauugaagugacuaaugcuacugagcugguucagaguuccucaacagguagaauaugugacaguccucaccgaguccuugauggaaaaaauugcacacugauagaugcucuauugggagacccucauugugauggcuuccaaaauaaggaaugggaccuuuuuguugaacgcagcaaagcuuacagcaacuguuacccuuaugaugugccggauuaugccucccuuaggucacuaguugccucaucaggcacccuggaguuuaccaaugaagacuucaauuggacuggagucgcucagaguggggaaagcuaugcuugcaaaaggggaucuguuaaaaguuucuuuaguagauugaauugguugcacgaaucagauuacaaauauccagcgcugaacgugacuaugccaaacaauggcaaauuugacaaauuguacauuugggggguucaccacccgagcacggacagagaacaaaccagccuauauguucgagcaucagggagagucacagucuccaccaaaagaagccaacaaacugugaucccgaauaucggguccagacccuggguaaggggucuguccaguagaauaagcaucuauuggacaauagugaaaccgggagacauacuuuugauuaauagcaccgggaaccuaauugcuccucgggguuacuucaaaauacgaauugggaaaagcucgauaaugagaucagaugcacccauuggcaccugcaguucugaaugcaucacuccaaauggaagcauccccaaugacaaaccuuuucaaaacguaaacaggaucacauauggggcaugucccagauauguuaagcaaaacacucugaaauuggcaacagggaugcggaauguaccagagaaacaaacuagaggcauauucggcgcaaucgcagguuucauagaaaaugguugggagggaaugguagacgguugguacgguuucaggcaucaaaauucugagggcacaggacaagcagcagaucuuaaaagcacucaagcagcaaucgaccaaaucaacgggaaacugaauagguuaaucgagaaaacgaacgagaaauuccaucaaaucgaaaaggaauucucagaaguagaagggagaauucaggaccucgagaaauauguugaagacacuaaaauagaucucuggucuuacaacgcggagcuucuuguugcccuggagaaccaacauacaauugaucugacugacucagaaaugaacaaacuguuugaaaaaacaaggaagcaacugagggaaaaugcugaggacaugggcaaugguugcuucaaaauauaccacaaaugugacaaugccugcauagggucaaucagaaauggaacuuaugaccaugauguauacagagacgaagcauuaaacaaccgguuccagaucaaagguguugagcugaagucaggauacaaagauuggauccuauggauuuccuuugccauaucaugcuuuuugcuuuguguuguuuugcugggguucaucaugugggccugccaaaaaggcaacauuaggugcaacauuugcauuuga

SEQ ID NO: 40610 - RNA, 1701 nt, Artificial Sequence; identical to SEQ ID NO: 40499
  derived and/or modified CDS sequence (wt) from hemagglutinin__InfluenzaA__AFG99611

SEQ ID NO: 40611 - RNA, 1701 nt, Artificial Sequence; identical to SEQ ID NO: 40499
  derived and/or modified CDS sequence (wt) from hemagglutinin__InfluenzaA__AFG99622

SEQ ID NO: 40612 - RNA, 1701 nt, Artificial Sequence; identical to SEQ ID NO: 40499
  derived and/or modified CDS sequence (wt) from hemagglutinin__InfluenzaA__AFG99633

SEQ ID NO: 40613 - RNA, 1701 nt, Artificial Sequence
  derived and/or modified CDS sequence (wt) from hemagglutinin__InfluenzaA__AFG99644
augaagacuaucauugcuuugagcuacauuuuaugucugguuuucgcccaaaaacuucccggaaaugacaacagcacagcaacgcugugccuggggcaucaugcagugccaaacggaacgcuaguaaaaacaaucacgaaugaucaaauugaagugacuaaugcuacugagcugguucagaauuccucaacagguagaauaugcgacaguccucaccgaauccuugauggaaaaaacugcacacugauagaugcucuauugggagacccucauugugaugacuuccaaaauaaggaaugggaccuuuuuguugaacgcagcaaagcuuacagcaacuguuacccuuaugaugugccggauuaugccucccuuaggucacuaguugccgcaucaggcacccuggaguuuaucaaugaagacuucaauuggacuggagucgcucagaguggggaaagcuaugcuugcaaaaggggaucuguuaaaaguuucuuuaguagauugaauugguugcacgaaucagaauacaaauauccagcgcugaacgugaccaugccaaacaauggcaaauuugacaaauuguacauuugggggguucaccacccgagcacggacagagaacaaaccagccuauauguucgagcaucagggagagucacagucucuaccaaaagaagccaacaaacuguaaucccgaauaucggguccagacccuggguaaggggucuguccaguagaauaagcaucuauuggacaauaguaaaaccgggagacauacuuuugauuaauagcaccgggaaccuaauugcuccucgggguuacuucaaaauacgaacugggaaaagcucgauaaugaggucagaugcacccauuggcaccugcaguucugaaugcaucacuccaaauggaagcauccccaaugacaaaccuuuucaaaauguaaacaggaucacauauggggcaugucccagauauguuaagcaaaacacucugaaauuggcaacagggaugcggaauguaccagagaaacaaacuagagguauauucggcgcaauugcagguuucauagaaaaugguugggagggaaugguagacgguugguacgguuucaggcaucaaaauucugagggcacaggacaagcagcagaucuuaaaagcacucaagcagcaaucgaccaaaucaacgggaaacugaauagguuaaucgagaaaacgaacgagaaauuccaucaaaucgaaaaggaauucucagaaauagaagggagaauucagaaccucgagaaauauguugaagacacuaaaauagaucucuggucuuacaacgcggagcuucuuguugcccuagagaaccaacauacaauugaucugacugacucagaaaugaacaaacuguuugaaaaaacaaggaagcaacugagggaaaaugcugaggacaugggcaaugguugcuucaaaauauaccacaaaugugacaaugccugcauagggucaaucagaaauggaacuuaugaccaugauguauacagagacgaagcauuaaacaaccgguuccagaucaaaggugucgagcugaagucaggauacaaagauuggauccuauggauuuccuuugccauaucaugcuuuuugcuuuguguuguuuugcugggguucaucaugugggccugccaaaaaggcaacauuaggugcaacauuugcauuuga

SEQ ID NO: 40614 - RNA, 1701 nt, Artificial Sequence
  derived and/or modified CDS sequence (wt) from hemagglutinin__InfluenzaA__AFG99655
augaagacuaucauugcuuugagcuacauuuuaugucugguuuucgcccaaaaacuucccggaaaugacaacagcacagcaacgcugugccuggggcaucaugcagugccaaacggaacgcuaguaaaaacaaucacgaaugaucaaauugaagugacuaaugcuacugagcugguucagaauuccucaacagguagaauaugcgacaguccucaccgaauccuugauggaaaaaacugcacacugauagaugcucuauugggagacccucauugugaugacuuccaaaauaaggaaugggaccuuuuuguugaacgcagcaaagcuuacagcaacuguuacccuuaugaugugccggauuaugccucccuuaggucacuaguugccucaucaggcacccuggaguuuaucaaugaagacuucaauuggacuggagucgcucagaguggggaaagcuaugcuugcaaaaggggaucuguuaaaaguuucuuuaguagauugaauugguugcacgaaucagaauacaaauauccagcgcugaacgugaccaugccaaacaauggcaaauuugacaaauuguacauuugggggguucaccacccgagcacggacagagaacaaaccagccuauauguucgagcaucagggagagucacagucucuaccaaaagaagccaacaaacuguaaucccgaauaucggguccagacccuggguaaggggacuguccaguagaauaagcaucuauuggacaauaguaaaaccgggagacauacuuuugauuaauagcaccgggaaccuaauugcuccucgggguuacuucaaaauacgaacugggaaaagcucgauaaugaggucagaugcacccauuggcaccugcaguucugaaugcaucacuccaaauggaagcauccccaaugacaaaccuuuucaaaauguaaacaggaucacauauggggcaugucccagauauguuaagcaaaacacucugaaauuggcaacagggaugcggaauguaccagagaaacaaacuagagguauauucggcgcaauugcagguuucauagaaaaugguugggagggaaugguagacgguugguacgguuucaggcaucaaaauucugagggcacaggacaagcagcagaucuuaaaagcacucaagcagcaaucgaccaaaucaacgggaaacugaauagguuaaucgagaaaacgaacgagaaauuccaucaaaucgaaaaggaauucucagaaauagaagggagaauucaggaccucgagaaauauguugaagacacuaaaauagaucucuggucuuacaacgcggagcuucuuguugcccuagagaaccaacauacaauugaucugacugacucagaaaugaacaaacuguuugaaaaaacaaggaagcaacugagggaaaaugcugaggacaugggcaaugguugcuucaaaauauaccacaaaugugacaaugccugcauagggucaaucagaaauggaacuuaugaccaugauguauacagagacgaagcauuaaacaaccgguuccagauaaaaggugucgagcugaagucaggauacaaagauuggauccuauggauuuccuuugccauaucaugcuuuuugcuuuguguuguuuugcugggguucaucaugugggccugccaaaaaggcaacauuaggugcaacauuugcauuuga

SEQ ID NO: 40615 - RNA, 1701 nt, Artificial Sequence
  derived and/or modified CDS sequence (wt) from hemagglutinin__InfluenzaA__AFG99666
augaagacuaucauugcuuugagcuacauuuuaugucugguuuucgcccaaaaacuucccggaaaugacaacagcacagcaacgcugugccuggggcaucaugcagugccaaacggaacgcuaguaaaaacaaucacgaaugaucaaauugaagugacuaaugcuacugagcugguucagaauuccucaacagguagaauaugcgacaguccucaccgaauccuugauggaaaaaacugcacacugauagaugcucuauugggagacccucauugugaugacuuccaaaauaaggaaugggaccuuuuuguugaacgcagcaaagcuuacagcaacuguuacccuuaugaugugccggauuaugccucccuuaggucacuaguugccucaucaggcacccuggaguuuaucaaugaagacuucaauuggacuggagucgcucagaguggggaaagcuaugcuugcaaaaggggaucuguuaaaaguuucuuuaguagauugaauugguugcacgaaucagaauacaaauauccagcgcugaacgugaccaugccaaacaauggcaaauuugacaaauuguacauuugggggguucaccacccgagcacggacagagaacaaaccagccuauauguucgagcaucagggagagucacagucucuaccaaaagaagccaacaaacuguaaucccgaauaucggguccagacccuggguaaggggucuguccaguagaauaagcaucuauuggacaauaguaaaaccgggagacauacuuuugauuaauagcaccgggaaccuaauugcuccucgggguuacuucaaaauacgaacugggaaaagcucgauaaugaggucagaugcacccauuggcaccugcaguucugaaugcaucacuccaaauggaagcauccccaaugacaaaccuuuucaaaauguaaacaggaucacauauggggcaugucccagauauguuaagcaaaacacucugaaauuggcaacagggaugcggaauguaccagagaaacaaacuagagguauauucggcgcaauugcagguuucauagaaaaugguugggagggaaugguagacgguugguacgguuucaggcaucaaaauucugagggcacaggacaagcagcagaucuuaaaagcacucaagcagcaaucgaccaaaucaacgggaaacugaauagguuaaucgagaaaacgaacgagaaauuccaucaaaucgaaaaggaauucucagaaauagaagggagaauucaggaccucgagaaauauguugaagacacuaaaauagaucucuggucuuacaacgcggagcuucuuguugcccuagagaaccaacauacaauugaucugacugacucagaaaugaacaaacuguuugaaaaaacaaggaagcaacugagggaaaaugcugaggacaugggcaaugguugcuucaaaauauaccacaaaugugacaaugccugcauagggucaaucagaaauggaacuuaugaccaugauguauacagagacgaagcauuaaacaaccgguuccagauaaaaggugucgagcugaagucaggauacaaagauuggauccuauggauuuccuuugccauaucaugcuuuuugcuuuguguuguuuugcugggguucaucaugugggccugccaaaaaggcaacauuaggugcaacauuugcauuuga

SEQ ID NO: 40616 - RNA, 1701 nt, Artificial Sequence; identical to SEQ ID NO: 34350
  derived and/or modified CDS sequence (wt) from hemagglutinin__InfluenzaA__AFG99677

SEQ ID NO: 40617 - RNA, 1701 nt, Artificial Sequence; identical to SEQ ID NO: 40499
  derived and/or modified CDS sequence (wt) from hemagglutinin__InfluenzaA__AFG99688

SEQ ID NO: 40618 - RNA, 1701 nt, Artificial Sequence
  derived and/or modified CDS sequence (wt) from hemagglutinin__InfluenzaA__AFG99701
augaagacuaucauugcuuugagcuacauuuuaugucugguuuucgcccaaaaacuucccggaaaugacaacagcacagcaacgcugugccugggacaucaugcagugccaaacggaacgcuagugaaaacaaucacgaaugaucaaauugaagugacuaaugcuacugagcugguucagaguuccucaacagguagaauaugugacaguccucaccgaauccuugauggaaaaaauugcacacugauagaugcucuauugggagacccucauugugauggcuuccaaaauaaggaaugggaccuuuuuguugaacgcagcaacgcuuacagcaacuguuacccuuaugaugugccggauuaugccucccuuaggucacuaguugccucaucaggcacccuggaguuuaccaaugaagacuucaauuggacuggagucgcucagaguggggaaagcuaugcuugcaaaaggggaucuguuaaaaguuucuuuaguagauugaauugguugcacgaaucagauuacaaauauccagcgcugaacgugacuaugccaaacaauggcaaauuugacaaauuguacauuugggggguucaccacccgagcacggacagagaacaaaccagccuauauguucgagcaucagggagagucacagucuccaccaaaagaagccaacaaacugugaucccgaauaucggguccagacccuggguaaggggucuguccaguagaauaagcaucuauuggacaauagugaaaccgggagacauacuuuugauuaauagcaccgggaaccuaauugcuccucgggguuacuucaaaauacgaacugggaaaagcucgauaaugagaucagaugcacccauuggcaccugcaguucugaaugcaucacuccaaauggaagcauccccaaugacaaaccuuuucaaaacguaaacaggaucacauauggggcaugucccagauauguuaagcaaaacacucugaaauuggcaacagggaugcggaauguaccagagaaacaaacuagaggcauauucggcgcaaucgcagguuucauagaaaaugguugggagggaaugguagacgguugguacgguuucaggcaucaaaauucugagggcacaggacaagcagcagaucuuaaaagcacucaagcagcaaucgaccaaaucaacgggaaacugaauagguuaaucgagaaaacgaacgagaaauuccaucaaaucgaaaaggaauucucagaaguagaagggagaauucaggaccucgagaaauauguugaagacacuaaaauagaucucuggucuuacaacgcggagcuucuuguugcccuggagaaccaacauacaauugaucugacugacucagaaaugaacaaacuguuugaaaaaacaaggaagcaacugagggaaaaugcugaggacaugggcaaugguugcuucaaaauauaccacaaaugugacaaugccugcauagggucaaucagaaauggaaccuaugaccaugauguauacagagacgaagcauuaaacaaccgguuccagaucaaaggugcugagcugaagucaggauacaaagauuggauccuauggauuuccuuugccauaucaugcuuuuugcuuuguguuguuuugcugggguucaucaugugggccugccaaaaaggcaacauuaggugcaacauuugcauuuga

SEQ ID NO: 40619 - RNA, 1701 nt, Artificial Sequence
  derived and/or modified CDS sequence (wt) from hemagglutinin__InfluenzaA__AFG99712
augaagacuaucauugcuuugagcuacauuuuaugucugguuuucgcccaaaaacuucccggaaaugacaacagcacagcaacgcugugccugggacaucaugcagugccaaacggaacgcuagugaaaacaaucacgaaugaucaaauugaagugacuaaugcuacugagcugguucagaguuccucaacagguagaauaugugacaguccucaccgaauccuugauggaaaaaauugcacacugauagaugcucuauugggagacccucauugugauggcuuccaaaauaaggaaugggaccuuuuuguugaacgcagcaaagcuuacagcaacuguuacccuuaugaagugccggauuaugccucccuuaggucacuaguugccucaucaggcacccuggaguuuaccaaugaagacuucaauuggacuggagucgcucagaguggggaaagcuaugcuugcaaaaggggaucuguuaaaaguuucuuuaguagauugaauugguugcacgaaucagauuacaaauauccagcgcugaacgugacuaugccaaacaauggcaaauuugacaaauuguacauuugggggguucaccacccgagcacggacagagaacaaaccagccuauauguucgagcaucagggagagucacagucuccaccaaaagaagccaacaaacugugaucccgaauaucggguccagacccuggguaaggggucuguccaguagaauaagcaucuauuggacaauagugaaaccgggagacauacuuuugauuaauagcaccgggaaccuaauugcuccucgggguuacuucaaaauacgaacugggaaaagcucgauaaugagaucagaugcacccauuggcaccugcaguucugaaugcaucacuccaaauggaagcauccccaaugacaaaccuuuucaaaacguaaacaggaucacauauggggcaugucccagauauguuaagcaaaacacucugaaauuggcaacagggaugcggaauguaccagagaaacaaacuagaggcauauucggcgcaaucgcagguuucauagaaaaugguugggagggaaugguagacgguugguacgguuucaggcaucaaaauucugagggcacaggacaagcagcagaucuuaaaagcacucaagcagcaaucgaccaaaucaacgggaaacugaauagguuaaucgagaaaacgaacgagaaauuccaucaaaucgaaaaggaauucucagaaguagaagggagaauucaggaccucgagaaauauguugaagacacuaaaauagaucucuggucuuacaacgcggagcuucuuguugcccuggagaaccaacauacaauugaucugacugacucagaaaugaacaaacuguuugaaaaaacaaggaagcaacugagggaaaaugcugaggacaugggcaaugguugcuucaaaauauaccacaaaugugacaaugccugcauagggucaaucagaaauggaaccuaugaccaugauguauacagagacgaagcauuaaacaaccgguuccagaucaaagguguugagcugaagucaggauacaaagauuggauccuauggauuuccuuugccauaucaugcuuuuugcuuuguguuguuuugcugggguucaucaugugggccugccaaaaaggcaacauuaggugcaacauuugcauuuga

SEQ ID NO: 40620 - RNA, 1701 nt, Artificial Sequence; identical to SEQ ID NO: 40501
  derived and/or modified CDS sequence (wt) from hemagglutinin__InfluenzaA__AFG99723

SEQ ID NO: 40621 - RNA, 1701 nt, Artificial Sequence; identical to SEQ ID NO: 40615
  derived and/or modified CDS sequence (wt) from hemagglutinin__InfluenzaA__AFG99734

SEQ ID NO: 40622 - RNA, 1701 nt, Artificial Sequence
  derived and/or modified CDS sequence (wt) from hemagglutinin__InfluenzaA__AFG99745
augaagacuaucauugcuuugagcuacauuuuaugucugguuuucgcccaaaaacuucccggaaaugacaacagcacagcaacgcugugccuggggcaucaugcagugccaaacggaacucuagugaaaacaaucacgaaugaucaaauugaagugacuaaugcuacugagcugguucagaguuccucaacagguagaauaugcgacaguccucaccgaauccuugauggaaaaaacugcacacugauagaugcucuauugggagacccucauugugauggcuuccaaaauaaggaaugggaccuuuuuguugaacgcagcaaagcuuacagcaacuguuacccuuaugaugugccagauuaugccucccuuaggucacuaguugccucaucaggcacccuggaguuuaucaaugaagacuucaauuggacuggagucgcucagaguggggacagcuaugcuugcaaaaggggaucuguuaaaaguuucuuuaguagauugaauugguugcacgaaucagaauacaaauauccagcgcugaacgugacuaugccaaacaaugacaaauuugacaaguuguacauuugggggguucaccacccgagcacggaaagagaacaaaccagccuauauauucgagcaucagggagagucacagucucuaccaaaagaagccaacaaacuguaaucccgaauaucggguccaaacccuggguaaggggucuguccaguagaauaagcaucuauuggacaauaguaaaaccgggagacauacuuuugauuaauagcaccgggaaccuaauugcuccucgggguuacuucaaaauacgaacugggaaaagcucgauaaugaggucagaugcacccauuggcaccugcaguucugaaugcaucacuccaaauggaagcauccccaaugacaaaccuuuucaaaauguaaacaggaucacauauggggcaugucccagauauguuaagcaaaacacucugaaauuggcaacagggaugcggaauguaccagagaaacaaacuagaggcauauucggcgcaauugcagguuucauagaaaaugguugggagggaaugguagacgguugguacgguuucaggcaucaaaauucugagggcacaggacaagcagcagaucuuaaaagcacucaagcagcaaucgaccaaaucaacgggaaacugaauagguuaaucgagaaaacgaacgagaaauuccaucaaaucgaaaaggaauucucagaaguagaagggagaauucaggaccucgagaaauauguugaagacacuaaaauagaucucuggucuuacaacgcggagcuucuuguugcccuggagaaccaacauacaauugaucugacugacucagaaaugaacaaacuguuugagaaaacaaggaagcaacugagggaaaaugcugaggacaugggcaaugguugcuucaaaauauaccacaaaugugacaaugccugcauggggucaaucagaaauggaacuuaugaccaugauguauacagagacgaagcauuaaacaaccgguuccagaucaaagguguugagcugaagucaggauacaaagauuggauccuauggauuuccuuugccauaucaugcuuuuugcuuuguguuguuuugcugggguucaucaugugggccugccaaaaaggcaacauuaggugcaacauuugcauuuga

SEQ ID NO: 40623 - RNA, 1701 nt, Artificial Sequence; identical to SEQ ID NO: 40501
  derived and/or modified CDS sequence (wt) from hemagglutinin__InfluenzaA__AFG99756

SEQ ID NO: 40624 - RNA, 1701 nt, Artificial Sequence
  derived and/or modified CDS sequence (wt) from hemagglutinin__InfluenzaA__AFG99767
augaagacuaucauugcuuugagcuacaucuuaugucugguuuucgcccaaaaacuucccggaaaugacaacagcacagcaacgcugugccuggggcaucaugcagugccaaacggaacucuagugaaaacaaucacgaaugaucaaauugaagugacuaaugcuacugagcugguucagaguuccucaacagguagaauaugcgacaguccucaccgaauccuugauggaaaaaacugcacacugauagaugcucuauugggagacccucauugugaugacuuccaaaauaaggaaugggaccuuuuuguugaacgcagcaaagcuuacagcaacuguuacccuuaugaugugccagauuaugccucccuuaggucacuaguugccucaucaggcacccuggaauuuaucaaugaagacuucaauuggacuggagucgcucagaguggggaaagcuaugcuugcaaaaggggaucuguuaaaaguuucuuuaguagauugaauugguugcacgaaucagaauacaaauauccagcgcugaacgugacuaugccaaacaaugacaaauuugacaaauuguacauuugggggguucaccacccgagcacggacagagaacaaaccagccuauauauucgagcaucagggagagucacagucucuaccaaaagaagccaacaaacuguaaucccgaauaucggguccagacccuggguaaggggucuguccaguagaauaagcaucuauuggacaauaguaaaaccgggagacauacuuuugauuaauagcaccgggaaccuaauugcuccuagggguuacuucaaaauacgaacugggaaaagcucgauaaugaggucagaugcacccauuggcaccugcaguucugaaugcaucacuccaaauggaagcauccccaaugacaaaccuuuucaaaauguaaacaggaucacauauggggcaugucccagauauguuaagcaaaacacucugaaauuggcaacagggaugcggaauguaccagagaaacaaacuagaggcauauucggcgcaauugcagguuucauagaaaaugguugggagggaaugguagacgguugguacgguuucaggcaucaaaauucugagggcacaggacaagcagcagaucuuaaaagcacucaagcagcaaucgaccaaaucaacgggaaacugaauagguuaauagagaaaacgaacgagaaauuccaucaaaucgaaaaggaauucucagaaguagaagggagaauucaggaucucgagaaauauguugaagacacuaaaauagaucucuggucuuacaacgcggagcuucuuguugcccuggagaaccaacauacaauugaucugacugacucagaaaugaacaaacuguuugaaaaaacaaggaagcaacugagggaaaaugcugaggacaugggcaaugguugcuucaaaauauaccacaaaugugacaaugccugcauagggucaaucagaaauggaacuuaugaccaugauguauacagagacgaagcauuaaacaaccgguuccagaucaaagguguugagcugaagucaggauacaaagauuggauccuauggauuuccuuugccauaucaugcuuuuugcuuuguguuguuuugcugggguucaucaugugggccugccaaaaaggcaacauuaggugcaacauuugcauuuga

SEQ ID NO: 40625 - RNA, 1701 nt, Artificial Sequence
  derived and/or modified CDS sequence (wt) from hemagglutinin__InfluenzaA__AFG99778
augaagaccaucauugcuuugagcuacauuuuaugucugguuuucgcucaaaaacuucccggaaaugacaacagcacagcaacgcuaugccugggacaucaugcagugccaaacggaacgcuagugaaaacacucacgaaugaucaaauugaagugacuaaugcuacugagcugguucagaguuccucaacagguaaaauaugcgacaguccucaccgaauccuugauggaaaaaacugcacacugauagaugcucuauugggagacccucauugugauggccuccaaaauaaggaaugggaccuuuuuguugaacgcagcaaagcuuacagcaacuguuacccuuaugaugugccggauuaugccucccuuaggucacuaguugccucaucaggcacccuggaguuuaucaaugaagacuucaauuggacuggagucgcucaggaugggggaagcuaugcuugcaaaaggggaucuguuaacaguuucuuuaguagauugaauugguugcacaaaucagaauacaaauauccagcgcugaacgugacuaugccaaacaauggcaaaguugacaaauuguacauuugggggguucaccacccgagcacggacagagaccaaaccagccuauauguucgagcaucagggagagucacagucucuaccaaaagaagccaacaaacuguaaucccgaauaucgggucuagacccuggguaaggggucaguccaguagaauaagcaucuauuggacaauaguaaaaccgggagacauacuuuugauuaauagcaccgggaaccuaauugcuccucgggguuacuucaaaauacgaaaugggaaaagcucaauaaugaggucagaugcacccauuggcaccugcaguucugaaugcaucacuccaaauggaagcauucccaaugacaaaccuuuucaaaauguaaacaggaucacauauggggcaugucccagauauguuaagcaaaacacucugaaauuggcaacagggaugcggaauguaccagagaaacaaacuagaggcauauucggcgcaaucgcagguuucauagaaaaugguugggagggaaugguagacgguugguacgguuucaggcaucaaaauucugagggcacaggacaagcagcagaucuuaaaagcacucaagcagcaaucgaccaaaucaacgggaaacugaauagguuaaucgagaaaacgaacgagaaauuccaucaaaucgaaaaggaauucucagaaguagaagggagaauucaggaccucgagaaauauguugaagacacuaaaauagaucucuggucuuacaacgcggagcuucuuguugcccuggagaaccaacauacaauugaucugacugacucagaaaugaacaaacuguuugaaaaaacaaggaagcaacugagggaaaaugcugaggacaugggcaaugguugcuucaaaauauaccacaaaugugacaaugccugcauagggucaaucagaaauggaacuuaugaccaugauguauacagagacgaagcauuaaacaaccgguuccagaucaaagguguugagcugaagucaggauacaaagauuggauccuauggauuuccuuugccauaucaugcuuuuugcuuuguguuguucugcugggguucaucaugugggccugccaaaaaggcaacauuaggugcaacauuugcauuuaa

SEQ ID NO: 40626 - RNA, 1701 nt, Artificial Sequence
  derived and/or modified CDS sequence (wt) from hemagglutinin__InfluenzaA__AFG99789
augaagacuaucauugcuuugagcuacauuuuaugucugguuuucgcccaaaaacuucccggaaaugacaacagcacagcaacgcugugccugggacaucaugcagugccaaacggaacgcuagugaaaacaaucacgaaugaucaaauugaagugacuaaugcuacugagcugguucagaguuccucaacagguagaauaugugacaguccucaccgaauccuugauggaaaaaauugcacacugauagaugcucuauugggagacccucauugugauggcuuccaaaauaaggaaugggaccuuuuuguugaacgcagcaaagcuuacagcaacuguuacccuuaugaugugccggauuaugccucccuuaggucacuaguugccucaucaggcacccuggaguuuaccaaugaagacuucaauuggacuggagucgcucagaguggggaaagcuaugcuugcaaaaggggaucuguuaaaaguuucuuuaguagauugaauugguugcacgaaucagauuacaaauauccagcgcugaacgugacuaugccaaacaauggcaaauuugacaaauuguacauuugggggguucaccacccgagcacggacagagaacaaaccagccuauauguucgagcaucagggagagucacagucuccaccaaaagaagccaacaaacugugaucccgaauaucggguccagacccuggguaaggggucuguccaguagaauaagcaucuauuggacaauagugaaaccgggagacauacuuuugauuaauagcaccgggaaccuaauugcuccucgggguuacuucaaaauacgaacugggaaaagcucgauaaugagaucagaugcacccauuggcaccugcaguucugaaugcaucacuccaaauggaagcauccccaaugacaaaccuuuucaaaacguaaacaggaucacauauggggcaugucccagauauguuaagcaaaacacucugaaauuggcaacagggaugcggaauguaccagagaaacaaacuagaggcauauucggugcaaucgcagguuucauagaaaaugguugggagggaaugguagacgguugguacgguuucaggcaucaaaauucugagggcacaggacaagcagcagaucuuaaaagcacucaagcagcaaucgaccaaaucaacgggaaacugaauagguuaaucgagaaaacgaacgagaaauuccaucaaaucgaaaaggaauucucagaaguagaagggagaauucaggaccucgagaaauauguugaagacacuaaaauagaucucuggucuuacaacgcggagcuucuuguugcccuggagaaccaacauacaauugaucugacugacucagaaaugaacaaacuguuugaaaaaacaaggaagcaacugagggaaaaugcugaggacaugggcaaugguugcuucaaaauauaccacaaaugugacaaugccugcauagggucaaucagaaauggaaccuaugaccaugauguauacagagacgaagcauuaaacaaccgguuccagaucaaagguguugagcugaagucaggauacaaagauuggauccuauggauuuccuuugccauaucaugcuuuuugcuuuguguuguuuugcugggguucaucaugugggccugccaaaaaggcaacauuaggugcaacauuugcauuuga

SEQ ID NO: 40627 - RNA, 1701 nt, Artificial Sequence
  derived and/or modified CDS sequence (wt) from hemagglutinin__InfluenzaA__AFG99800
augaagacuaucauugcuuugagcuacauuuuaugucugguuuucgcacaaaaacuucccggaaaugacaacagcacagcaacgcugugccuggggcaucaugcagugccaaacggaacgcuaguaaaaacaaucacgaaugaucaaauugaagugacuaaugcuacugagcugguucagaauuccucaacagguagaauaugcgacaguccucaccgaauccuugauggaaaaaacugcacacugauagaugcucuauugggagacccucauugugaugacuuccaaaauaaggaaugggaccuuuuuguugaacgcagcaaagcuuacagcaacuguuacccuuaugaugugccggauuaugccucccuuaggucacuaguugccucaucaggcacccuggaguuuaucaaugaagacuucaauuggacuggagucgcucagaguggggaaagcuaugcuuguaaaaggggaucuguuaaaaguuucuuuaguagauugaauugguugcacgaaucagaauacaaauauccagcgcugaacgugaccaugccaaacaauggcaaauuugacaaauuguacauuugggggguucaccacccgagcacggacagagaacaaaccagccuauauguucgagcaucagggagagucacagucucuaccaaaagaagccaacaaacuguaaucccgaauaucggguccagacccuggguaaggggucuguccaguagaauaagcaucuauuggacaauaguaaaaccgggagacauacuuuugauuaauagcaccgggaaccuaauugcuccucgggguuacuucaaaauacgaacugggaaaagcucgauaaugaggucagaugcacccauuggcaccugcaguucugaaugcaucacuccaaauggaagcauccccaaugacaaaccuuuucaaaauguaaacaggaucacauauggggcaugucccagauaugugaagcaaaacacucugaaauuggcaacagggaugcggaauguaccagagaaacaaacuagagguauauucggcgcaauugcagguuucauagaaaaugguugggagggaaugguagacgguugguacgguuucaggcaucaaaauucugagggcacaggacaagcagcagaucuuaaaagcacccaagcagcaaucgaccaaaucaacgggaaacugaauagguuaaucgagaaaacgaacgagaaauuccaucaaaucgaaaaggaauucucagaaauagaagggagaauucaggaccucgagaaauauguugaagacacuaaaauagaucucuggucuuacaacgcggagcuucuuguugcccuagagaaccaacauacaauugaucugacugacucagaaaugaacaaacuguuugaaaaaacaaggaagcaacugagggaaaaugcugaggacaugggcaaugguugcuucaaaauauaccacaaaugugacaaugccugcauagggucaaucagaaauggaacuuaugaccaugauguauacagagacgaagcauuaaacaaccgguuccagauaaaaggugucgagcugaagucaggauacaaagauuggauccuauggauuuccuuugccauaucaugcuuuuugcuuuguguuguuuugcugggguucaucaugugggccugccaaaaaggcaacauuaggugcaacauuugcauuuga

SEQ ID NO: 40628 - RNA, 1701 nt, Artificial Sequence
  derived and/or modified CDS sequence (wt) from hemagglutinin__InfluenzaA__AFG99811
augaagacuaucauugcuuugagcuacauuuuaugucugguuuucucccaaaaacuucccggaaaugacaacagcacagcaacgcugugccuggggcaucaugcagugccaaacggaacgcuaguaaaaacaaucacgaaugaucaaauugaagugacuaaugcuacugagcugguucagaauuccucaacagguagaauaugcgacaguccucaccgaauccuugauggaaaaaacugcacacugauagaugcucuauugggagacccucauugugaugacuuccaaaauaaggaaugggaccuuuuuguugaacgcagcaaagcuuacagcaacuguuacccuuaugaugugccggauuaugccucccuuaggucacuaguugccucaucaggcacccuggaguuuaucaaugaagacuucaauuggacuggagucgcucagaguggggaaagcuaugcuugcaaaaggggaucuguuaaaaguuucuuuaguagauugaauugguugcacgaaucagaauacaaauauccagcgcugaacgugaccaugccaaacaauggcaaauuugacaaauuguacauuugggggguucaccacccgagcacggacagagaacaaaccagccuauauguucgagcaucagggagagucacagucucuaccaaaagaagccaacaaacuguaaucccgaauaucggguccagacccuggguaaggggucuguccaguagaauaagcaucuauuggacaauaguaaaaccgggagacauacuuuugauuaauagcaccgggaaccuaauugcuccucgggguuacuucaaaauacgaacugggaaaagcucgauaaugaggucagaugcacccauuggcaccugcaguucugaaugcaucacuccaaauggaagcauccccaaugacaaaccuuuucaaaauguaaacaggaucacauauggggcaugucccagauauguuaagcaaaacacucugaaauuggcaacagggaugcggaauguaccagagaaacaaacuagagguauauucggcgcaauugcagguuucauagaaaaugguugggagggaaugguagacgguugguacgguuucaggcaucaaaauucugagggcacaggacaagcagcagaucuuaaaagcacucaagcagcaaucgaccaaaucaacgggaaacugaauagguuaaucgagaaaacgaacgagaaauuccaucaaaucgaaaaggaauucucagaaauagaagggagaauucaggaccucgagaaauauguugaagacacuaaaauagaucucuggucuuacaacgcggagcuucuuguugcccuagagaaccaacauacaauugaucugacugacucagaaaugaacaaacuguuugaaaaaacaaggaagcaacugagggaaaaugcugaggacaugggcaaugguugcuucaaaauauaccacaaaugugacaaugccugcauagggucaaucagaaauggaacuuaugaccaugauguauacagagacgaagcauuaaacaaccgguuccagaucaaaggugucgagcugaagucaggauacaaagauuggauccuauggauuuccuuugccauaucaugcuuuuugcuuuguguuguuuugcugggguucaucaugugggccugccaaaaaggcaacauuaggugcaacauuugcauuuga

SEQ ID NO: 40629 - RNA, 1701 nt, Artificial Sequence
  derived and/or modified CDS sequence (wt) from hemagglutinin__InfluenzaA__AFG99822
augaagacuaucauugcuuugagcuacauuuuaugucugguuuucgcccaaaaacuucccggaaaugacaacagcacagcaacgcugugccugggacaucaugcagugccaaacggaacgcuagugaaaacaaucacgaaugaucaaauugaagugacuaaugcuacugagcugguucagaguuccucaacagguagaauaugugacaguccucaccgaauccuugauggaaaaaauugcacacugauagaugcucuauugggagacccucauugugauggcuuccaaaauaaggaaugggaccuuuuuguugaacgcagcaaagcuuacagcaacuguuacccuuaugaugugccggauuaugccucccuuaggucacuaguugccucaucaggcacccuggaguuuaccaaugaagacuucaauuggacuggagucgcucagaguggggaaagcuaugcuugcaaaaggggaucuguuaaaaguuucuuuaguagauugaauugguugcacgaaucagauuacaaauauccagcgcugaacgugacuaugccaaacaauggcaaauuugacaaauuguacauuugggggguucaccacccgagcacggacagagaacaaaccagccuauauguucgagcaucagggagagucacagucuccaccaaaagaagccaacaaacugugaucccgaauaucggguccagacccuggguaaggggucuguccaguagaauaagcaucuauuggacaauagugaaaccgggagacauacuuuugauuaauagcaccgggaaccuaauugcuccucgggguuacuucaaaauacgaacugggaaaagcucgauaaugagaucagaugcacccauuggcaccugcaguucugaaugcaucacuccaaauggaagcauccccaaugacaaaccuuuucaaaacguaaacaggaucacauauggggcaugucccagauauguuaagcaaaacacucugaaauuggcaacagggaugcggaauguaccagagaaacaaacuagaggcauauucggcgcaaucgcagguuucauagaaaaugguugggagggaaugguagacgguugguacgguuucaggcaucaaaacucugagggcacaggacaagcagcagaucuuaaaagcacucaagcagcaaucgaccaaaucaacgggaaacugaauagguuaaucgagaaaacgaacgagaaauuccaucaaaucgaaaaggaauucucagaaguagaagggagaauucaggaccucgagaaauauguugaagacacuaaaauagaucucuggucuuacaacgcggagcuucuuguugcccuggagaaccaacauacaauugaucugacugacucagaaaugaacaaacuguuugaaaaaacaaggaagcaacugagggaaaaugcugaggacaugggcaaugguugcuucaaaauauaccacaaaugugacaaugccugcauagggucaaucagaaauggaaccuaugaccaugauguauacagagacgaagcauuaaacaaccgguuccagaucaaagguguugagcugaagucaggauacaaagauuggauccuauggauuuccuuugccauaucaugcuuuuugcuuuguguuguuuugcugggguucaucaugugggccugccaaaaaggcaacauuaggugcaacauuugcauuuga

SEQ ID NO: 40630 - RNA, 1701 nt, Artificial Sequence; identical to SEQ ID NO: 40629
  derived and/or modified CDS sequence (wt) from hemagglutinin__InfluenzaA__AFG99833

SEQ ID NO: 40631 - RNA, 1701 nt, Artificial Sequence
  derived and/or modified CDS sequence (wt) from hemagglutinin__InfluenzaA__AFG99844
augaagacuaucauugcuuugagcuacauuuuaugucugguuuucgcccaaaaacuucccggaaaugacaacagcacagcaacgcugugccugggacaucaugcagugccaaacggaacgcuagugaaaacaaucacgaaugaucaaauugaagugacuaaugcuacugagcugguucagaguuccucaacagguagaauaugugacaguccucaccgaauccuugauggaaaaaauugcacacugauagaugcucuauugggagacccucauugugauggcuuccaaaauaaggaaugggaccuuuuuguugaacgcagcaaagcuuacagcaacuguuacccuuaugaugugccggauuaugccucccuuaggucacuaguugccucaucaggcacccuggaguuuaccaaugaagacuucaauuggacuggagucgcucagaguggggaaagcuaugcuugcaaaaggggaucuguuaaaaguuucuuuaguagauugaauugguugcacgaaucagauuacaaauauccagcgcugaacgugacuaugccaaacaauggcaaauuugacaaauuguacauuugggggguucaccacccgagcacggacagagaacaaaccagccuauauguucgagcaucagggagagucacagucuccaccaaaagaagccaacaaacugugaucccgaauaucggguccagacccuggguaaggggucuguccaguagaauaagcaucuauuggacaauagugaaaccgggagacauacuuuugauuaauagcaccgggaaccuaauugcuccucgggguuacuucaaaauacgaacugggaaaagcucgauaaugagaucagaugcacccauuggcaccugcaguucugaaugcaucacuccaaauggaagcauccccaaugacaaaccuuuucaaaacguaaacaggaucacauauggggcaugucccagauauguuaagcaaaacacucugaaauuggcaacagggaugcggaauguaccagagaaacaaacuagaggcauauucggcgcaaucgcagguuucauagaaaaugguugggagggaaugguagacgguugguacgguuucaggcaucaaaacucugagggcacaggacaagcagcagaucuuaaaagcacucaagcagcaaucgaccaaaucaacgggaaacugaauagguuaaucgagaaaacgaacgagaaauuccaucaaaucgaaaaggaauucucagaaguagaagggagaauucaggaccucgagaaauauguugaagacacuaaaauagaucucuggucuuacaacgcggagcuucuuguugcccuggagaaccaacauacaauugaucugacugacucagaaaugaacaaacuguuugaaaaaacaaggaagcagcugagggaaaaugcugaggacaugggcaaugguugcuucaaaauauaccacaaaugugacaaugccugcauagggucaaucagaaauggaaccuaugaccaugauguauacagagacgaagcauuaaacaaccgguuccagaucaaagguguugagcugaagucaggauacaaagauuggauccuauggauuuccuuugccauaucaugcuuuuugcuuuguguuguuuugcugggguucaucaugugggccugccaaaaaggcaacauuaggugcaacauuugcauuuga

SEQ ID NO: 40632 - RNA, 1701 nt, Artificial Sequence
  derived and/or modified CDS sequence (wt) from hemagglutinin__InfluenzaA__AFG99855
augaagacuaucauugcuuugagcuacauuuuaugucugguuuucgcccaaaaacuucccggaaaugacaacagcacagcaacgcugugccugggacaucaugcagugccaaacggaacgcuagugaaaacaaucacgaaugaucaaauugaagugacuaaugcuacugagcugguucagaguuccucaacagguagaauaugugacaguccucaccgaauccuugauggaaaaaauugcacacugauagaugcucuauugggagacccucauugugauggcuuccaaaauaaggaaugggaccuuuuuguugaacgcagcaaagcuuacagcaacuguuacccuuaugaugugccggauuaugccucccuuaggucacuaguugccucaucaggcacccuggaguuuaccaaugaagacuucaauuggacuggagucgcucagaguggggaaagcuaugcuugcaaaaggggaucuguuaaaaguuucuuuaguagauugaauugguugcacgaaucagauuacaaauauccagcgcugaacgugacuaugccaaacaauggcaaauuugacaaauuguacauuugggggguucaccacccgagcacggacagagaacaaaccagccuauauguucgagcaucagggagagucacagucuccaccaaaagaagccaacaaacugugaucccgaauaucggguccagacccuggguaaggggucuguccaguagaauaagcaucuauuggacaauagugaaaccgggagacauacuuuugauuaauagcaccgggaaccuaauugcuccucgggguuacuucaaaauacgaacugggaaaagcucgauaaugagaucagaugcacccauuggcaccugcaguucugaaugcaucacuccaaauggaagcauccccaaugacaaaccuuuucaaaacguaaacaggaucacauauggggcaugucccagauauguuaagcaaaacacucugaaauuggcaacagggaugcggaauguaccagggaaacaaacuagaggcauauucggcgcaaucgcagguuucauagaaaaugguugggagggaaugguagacgguugguacgguuucaggcaucaaaauucugagggcacaggacaagcagcagaucuuaaaagcacucaagcagcaaucgaccaaaucaacgggaaacugaauagguuaaucgagaaaacgaacgagaaauuccaucaaaucgaaaaggaauucucagaaguagaagggagaauucaggaccucgagaaauauguugaagacacuaaaauagaucucuggucuuacaacgcggagcuucuuguugcccuggagaaccaacauacaauugaucugacugacucagaaaugaacaaacuguuugaaaaaacaaggaagcaacugagggaaaaugcugaggacaugggcaaugguugcuucaaaauauaccacaaaugugacaaugccugcauagggucaaucagaaauggaaccuaugaccaugacguauacagagacgaagcauuaaacaaccgguuccagaucaaagguguugagcugaagucaggauacaaagauuggauccuauggauuuccuuugccauaucaugcuuuuugcuuuguguuguuuugcugggguucaucaugugggccugccaaaaaggcaacauuaggugcaacauuugcauuuga

SEQ ID NO: 40633 - RNA, 1701 nt, Artificial Sequence; identical to SEQ ID NO: 40629
  derived and/or modified CDS sequence (wt) from hemagglutinin__InfluenzaA__AFG99866

SEQ ID NO: 40634 - RNA, 1701 nt, Artificial Sequence; identical to SEQ ID NO: 40629
  derived and/or modified CDS sequence (wt) from hemagglutinin__InfluenzaA__AFG99877

SEQ ID NO: 40635 - RNA, 1701 nt, Artificial Sequence
  derived and/or modified CDS sequence (wt) from hemagglutinin__InfluenzaA__AFG99888
augaagacuaucauugcuuugagcuacauuuuaugucugguuuucgcccaaaaacuucccggaaaugacaacagcacagcaacgcugugccuggggcaucaugcagugccaaacggaacucuagugaaaacaaucacgaaugaucaaauugaagugacuaaugccacugagcugguucagaguuccucaacagguagaauaugcgacaguccucaccgaauccuugauggaaaaaacugcacacugauagaugcucuauugggagacccucauugugauggcuuccaaaauaaggaaugggaccuuuuuguugaacgcagcaaagcuuacagcaacuguuacccuuaugaugugccagauuaugccucccuuaggucacuaguugccucaucaggcacccuggaguuuaucaaugaagacuucaauuggacuggagucgcucagaguggggaaagcuaugcuugcaaaaggggaucuguuaaaaguuucuuuaguagauugaauugguugcacgaaucagaauacaaauauccagcgcugaacgugacuaugccaaacaaugacaaauuugacaaauuguacauuugggggguucaccacccgagcacggacagagaacaaaccagccuauauauucgagcaucagggagagucacagucucuaccaaaagaagccaacaaacuguaaucccgaauaucggguccagacccuggguaaggggucuguccaguagaauaagcaucuauuggacaauaguaaaaccgggagacauacuuuugauuaauagcaccgggaaccuaauugcuccucgggguuacuucaaaauacgaacugggaaaagcucgauaaugaggucagaugcacccauuggcaccugcaauucugaaugcaucacuccaaauggaagcauccccaaugacaaaccuuuucaaaauguaaacaggaucacauauggggcaugucccagauauguuaagcaaaacacucugaaauuggcaacagggaugcggaauguaccagagaaacaaacuagaggcauauucggcgcaauugcagguuucauagaaaaugguugggagggaaugguagacgguugguacgguuucaggcaucaaaauucugagggcacaggacaagcagcagaucuuaaaagcacucaagcagcaaucgaccaaaucaacgggaaacugaauagguuaaucgagaaaacgaacgagaaauuccaucaaaucgaaaaggaauucucagaaguagaagggagaauucaggaccuagagaaauauguugaagacacuaaaauagaucucuggucuuacaaugcggagcuucuuguugcccuggagaaccaacauacaauugaucugacugacucagaaaugaacaaacuguuugaaaaaacaaggaagcaacugagggaaaaugcugaggacaugggcaaugguugcuucaaaauauaccacaaaugugacaaugccugcauagggucaaucagaaauggaacuuauaaccaugauguauacagagacgaagcauuaaacaaccgguuccagaucaaagguguugagcugaagucaggauacaaagauuggauccuauggauuuccuuugccauaucaugcuuuuugcuuuguguuguucugcugggguucaucaugugggccugccaaaaaggcaacauuaggugcaacauuugcauuuga

SEQ ID NO: 40636 - RNA, 1701 nt, Artificial Sequence; identical to SEQ ID NO: 40629
  derived and/or modified CDS sequence (wt) from hemagglutinin__InfluenzaA__AFG99899

SEQ ID NO: 40637 - RNA, 1701 nt, Artificial Sequence; identical to SEQ ID NO: 40499
  derived and/or modified CDS sequence (wt) from hemagglutinin__InfluenzaA__AFG99910

SEQ ID NO: 40638 - RNA, 1701 nt, Artificial Sequence; identical to SEQ ID NO: 40629
  derived and/or modified CDS sequence (wt) from hemagglutinin__InfluenzaA__AFG99921

SEQ ID NO: 40639 - RNA, 1701 nt, Artificial Sequence
  derived and/or modified CDS sequence (wt) from hemagglutinin__InfluenzaA__AFG99932
augaagaccaucauugcuuugagcuacauuuuaugucugguuuucgcccaaaaacuucccggaaaugacaacagcacagcaacguugugccuggggcaucaugcagugccaaacggaacucuagugaaaacaaucacgaaugaucaaauugaagugacuaaugcuacugagcugguucagaguuccucaacagguagaauaugcgacaguccucaccgaauccuugauggaaaaaacugcacacugauagaugcucuauugggagacccucauugugauggcuuccaaaauaaggaaugggaccuuuuuguugaacgcagcaaagcuuacagcaacuguuacccuuaugaugugccagauuaugccucccuuaggucacuaguugccucaucaggcacccuggaguuuaucaaugaagacuucaauuggacuggagucgcucagaguggggaaagcuaugcuugcaaaaggggaucuguuaaaaguuucuuuaguagauugaauugguugcacgaaucagaauacaaauauccagcgcugaacgugacuaugccaaacaaugacaaauuugacaaauuguacauuugggggguucaccacccgagcacggacagagaacaaaccagccuauauauucgagcaucagggagagucacagucucuaccaaaagaagccaacaaacuguaaucccgaauaucggguccagacccuggguaaggggucuguccaguagaauaagcaucuauuggacaauaguaaaaccgggagacauacuuuugauuaauagcaccgggaaccuaauugcuccucgggguuacuucaaaauacgaacuggaaaaagcucgauaaugaggucagaugcacccauuggcaccugcaguucugaaugcaucacuccaaauggaagcauccccaaugacaaaccuuuucaaaauguaaacaggaucacauauggggcaugucccagauauguuaagcaaaacacucugaaauuggcaacagggaugcggaauguaccagagaaacaaacuagaggcauauucggcgcaauugcagguuucauagaaaaugguugggagggaaugguagacgguugguacgguuucaggcaucaaaauucugagggcacaggacaagcagcagaucuuaaaagcacucaagcagcaaucgaccaaaucaacgggaaacugaauagguuaaucgagaaaacgaacgagaaauuccaucaaaucgaaaaggaauucucagaaguagaagggagaauucaggaccucgagaaauauguugaagacacuaaaauagaucucuggucuuacaacgcggagcuucuuguugcccuggagaaccaacauacaauugaucugacugacucagaaaugaacaaacuguuugaaaaaacaaggaagcaacugagggaaaaugcugaggacaugggcaaugguugcuucaaaauauaccacaaaugugacaaugccugcauagggucaaucagaaauggaacuuaugaccaugauguauacagagacgaagcauuaaacaaccgguuccagaucaaagguguugagcugaagucaggauacaaagauuggauccuauggauuuccuuugccauaucaugcuuuuugcuuuguguuguuuugcugggguucaucaugugggccugccaaaaaggcaacauuaggugcaacauuugcauuuga

SEQ ID NO: 40640 - RNA, 1701 nt, Artificial Sequence
  derived and/or modified CDS sequence (wt) from hemagglutinin__InfluenzaA__AFG99943
augaagacuaucauugcuuugagcuacauuuuaugucugguuuucgcccaaaaacuucccggaaaugacaacagcacagcaacgcugugccugggacaucaugcagugccaaacggaacgcuagugaaaacaaucacgaaugaucaaauugaagugacuaaugcuacugagcugguucagaguuccucaacagguagaauaugugacaguccucaccgaauccuugauggaaaaaauugcacacugauagaugcucuauugggagacccucauugugauggcuuccaaaauaaggaaugggaccuuuuuguugaacgcagcaaagcuuacagcaacuguuacccuuaugaugugccggauuaugccucccuuaggucacuaguugccucaucaggcacccuggaguuuaccaaugaagacuucaauuggacuggagucgcucagaguggggaaagcuaugcuugcaaaaggggaucuguuaaaaguuucuuuaguagauugaauugguugcacgaaucagauuacaaauauccagcgcugaacgugacuaugccaaacaauggcaaauuugacaaauuguacauuugggggguucaccacccgagcacggacagagaacaaaccagccuauauguucgagcaucagggagagucacagucucaaccaaaagaagccaacaaacugugaucccgaauaucggguccagacccuggguaaggggucuguccaguagaauaagcaucuauuggacaauagugaaaccgggagacauacuuuugauuaauagcaccgggaaccuaauugcuccucgggguuacuucaaaauacgaacugggaaaagcucgauaaugagaucagaugcacccauuggcaccugcaguucugaaugcaucacuccaaauggaagcauccccaaugacaaaccuuuucaaaacguaaacaggaucacauauggggcaugucccagauauguuaagcaaaacacucugaaauuggcaacagggaugcggaauguaccagagaaacaaacuagaggcauauucggcgcaaucgcagguuucauagaaaaugguugggagggaaugguagacgguugguacgguuucaggcaucaaaacucugagggcacaggacaagcagcagaucuuaaaagcacucaagcagcaaucgaccaaaucaacgggaaacugaauagguuaaucgagaaaacgaacgagaaauuccaucaaaucgaaaaggaauucucagaaguagaagggagaauucaggaccucgagaaauauguugaagacacuaaaauagaucucuggucuuacaacgcggagcuucuuguugcccuggagaaccaacauacaauugaucugacugacucagaaaugaacaaacuguuugaaaaaacaaggaagcaacugagggaaaaugcugaggacaugggcaaugguugcuucaaaauauaccacaaaugugacaaugccugcauagggucaaucagaaauggaaccuaugaccaugauguauacagagacgaagcauuaaacaaccgguuccagaucaaagguguugagcugaagucaggauacaaagauuggauccuauggauuuccuuugccauaucaugcuuuuugcuuuguguuguuuugcugggguucaucaugugggccugccaaaaaggcaacauuaggugcaacauuugcauuuga

SEQ ID NO: 40641 - RNA, 1701 nt, Artificial Sequence
  derived and/or modified CDS sequence (wt) from hemagglutinin__InfluenzaA__AFG99954
augaagacuaucauugcuuugagcuacauuuuaugucugguuuucgcccaaaaacuucccggaaaugacaacagcacagcaacgcugugccuggggcaucaugcagugccaaacggaacucuagugaaaacaaucacgaaugaucaaauugaagugacuaaugcuacugagcugguucagaguuccucaacagguagaauaugcgacaguccucaccgaauccuugauggaaaaaacugcacacugauagaugcucuauugggagacccucauugugauggcuuccaaaauaaggaaugggaccuuuuuguugaacgcagcaaagcuuacagcaacuguuacccuuaugaugugccagauuaugccucccuuaggucacuaguugccucaucaggcacccuggaguuuaucaaugaagacuucaauuggacuggagucgcucagaguggggacagcuaugcuugcaaaaggggaucuguuaaaaguuucuuuaguagauugaauugguugcacgaaucagaauacaaauauccagcgcugaaugugacuaugccaaacaaugacaaauuugacaaguuguacauuugggggguucaccacccgagcacggaaagagaacaaaccagccuauauauucgagcaucagggagagucacagucucuaccaaaagaagccaacaaacuguaaucccgaauaucggguucaaacccuggguaaggggucuguccaguagaauaagcaucuauuggacaauaguaaaaccgggagacauacuuuugauuaauagcaccgggaaccuaauugcuccucgggguuacuucaaaauacgaacugggaaaagcucgauaaugaggucagaugcacccauuggcaccugcaguucugaaugcaucacuccaaauggaagcauccccaaugacaaaccuuuucaaaauguaaacaggaucacauauggggcaugucccagauauguuaagcaaaacacucugaaauuggcaacagggaugcggaauguaccagagaaacaaacuagaggcauauucggcgcaauugcagguuucauagaaaaugguugggagggaaugguagacgguugguacgguuucaggcaucaaaauucugagggcacaggacaagcagcagaucuuaaaagcacucaagcagcaaucgaccaaaucaacgggaaacugaauagguuaaucgagaaaacgaacgagaaauuccaucaaaucgaaaaggaauucucagaaguagaagggagaauucaggaccucgagaaauauguugaagacacuaaaauagaucucuggucuuacaacgcggagcuucuuguugcccuggagaaccaacauacaauugaucugacugacucagaaaugaacaaacuguuugagaaaacaaggaagcaacugagggaaaaugcugaggacaugggcaaugguugcuucaaaauauaccacaaaugugacaaugccugcauagggucaaucagaaauggaacuuaugaccaugauguauacagagacgaagcauuaaacaaccgguuccagaucaaagguguugagcugaagucaggauacaaagauuggauccuauggauuuccuuugccauaucaugcuuuuugcuuuguguuguuuugcugggguucaucaugugggccugccaaaaaggcaacauuaggugcaacauuugcauuuga

SEQ ID NO: 40642 - RNA, 1701 nt, Artificial Sequence
  derived and/or modified CDS sequence (wt) from hemagglutinin__InfluenzaA__AFG99965
augaagaccaucauugcucugagcuacauucuaugucuggcuuucgcccaaaaacuucccggaaaugacaacagcacagcaacgcugugccugggacaucaugcagugccaaacggaacgcuagugaaaacaaucacgaaugaucaaauugaagugacuaaugcuacugagcugguucagaguuccucaacagguagaauaugugacaguccucaccgaauccuugauggaaaaaauugcacacugauagaugcucuauugggagacccucauugugauggcuuccaaaauaaggaaugggaccuuuuuguugaacgcagcaaagcuuacagcaacuguuacccuuaugaugugccggauuaugccucccuuaggucacuaguugccucaucaggcacccuggaguuuaccaaugaagacuucaauuggacuggagucgcucagaguggggaaagcuaugcuugcaaaaggggaucuguuaaaaguuucuuuaguagauugaauugguugcacgaaucagauuacaaauauccagcgcugaacgugacuaugccaaacaauggcaaauuugacaaauuguacauuugggggguucaccacccgagcacggacagagaacaaaccagccuauauguucgagcaucagggagagucacagucuccaccaaaagaagccaacaaacugugaucccgaauaucggguccagacccuggguaaggggucuguccaguagaauaagcaucuauuggacaauagugaaaccgggagacauacuuuugauuaauagcaccgggaaccuaauugcuccucgggguuacuucaaaauacgaacugggaaaagcucgauaaugagaucagaugcacccauuggcaccugcaguucugaaugcaucacuccaaauggaagcauccccaaugacaaaccuuuucaaaacguaaacaggaucacauauggggcaugucccagauauguuaagcaaaacacucugaaauuggcaacaggaaugcggaauguaccagagaaacaaacuagaggcauauucggcgcaaucgcagguuucauagaaaaugguugggagggaaugguagacgguugguacgguuucaggcaucaaaauucugagggcacaggacaagcagcagaucuuaaaagcacucaagcagcaaucgaccaaaucaacgggaaacugaauagguuaaucgagaaaacgaacgagaaauuccaucaaaucgaaaaggaauucucagaaguagaagggagaauccaggaccucgagaaauauguugaagacacuaaaauagaucucuggucuuacaacgcggagcuucuuguugcccuggagaaccaacauacaauugaucugacugacucagaaaugaacaaacuguuugaaaaaacaaggaagcaacugagggaaaaugcugaggacaugggcaaugguugcuucaaaauauaccacaaaugugacaaugccugcauagggucaaucagaaauggaacuuaugaccaugauguauacagagacgaagcauuaaacaaccgguuccagaucaaagguguugagcugaagucaggauacaaagauuggauccuauggauuuccuuugccauaucaugcuuuuugcuuuguguuguuuugcugggguucaucaugugggccugccaaaaaggcaacauuaggugcaacauuugcauuuga

SEQ ID NO: 40643 - RNA, 1701 nt, Artificial Sequence
  derived and/or modified CDS sequence (wt) from hemagglutinin__InfluenzaA__AFG99976
augaagacuaucauugcuuugagcuacauuuuaugucugguuuucgcccaaaaacuucccggaaaugacaacagcacagcaacgcugugccugggacaucaugcagugccaaacggaacgcuagugaaaacaaucacgaaugaucaaauugaagugacuaaugcuacugagcugguucagaguuccucaacagguagaauaugugacaguccucaccgaauccuugaugggaaaaauugcacacugauagaugcucuauugggagacccucauugugauggcuuccaaaauaaggaaugggaccuuuuuguugaacgcagcaaagcuuacagcaacuguuacccuuaugaugugccggauuaugccucccuuaggucacuaguugccucaucaggcacccuggaguuuaccaaugaagacuucaauuggacuggagucgcucagaguggggaaagcuaugcuugcaaaaggggaucuguuaaaaguuucuuuaguagauugaauugguugcacgaaucagauuacaaauauccagcgcugaacgugacuaugccaaacaauggcaaauuugacaaguuguacauuugggggguucaccacccgagcacggacagagaacaaaccagccuauauguucgagcaucagggagagucacagucuccaccaaaagaagccaacaaacugugaucccgaauaucggauccagacccuggguaaggggucuguccaguagaauaagcaucuauuggacaauagugaaaccgggagacauacuuuugauuaauagcaccgggaaccuaauugcuccucgggguuacuucaaaauacgaacugggaaaagcucgauaaugagaucagaugcacccauuggcaccugcaguucugaaugcaucacuccaaauggaagcauccccaaugacaaacccuuucaaaacguaaacaggaucacauauggggcaugucccagauauguuaagcaaaacacucugaaauuggcaacagggaugcggaauguaccagagaaacaaacuagaggcauauucggcgcaaucgcagguuucauagaaaaugguugggagggaaugguagacgguugguacgguuucaggcaucaaaauucugagggcacaggacaagcagcagaucuuaaaagcacucaagcagcaaucgaccaaaucaacgggaaacugaauagguuaaucgagaaaacgaacgagaaauuccaucaaaucgaaaaggaauucucagaaguagaagggagaauucaggaccucgagaaauauguugaagacacuaaaauagaucucuggucuuacaacgcggagcuucuuguugcccuggagaaccaacauacaauugaucugacugacucagaaaugaacaaacuguuugaaaaaacaaggaagcaacugagggaaaaugcugaggacaugggcaaugguugcuucaaaauauaccacaaaugugacaaugccugcauagggucaaucagaaauggaaccuaugaccaugauguauacagagacgaagcauuaaacaaccgguuccagaucaaagguguugagcugaagucaggauacaaagauuggauccuauggauuuccuuugccauaucaugcuuuuugcuuuguguuguuuugcugggguucaucaugugggccugccaaaaaggcaacauuaggugcaacauuugcauuuga

SEQ ID NO: 40644 - RNA, 1701 nt, Artificial Sequence
  derived and/or modified CDS sequence (wt) from hemagglutinin__InfluenzaA__AFG99987
augaagacuaucauugcuuugagcuacauuuuaugucugguuuucgcccaaaaacuucccggaaaugacaacagcacagcaacgcugugccuggggcaucaugcagugccaaacggaacucuagugaaaacaaucacgaaugaucaaauugaagugacuaaugcuacugagcugguucagaguuccucaacagguagaauaugcgacaguccucaccgaauccucgauggaaaaaacugcacacugauagaugcucuauugggagacccucauugugauggcuuccaaaauaaggaaugggaccuuuuuguugaacgcagcaaagcuuacagcaauuguuacccuuaugaugugccagauuacgccucccuuaggucacuaguugccucaucaggcacccuggaguuuaucaaugaagacuucaauuggacuggagucgcucagaauggggacagcuaugcuugcaaaaggggaucuguuaaaaguuucuuuaguagauugaauugguugcacgaaucagaauacaaauauccagcgcugaacgugacuaugccaaacaaugacaaauuugacaaguuguacauuugggggguucaccacccgagcacggacagagaacaaaccagccuauauauucgagcaucagggagagucacagucucuaccaaaagaagccaacaaacuguaaucccgaauaucggguccagacccuggguaaggggucuguccaguagaauaagcaucuauuggacaauaguaaaaccgggagacauacuuuugauuaauagcaccgggaaucuaauugcuccucgggguuacuucaaaauacgaacugggaaaagcucgauaaugaggucagaugcacccauuggcaccugcaguucugaaugcaucacuccaaauggaagcauccccaaugacaaaccuuuucaaaauguaaacaggaucacauauggggcaugucccagauauguuaagcaaaacacucugaaauuggcaacagggaugcggaauguaccagagaaacaaacuagaggcauauucggcgcaauugcagguuucauagaaaaugguugggagggaaugguagacgguugguacgguuucaggcaucaaaauucugaaggcacaggacaagcagcagaucuuaaaagcacucaagcagcaaucgaccaaaucaacgggaaacugaauagguuaaucgagaaaacgaacgagaaauuccaucaaaucgaaaaggaauucucagaaguagaagggagaauucaggaccucgagaaauauguugaagacacuaaaauagaucucuggucuuacaacgcggagcuucuuguugcccuggagaaccaacauacaauugaucugacugacucagaaaugaacaaacuguuugaaaaaacaaggaagcaacugagggaaaaugcugaggacaugggcaaugguugcuucaaaauauaccacaaaugugacaaugccugcauagggucaaucagaaauggaacuuaugaccaugauguauacagagacgaagcauuaaacaaccgguuccagaucaaagguguugagcugaagucaggauacaaagauuggauccuauggauuuccuuugccauaucaugcuuuuugcuuuguguuguuuugcugggguucaucaugugggccugccaaaaaggcaacauuaggugcaacauuugcauuuga

SEQ ID NO: 40645 - RNA, 1701 nt, Artificial Sequence
  derived and/or modified CDS sequence (wt) from hemagglutinin__InfluenzaA__AFG99998
augaagacuaucauugcuuugagcuacauuuuaugucugguuuucgcucaaaaacuucccggaaaugacaacagcacagcaacgcugugccugggacaucaugcagugccaaacggaacgcuagugaaaacaaucacgaaugaucaaauugaagugacuaaugcuacugaguugguucagaguuccucaacagguagaauaugcgacaguccucaccgaauccuugauggaaaaaacugcacacugauagaugcucuauugggagacccucauugugauggcuuccaaaauaaggaaugggaccuuuuuguugaacgcagcaaagcuuacagcaacuguuacccuuaugaugugccggauuaugccucccuuaggucacuaguugccucaucaggcacccuggaguuuaucaaugaagacuucaauuggacuggagucgcucaggaugggggaagcuaugcuugcaaaaggggaucuguuaacaguuucuuuaguagauugaauugguugcacaaauuagaauacaaauauccagcgcugaacgugacuaugccaaacaauggcaaauuugacaaauuguacauuugggggguucaccacccgagcacggacagugaccaaaccagccuauauguucgagcaucagggagagucacagucucuaccaaaagaagccaacaaacuguaaccccgaauaucgggucuagacccuggguaaggggucuguccaguagaauaagcaucuauuggacaauaguaaaaccgggagacauacuuuugauuaauagcacagggaaucuaauugcuccucgggguuacuucaaaauacgaaaugggaaaagcucaauaaugaggucagaugcacccauuggcaacugcaguucugaaugcaucacuccaaauggaagcauucccaaugacaaaccuuuucaaaauguaaacaggaucacauauggggccugccccagauauguuaagcaaaacacucugaaauuggcaacagggaugcggaauguaccagagaaacaaacuagaggcauauucggcgcaaucgcagguuucauagaaaaugguugggagggaaugguagacgguugguacgguuucaggcaucaaaauucugagggcacaggacaagcagcagaucuuaaaagcacucaagcagcaaucgaccaaaucaacgggaaacugaauagguuaaucgagaaaacgaacgagaaauuccaucaaaucgaaaaagaauucucagaaguagaagggagaauucaggaccucgagaaauauguugaagacacuaaaauagaucucuggucuuacaacgcggagcuucuuguugcccuggagaaccaacauacaauugaucuaacugacucagaaaugaacaaacuguuugaaaaaacaaggaagcaacugagggaaaaugcugaggacaugggcaaugguugcuucaaaauauaccacaaaugugacaaugccugcauagggucaaucagaaauggaacuuaugaccaugauguauacagagacgaagcauuaaacaaccgguuccagaucaaagguguugagcugaagucaggauacaaagauuggauccuauggauuuccuuugccauaucaugcuuuuugcuuuguguuguuuugcugggguucaucaugugggccugccaaaaaggcaacauuaggugcaacauuugcauuuga

SEQ ID NO: 40646 - RNA, 1701 nt, Artificial Sequence; identical to SEQ ID NO: 40615
  derived and/or modified CDS sequence (wt) from hemagglutinin__InfluenzaA__AFH00021

SEQ ID NO: 40647 - RNA, 1701 nt, Artificial Sequence
  derived and/or modified CDS sequence (wt) from hemagglutinin__InfluenzaA__AFH00032
augaagacuaucauugcuuugagcuacauuuuauguuugguuuucgcccaaaaacuucccggaaaugacaacagcacagcaacgcugugccuggggcaucaugcagugccaaacggaacucuagugaaaacaaucacgaaugaucaaauugaagugacuaaugcuacugagcugguucagaguuccucaacagguaaaauaugcgacaguccucaccgaauccucgauggaaaaaacugcacacugauagaugcucuauugggagacccucauugugaugacuuccaaaauaaggaaugggaccuuuuuguugaacgcagcaaagcuuacagcaauuguuacccuuaugaugugccagauuaugccucccuuaggucacuaguugccucaucaggcacccuggaguuuaucaaugaagacuucaauuggacuggagucgcucagaguggggacagcuaugcuugcaaaaggggaucuguuaaaaguuucuuuaguagauugaauugguugcacgaaucagaauacaaauauccagcgcugaacgugacuaugccaaacaaugacaaauuugacaaguuguacauuugggggguucaccacccgagcacggacagagaacaaaccagccuauauauucgagcaucagggagagucacagucucuaccaaaagaagucaacaaacuguaaucccaaauaucggguccagacccuggguaaggggucuguccaguagaauaagcaucuauuggacaauaguaaaaccgggagacauacuuuugauuaauagcaccgggaaucuaauugcuccacgggguuacuucaaaauacgaacugggaaaagcucgauaaugaggucagaugcacccauuggcaccugcaguucugaaugcaucacuccaaauggaagcauccccaaugacaaaccuuuucaaaauguaaacaggaucacauauggggcaugucccagauauguuaagcaaaacacucugaaauuggcaacagggaugcggaauguaccagagaaacaaacuagaggcauauucggcgcaauugcagguuucauagaaaaugguugggagggaaugguagacgguugguacgguuucaggcaucaaaauucugaaggcacaggacaagcagcagaucuuaaaagcacucaagcagcaaucgaccaaaucaacgggaaacugaauaaguuaaucgagaaaacgaacgagaaauuccaucaaaucgaaaaggaauucucagaaguagaagggagaauucaggaccucgagaaauauguugaagacacuaaaauagaucucuggucuuacaacgcggagcuucuuguugcccuggagaaccaacauacaauugaucugacugacucagaaaugaacaaacuguuugaaaaaacaaggaagcaacugagggaaaaugcugaggacaugggcaaugguugcuucaaaauauaccacaaaugugacaaugccugcauagggucaaucagaaauggaacuuaugaccaugauguauacagagacgaagcauuaaacaaccgguuccagaucaaagguguugagcugaagucaggauacaaagauuggauccuauggauuuccuuugccauaucaugcuuuuugcuuuguguuguuuugcugggguucaucaugugggccugccaaaaaggcaacauuaggugcaacauuugcauuuga

SEQ ID NO: 40648 - RNA, 1701 nt, Artificial Sequence
  derived and/or modified CDS sequence (wt) from hemagglutinin__InfluenzaA__AFH00043
augaagacuaucauugcuuugagcuacauuuuauguuugguuuucgcccaaaaacuucccggaaaugacaacagcacagcaacgcugugccuggggcaucaugcagugccaaacggaacucuagugaaaacaaucacgaaugaucaaauugaagugacuaaugcuacugagcugguucagaguuccucaacagguaaaauaugcgacaguccucaccgaauccucgauggaaaaaacugcacacugauagaugcucuauugggagacccucauugugaugacuuccaaaauaaggaaugggaccuuuuuguugaacgcagcaaagcuuacagcaauuguuacccuuaugaugugccagauuaugccucccuuaggucacuaguugccucaucaggcacccuggaguuuaucaaugaagacuucaauuggacuggagucgcucagaguggggacagcuaugcuugcaaaaggggaucuguuaaaaguuucuuuaguagauugaauugguugcacgaaucagaauacaaauauccagcgcugaacgugacuaugccaaacaaugacaaauuugacaaguuguacauuugggggguucaccacccgagcacggacagagaacaaaccagccuauauauucgagcaucagggagagucacagucucuaccaaaagaagucaacaaacuguaaucccaaauaucggguccagacccuggguaaggggucuguccaguagaauaagcaucuauuggacaauaguaaaaccgggagacauacuuuugauuaauagcaccgggaaucuaauugcuccacgggguuacuucaaaauacgaacugggaaaagcucgauaaugaggucagaugcaaccauuggcaccugcaguucugaaugcaucacuccaaauggaagcauccccaaugacaaaccuuuucaaaauguaaacaggaucacauauggggcaugucccagauauguuaagcaaaacacucugaaauuggcaacagggaugcggaauguaccagagaaacaaacuagaggcauauucggcgcaauugcagguuucauagaaaaugguugggagggaaugguagacgguugguacgguuucaggcaucaaaauucugaaggcacaggacaagcagcagaucuuaaaagcacucaagcagcaaucgaccaaaucaacgggaaacugaauaaguuaaucgagaaaacgaacgagaaauuccaucaaaucgaaaaggaauucucagaaguagaagggagaauucaggaccucgagaaauauguugaagacacuaaaauagaucucuggucuuacaacgcggagcuucuuguugcccuggagaaccaacauacaauugaucugacugacucagaaaugaacaaacuguuugaaaaaacaaggaagcaacugagggaaaaugcugaggacaugggcaaugguugcuucaaaauauaccacaaaugugacaaugccugcauagggucaaucagaaauggaacuuaugaccaugauguauacagagacgaagcauuaaacaaccgguuccagaucaaagguguugagcugaagucaggauacaaagauuggauccuauggauuuccuuugccauaucaugcuuuuugcuuuguguuguuuugcugggguucaucaugugggccugccaaaaaggcaacauuaggugcaacauuugcauuuga

SEQ ID NO: 40649 - RNA, 1701 nt, Artificial Sequence
  derived and/or modified CDS sequence (wt) from hemagglutinin__InfluenzaA__AFH00054
augaagacuaucauugcuuugagcuacauuuuaugucugguuuucgcccaaaaacuucccggaaaugacaacagcacagcaacgcugugccuggggcaucaugcagugccaaacggaacucuagugaaaacaaucacgaaugaucaaauugaagugacuaaugcuacugagcugguucagaguuccucaacagguagaauaugcgacaguccucaccgaauccucgauggaaaaaacugcacacugauagaugcucuauugggagacccucauugugauggcuuccaaaauaaggaaugggaccuuuuuguugaacgcagcaaagcuuacagcaauuguuacccuuaugaugugccagauuaugccucccuuaggucacuaguugccucaucaggcacccuggaguuuaucaaugaagacuucaauuggacuggagucgcucagaauggggacagcuaugcuugcaaaaggggaucuguuaaaaguuucuuuaguagauugaauugguugcacgaaucagaauacaaauauccagcgcugaacgugacuaugccaaacaacgacaaauuugacaaguuguacauuugggggguucaccacccgagcacggacagagaacaaaccagccuauauauucgagcaucagggagagucacagucucuaccaaaagaagccaacaaacuguaaucccgaauaucggguccagacccuggguaaggggucuguccaguagaauaagcaucuauuggacaauaguaaaaccgggagacauacuuuugauuaauagcaccgggaaucuaauugcuccucgggguuacuucaaaauacggacugggaaaagcucgauaaugaggucagaugcacccauuggcaccugcaguucugaaugcaucacuccaaauggaagcauccccaaugacaaaccuuuucaaaauguaaacaggaucacauauggggcaugucccagauauguuaagcaaaacacucugaaauuggcaacagggaugcggaauguaccagagaaacaaacuagaggcauauucggcgcaauugcagguuucauagaaaaugguugggagggaaugguagacgguugguacgguuucaggcaucaaaauucugaaggcacaggacaagcagcagaucuuaaaagcacucaagcagcaaucgaccaaaucaacgggaaacugaauagguuaaucgagaaaacgaacgagaaauuccaucaaaucgaaaaggaauucucagaaguagaagggagaauucaggaccucgagaaauauguugaagacacuaaaauagaucucuggucuuacaacgcggagcuucuuguugcccuggagaaccaacauacaauugaucugacugacucagaaaugaacaaacuguuugaaaaaacaaggaagcaacugagggaaaaugcugaggacaugggcaaugguugcuucaaaauauaccacaaaugugacaaugccugcauagggucaaucagaaauggaacuuaugaccaugauguauacagagacgaagcauuaaacaaccgguuccauaucaaagguguugagcugaagucaggauacaaagauuggauccuauggauuuccuuugccauaucaugcuuuuugcuuuguguuguuuugcugggguucaucaugugggccugccaaaaaggcaacauuaggugcaacauuugcauuuga

SEQ ID NO: 40650 - RNA, 1701 nt, Artificial Sequence
  derived and/or modified CDS sequence (wt) from hemagglutinin__InfluenzaA__AFH00065
augaagacuaucauugcuuugagcuacauuuuaugucugguuuucgcucaaaaacuucccggaaaugacaacagcacagcaacgcugugccugggacaucaugcagugccaaacggaacacuagugaaaacaaucacgaaugaucaaauugaagugacuaaugcuacugagcugguucagaguuccucaacagguagaauaugcgacaguccucaccgaauccuugauggaaaaaacugcacacugauagaugcucuauugggagacccucauugugauggcuuccaaaauaaggaaugggaccuuuuuguugaacgcagcaaagcuuacagcaacuguuacccuuaugaugugccggauuaugccucccuuaggucacuaguugccucgucaggcacccuggaguuuaucaaugaagacuucaauuggacuggagucgcucaggaugggggaagcuaugcuugcaaaaggggaucuguuaacaguuucuuuaguagauugaauugguugcacaaauuagaauacaaauauccagcgcugaacgugacuaugccaaacaauggcaaauuugacaaauuguacauuugggggguucaccacccgagcacggacagugaccaaaccagccuauauguucgagcaucagggagagucacagucucuaccaaaagaagccaacaaacuguaaucccgaauaucgggucuagacccuggguaaggggucagcccaguagaauaagcaucuauuggacaauaguaaaaccgggagacauacuuuugauuaauagcacagggaaucuaauugcuccucgggguuacuucaaaauacgaaaugggaaaagcucaauaaugaggucagaugcacccauuggcaacugcaguucugaaugcaucacuccaaauggaagcauucccaaugacaaaccuuuucaaaauguaaacaggaucacauauggggccugccccagauauguuaagcaaaacacucugaaauuggcaacagggaugcggaauguaccagagaaacaaacuagaggcauauucggcgcaaucgcagguuucauagaaaaugguugggagggaaugguagacgguugguacgguuucaggcaucaaaauucugagggcacaggacaagcagcagaucuuaaaagcacucaagcagcaaucgaccaaaucaacgggaaacugaauagguuaaucgagaaaacgaacgagaaauuccaucaaaucgaaaaagaauucucagaaguagaagggagaauucaggaccucgagaaauauguugaagacacuaaaauagaucucuggucuuacaacgcggagcuucuuguugcccuggagaaccaacauacaauugaucuaacugacucagaaaugaacaaacuguuugaaagaacaaggaagcaacugagggaaaaugcugaggacaugggcaaugguugcuucaaaauauaccacaaaugugacaaugccugcauagggucaaucagaaauggaacuuaugaccaugauguauacagagacgaagcauuaaacaaccgguuccagaucaaagguguugagcugaagucaggauacaaagauuggauccuauggauuuccuuugccauaucaugcuuuuugcuuuguguuguuuugcugggguucaucaugugggccugccaaaaaggcaacauuaggugcaacauuugcauuuga

SEQ ID NO: 40651 - RNA, 1701 nt, Artificial Sequence
  derived and/or modified CDS sequence (wt) from hemagglutinin__InfluenzaA__AFH00076
augaagacuaucauugcuuugagcuacauuuuaugucugguuuucgcccaaaaacuucccggaaaugacaacagcacagcaacgcugugccuggggcaucaugcagugccaaacggaacucuagugaaaacaaucacgaaugaucaaauugaagugacuaaugcuacugagcugguucagaguuccucaacagguaaaauaugcgacaguccucaccgaauccucgauggaaaaaacugcacacugauagaugcucuauugggagacccucauugugaugacuuccaaaauaaggaaugggaccuuuuuguugaacgcagcaaagcuuacagcaauuguuacccuuaugaugugccagauuaugccucccuuaggucacuaguugccucaucaggcacccuggaguuuaucaaugaagacuucaauuggacuggagucgcucagaguggggacagcuaugcuugcaaaaggggaucuguuaaaaguuucuuuaguagauugaauugguugcacgaaucagaauacaaauauccagcgcugaacgugacuaugccaaacaaugacaaauuugacaaguuguacauuugggggguucaccacccgagcacggacagagaacaaaccagccuauauauucgagcaucagggagagucacagucucuaccaaaagaagucaacaaacuguaaucccaaauaucggguccagacccuggguaaggggucuguccaguagaauaagcaucuauuggacaauaguaaaaccgggagacauacuuuugauuaauagcaccgggaaucuaauugcuccacgggguuacuucaaaauacgaacugggaaaagcucgauaaugaggucagaugcacccauuggcaccugcaauucugaaugcaucacuccaaauggaagcauccccaaugacaaaccuuuucaaaauguaaacaggaucacauauggggcaugucccagauauguuaagcaaaacacucugaaauuggcaacagggaugcggaauguaccagaaaaacaaacuagaggcauauucggcgcaauugcagguuucauagaaaaugguugggagggaaugguagacgguugguacgguuucaggcaucaaaauucugaaggcacaggacaagcagcagaucuuaaaagcacucaagcagcaaucgaccaaaucaacgggaaacugaauagguuaaucgagaaaacgaacgagaaauuccaucaaaucgaaaaggaauucucagaaguagaagggagaauucaggaccucgagaaauauguugaagacacuaaaauagaucucuggucuuacaacgcggagcuucuuguugcccuggagaaccaacauacaauugaucugacugacucagaaaugaacaaacuguuugaaaaaacaaggaagcaacugagggaaaaugcugaggacaugggcaaugguugcuucaaaauauaccacaaaugugacaaugccugcauagggucaaucagaaauggaacuuaugaccaugauguauacagagacgaagcauuaaacaaccgguuccagaucaaagguguugaacugaagucaggauacaaagauuggauccuauggauuuccuuugccauaucaugcuuuuugcuuuguguuguuuugcugggguucaucaugugggccugccaaaaaggcaacauuaggugcaacauuugcauuuga

SEQ ID NO: 40652 - RNA, 1701 nt, Artificial Sequence
  derived and/or modified CDS sequence (wt) from hemagglutinin__InfluenzaA__AFH00087
augaagacuaucauugcuuugagcuacauuuuaugucugguuuucgcucaaaaacuucccggaaaugacaacagcacagcaacgcugugccugggacaccaugcagugccaaacggaacgcuagugaaaacaaucacgaaugaucaaauugaagugacuaaugcuacugagcugguucagaguuccucaacagguagaauaugcgacaguccucaccgaauccuugauggaaaaaacugcacacugauagaugcucuauugggagacccucauugugauggcuuccaaaauaaggaaugggaccuuuuuguugaacgcagcgaagcuuacagcagcuguuacccuuaugaugugccggauuaugccucccuuaggucacuaguugccucaucaggcacccuggaguuuaucaaugaagacuucaauuggacuggagucgcucaggaugggaaaagcuaugcuugcaaaaggggaucuguuaacaguuucuuuaguagauugaauugguugcacaaauuagaauacaaauauccagcgcugaacgugacuaugccaaacaauggcaaauuugacaaauuguacauuugggggguucaucacccgagcacggacagugaccaaaccagccuauauguucgagcaucagggagagucacagucucuaccaaaagaagccaacaaacuguaaucccgaauaucgggucuagacccuggguaaggggucaguccaguagaauaggcaucuauuggacaauaguaaaaccgggagacauacuuuugauuaauagcacagggaaucuaauugcuccucgggguuacuucaaaauacgaaaugggaaaagcucaauaaugaggucagaugcacccauuggcaacugcaguucugaaugcaucacuccaaauggaagcauucccaaugacaaaccuuuucaaaauguaaacaagaucacauauggggccugccccagauauguuaagcaaaacacucugaaauuggcaacagggaugcggaauguaccagagaaacaaacuagaggcauauucggcgcaaucgcagguuucauagaaaaugguugggagggaaugguagacgguugguacgguuucaggcaucaaaauucugagggcacaggacaagcagcagaucuuaaaagcacucaagcagcaaucgaccaaaucaacgggaaacugaauagguuaaucgagaaaacgaacgagaaauuccaucaaaucgaaaaagaauucucagaaguagaagggagaauucaggaccucgagaaauauguugaagacacuaaaauagaucucuggucuuacaacgcggagcuucuuguugcccuggagaaccaacauacaauugaucuaacugacucagaaaugaacaaacuguuugaaagaacaaggaagcaacugagggaaaaugcugaggacaugggcaaugguugcuucaaaauauaccacaaaugugacaaugccugcauagggucaaucagaaauggaacuuaugaccaugauguauacagagacgaagcauuaaacaaccgguuccagaucaaagguguugagcugaagucaggauacaaagauuggauccuauggauuuccuuugccauaucaugcuuuuugcuuuguguuguuuugcugggguucaucaugugggccugccaaaaaggcaacauuaggugcaacauuugcauuuga

SEQ ID NO: 40653 - RNA, 1701 nt, Artificial Sequence
  derived and/or modified CDS sequence (wt) from hemagglutinin__InfluenzaA__AFH00098
augaagacuaucauugcuuugagcuacauuuuaugucugguuuucgcucaaaaacuucccggaaaugacaacagcacagcaacgcugugccugggacaucaugcagugccaaacggaacacuagugaaaacaaucacgaaugaucaaauugaagugacuaaugcuacugagcugguucagaguuccucaacagguagaauaugcgacaguccucaccgaauccuugauggaaaaaacugcacacugauagaugcucuauugggagacccucauugugauggcuuccaaaauaaggaaugggaccuuuuuguugaacgcagcaaagcuuacagcaacuguuacccuuaugaugugccggauuaugccucccuuaggucacuaguugccucgucaggcacccuggaguuuaucaaugaagacuucaauuggacuggagucgcucaggaugggggaagcuaugcuugcaaaaggggaucuguuaacaguuucuuuaguagauugaauugguugcacaaauuagaauacaaauauccagcgcugaacgugacuaugccaaacaauggcaaauuugacaaauuguacauuugggggguucaccacccgagcacggacagugaccaaaccagccuauauguucgagcaucagggagagucacagucucuaccaaaagaagccaacaaacuguaaucccgaauaucgggucuagacccuggguaaggggucugcccaguagaauaagcaucuauuggacaauaguaaaaccgggagacauacuuuugauuaauagcacagggaaucuaauugcuccucgggguuacuucaaaauacgaaaugggaaaagcucaauaaugaggucagaugcacccauuggcaacugcaguucugaaugcaucacuccaaauggaagcauucccaaugacaaaccuuuucaaaauguaaacaggaucacauauggggccugccccagauauguuaagcaaaacacucugaaauuggcaacagggaugcggaauguaccagagaaacaaacuagaggcauauucggcgcaaucgcagguuucauagaaaaugguugggagggaaugguagacgguugguacgguuucaggcaucaaaauucugagggcacaggacaagcagcagaucuuaaaagcacucaagcagcaaucgaccaaaucaacgggaaacugaauagguuaaucgagaaaacgaacgagaaauuccaucaaaucgaaaaagaauucucagaaguagaagggagaauucaggaucucgagaaauauguugaagacacuaaaauagaucucuggucuuacaacgcggagcuucuuguugcccuggagaaccaacauacaauugaucuaacugacucagaaaugaacaaacuguuugaaagaacaaggaagcaacugagggaaaaugcugaggacaugggcaaugguugcuucaaaauauaccacaaaugugacaaugccugcauagggucaaucagaaauggaacuuaugaccaugauguauacagagacgaagcauuaaacaaccgguuccagaucaaagguguugagcugaagucaggauacaaagauuggauccuauggauuuccuuugccauaucaugcuuuuugcuuuguguuguuuugcugggguucaucaugugggccugccaaaaaggcaacauuaggugcaacauuugcauuuga

SEQ ID NO: 40654 - RNA, 1701 nt, Artificial Sequence
  derived and/or modified CDS sequence (wt) from hemagglutinin__InfluenzaA__AFH00109
augaagacuaucauugcuuugagcuacauuuuaugucugguuuucgcucaaaaacuucccggaaaugacaacagcacagcaacgcugugccugggacaccaugcagugccaaacggaacgcuagugaaaacaaucacgaaugaucaaauugaagugacuaaugcuacugagcugguucagaguuccucaacagguagaauaugcgacaguccucaccgaauccuugauggaaaaaacugcacacugauagaugcucuauugggagacccucauugugauggcuuccaaaauaaggaaugggaccuuuuuguugaacgcagcaaagcuuacagcaacuguuacccuuaugaugugccggauuaugccucccuuaggucacuaguugccucaucaggcacccuggaguuuaucaaugaagacuucaauuggacuggagucgcucaggaugggaaaagcuauacuugcaaaaggggaucuguuaacaguuucuuuaguagauugaauuggcugcacaaauuagaauacaaauauccagcgcugaacgugacuaugccaaacaauggcaaauuugacaaauuguacauuugggggguucaccacccgagcacggacagugaccaaaccagccuauauguucgagcaucagggagagucacagucucuaccaaaagaagccaacaaacuguaaucccgaauaucggguuuagacccuggguaaggggucuguccaguagaauaagcaucuauuggacaauaguaaaaccgggagacauacuuuugauuaauagcacagggaaucuaauugcuccucgggguuacuucaaaauacgaaaugggaaaagcucaauaaugaggucagaugcacccauuggcaacugcaguucugaaugcaucacuccaaauggaagcauucccaaugacaaaccuuuucaaaauguaaacaggaucacauauggggccugccccagauauguuaagcaaaacacucugaaguuggcaacagggaugcggaauguaccagagaaacaaacuagaggcauauucggcgcaaucgcagguuucauagaaaaugguugggagggaaugguagacgguugguacgguuucaggcaucaaaauucugagggcacaggacaagcagcagaucuuaaaagcacucaagcagcaaucgaccaaaucaacgggaaacugaauagguuaaucgagaaaacgaacgagaaauuccaucaaaucgaaaaagaauucucagaaguagaagggagaauucaggaccucgagaaauauguugaagacacuaaaauagaucucuggucuuacaacgcggggcuucuuguugcccuggagaaccaacauacaauugaucuaacugacucagaaaugaacaaacuguuugaaagaacaaggaagcaacugagggaaaaugcugaggacaugggcaaugguugcuucaaaauauaccacaaaugugacaaugccugcauagggucaaucagaaauggaacuuaugaccaugauguauacagagacgaagcauuaaacaaccgguuccagaucaaaggugucgagcugaagucaggauacaaagauuggauccuauggauuuccuuugccauaucaugcuuuuugcuuuguguuguuuugcugggguucaucaugugggccugccaaaaaggcaacauuaggugcaacauuugcauuuga

SEQ ID NO: 40655 - RNA, 1701 nt, Artificial Sequence
  derived and/or modified CDS sequence (wt) from hemagglutinin__InfluenzaA__AFH00120
augaagacuaucauugcuuugagcuacauuuuaugucugguuuucgcucaaaaacuucccggaaaugacaacagcacagcaacgcugugccugggacaccaugcagugccaaacggaacgcuagugaaaacaaucacgaaugaucaaauugaagugacuaaugcuacugagcugguucagaguuccucaacagguagaauaugcgacagcccucaccgaauccuugauggaaaaaacugcacacugauagaugcucuauugggagacccucauugugauggcuuccaaaauaaggaaugggaccuuuuuguugaacgcagcaaagcuuacagcaacuguuacccuuaugaugugccggauuaugccucccuuaggucacuaguugccucaucaggcacccuggaguuuaucaaugaagacuucaauuggacuggagucgcucaggaugggaaaagcuaugcuugcaaaaggggaucuguuaacaguuucuuuaguagauugaauugguugcacaaauuagaauacaaauauccagcgcugaacgugacuaugccaaacaauggcaaauuugacaaauuguacauuugggggguucaccacccgagcacggacagugaccaaaccagccuauauguucgagcaucagggagagucacagucucuaccaaaagaagccaacaaacuguaaucccgaauaucggguuuagacccuggguaaggggucuguccaguagaauaagcaucuauuggacaauaguaaaaccgggagacauacuuuugauuaauagcacagggaaucuaauugcuccucgggguuacuucaaaauacgaaaugggaaaagcucaauaaugaggucagaugcacccauuggcaacugcaguucugaaugcaucacuccaaauggaagcauucccaaugacaaaccuuuucaaaauguaaacaggaucacauauggggccugccccagauauguuaagcaaaacacucugaaguuggcaacagggaugcggaauguaccagagaaacaaacuagaggcauauucggcgcaaucgcagguuucauagaaaaugguugggagggaaugguagacgguugguacgguuucaggcaucaaaauucugagggcacaggacaagcagcagaucuuaaaagcacucaagcagcaaucgaccaaaucaacgggaaacugaauagguuaaucgagaaaacgaacgagaaauuccaucaaaucgaaaaagaauucucagaaguagaagggagaauucaggaccucgagaaauauguugaagacacuaaaauagaucucuggucuuacaacgcggggcuucuuguugcccuggagaaccaacauacaauugaucuaacugacucagaaaugaacaaacuguuugaaagaacaaggaagcaacugagggaaaaugcugaggacaugggcaaugguugcuucaaaauauaccacaaaugugacaaugccugcauagggucaaucagaaauggaacuuaugaccaugauguauacagagacgaagcauuaaacaaccgguuccagaucaaagguguugagcugaagucaggauacaaagauuggauccuauggauuuccuuugccauaucaugcuuuuugcuuuguguuguuuugcugggguucaccaugugggccugccaaaaaggcaacauuaggugcaacauuugcauuuga

SEQ ID NO: 40656 - RNA, 1701 nt, Artificial Sequence
  derived and/or modified CDS sequence (wt) from hemagglutinin__InfluenzaA__AFH00131
augaagacuaucauugcuuugagcuacauuuuaugucugguuuuugcucaaaaacuucccggaaaugacaacagcacagcaacgcugugccugggacaccaugcagugccaaacggaacgcuagugaaaacaaucacgaaugaucaaauugaagugacuaaugcuacugagcugguucagaguuccucaacagguagaauaugcgacaguccucaccgaauccuugauggaaaaaacugcacacugauagaugcucuauugggagacccucauugugauggcuuccaaaauaaggaaugggaccuuuuuguugaacgcagcaaagcuuacagcaacuguuacccuuaugaugugccggauuaugccucccuuaggucacuaguugccucaucaggcacccuggaguuuaucaaugaagacuucaauuggacuggagucgcucaggaugggaaaagcuauacuugcaaaaggggaucuguuaacaguuucuuuaguagauugaauugguugcacaaauuagaauacaaauauccagcgcugaacgugacuaugccaaacaauggcaaauuugacaaauuguacauuugggggguucaccacccgagcacggacagugaccaaaccagccuauauguucgagcaucagggagagucacagucucuaccaaaagaagccaacaaacuguaaucccgaauaucgggucuagacccuggguaaggggucuguccaguagaauaagcaucuauuggacaauaguaaaaccgggagacauacuuuugauuaauagcacagggaaucuaauugcuccucgggguuacuucaaaauacgaaaugggaaaagcucaauaaugaggucagaugcacccauuggcaacugcaguucugaaugcaucacuccaaauggaagcauucccaaugacaaaccuuuucaaaauguaaacaggaucacauauggggccugccccagauauguuaagcaaaacacucugaaauuggcaacagggaugcggaauguaccagagaaacaaacuagaggcauauucggcgcaaucgcagguuucauagaaaaugguugggagggaaugguagacgguugguacgguuucaggcaucaaaauucugagggcacaggacaagcagcagaucuuaaaagcacucaagcagcaaucgaccaaaucaacgggaaacugaauagguuaaucgagaaaacgaacgagaaauuccaucaaaucgaaaaagaauucucagaaguagaagggagaauucaggaccucgagaaauauguugaagacacuaaaauagaucucuggucuuacaacgcggagcuucuuguugcccuggagaaccaacauacaauugaucuaacugacucagaaaugaacaaacuguuugaaagaacaaggaagcaacugagggaaaaugcugaggacaugggcaaugguugcuucaaaauauaccacaaaugugacaaugccugcauagggucaaucagaaauggaacuuaugaccaugauguauacagagacgaagcguuaaacaaccgguuccagaucaaagguguugagcugaagucaggauacaaagauuggauccuauggauuuccuuugccauaucaugcuuuuugcuuuguguuguuuugcugggguucaucaugugggccugccaaaaaggcaacauuaggugcaacauuugcauuuga

SEQ ID NO: 40657 - RNA, 1701 nt, Artificial Sequence
  derived and/or modified CDS sequence (wt) from hemagglutinin__InfluenzaA__AFH00153
augaagacuaucauugcuuugagcuacauuuuaugucugguuuuugcucaaaaacuucccggaaaugacaacagcacagcaacgcugugccugggacaccaugcagugccaaacggaacgcuagugaaaacaaucacgaaugaucaaauugaagugacuaaugcuacugagcugguucagaguuccucaacagguagaauaugcgacaguccucaccgaauccuugauggaaaaaacugcacacugauagaugcucuauugggagacccucauugugauggcuuccaaaauaaggaaugggaccuuuuuguugaacgcagcaaagcuuacagcaacuguuacccuuaugaugugccggauuaugccucccuuaggucacuaguugccucaucaggcacccuggaguuuaucaaugaagacuucaauuggacuggagucgcucaggaugggaaaagcuaugcuugcaaaaggggaucuguuaacaguuucuuuaguagauugaauugguugcacaaauuagaauacaaauauccagcgcugaacgugacuaugccaaacaauggcaaauuugacaaauuguacauuugggggguucaccacccgagcacggacagugaccaaaccagccuauauauucgagcaucagggagagucacagucucuaccaaaagaagccaacaaacuguaaucccgaauaucgggucuagacccuggguaaggggucuguccaguagaauaagcaucuauuggacaauaguaaaaccgggagacauacuuuugauuaauagcacagggaaucuaauugcuccucgggguuacuucaaaauacgaaaugggaaaagcucaauaaugaggucagaugcacccauuggcaacugcaguucugaaugcaucacuccaaauggaagcauucccaaugacaaaccuuuucaaaauguaaacaggaucacauauggggccugccccagauauguuaagcaaaacacucugaaauuggcaacagggaugcggaauguaccagagaaacaaacuagaggcauauucggcgcaaucgcagguuucauagaaaaugguugggagggaaugguagacgguugguacgguuucaggcaucaaaauucugagggcacaggacaagcagcagaucuuaaaagcacucaagcagcaaucgaccaaaucaacgggaaacugaauagguuaaucgagaaaacgaacgagaaauuccaucaaaucgaaaaagaauucucagaaguagaagggagaauucaggaccucgagaaauauguugaagacacuaaaauagaucucuggucuuacaacgcggagcuucuuguugcccuggagaaccaacauacaauugaucuaacugacucagaaaugaacaaacuguuugaaagaacaaggaagcaacugagggaaaaugcugaggacaugggcaaugguugcuucaaaauauaccacaaaugugacaaugccugcauagggucaaucagaaauggaacuuaugaccaugauguauacagagacgaagcauuaaacaaccgguuccagaucaaagguguugagcugaagucaggauacaaagauuggauccuauggauuuccuuugccauaucaugcuuuuugcuuuguguuguuuugcugggguucaucaugugggccugccaaaaaggcaacauuaggugcaacauuugcauuuga

SEQ ID NO: 40658 - RNA, 1701 nt, Artificial Sequence
  derived and/or modified CDS sequence (wt) from hemagglutinin__InfluenzaA__AFH00164
augaagacuaucauugcuuugagcuacauuuuaugucugguuuucgcccaaaaacuucccggaaaugacaacagcacagcaacgcugugccuggggcaucaugcagugccaaacggaacucuagugaaaacaaucacgaaugaucaaauugaagugacuaaugcuacugagcugguccagaguuccucaacagguagaauaugcgacaguccucaccgaauccucgauggaaaaaacugcacacugauggaugcucuauugggagacccucauugugauggcuuccaaaauaaggaaugggaccuuuuuguugaacgcagcaaagcuuacagcaauuguuacccuuaugaugugccagauuaugccucccuuaggucacuaguugccucaucaggcacccuggaguuuaucaaugaagacuucaauuggacuggagucgcucagaauggggacagcuaugcuugcaaaaggggaucuguuaaaaguuucuuuaguagauugaauugguugcacgaaucagaauacaaauauccagcgcugaacgugacuaugccaaacaaugacaaauuugacaaguuguacauuugggggguucaccacccgagcacggacagagaacaaaccagccuauauauucgagcaucagggagagucacagucucuaccaaaagaagccaacaaacuguaaucccgaauaucggguccagacccuggguaaggggucuguccaguagaauaagcaucuauuggacaauaguaaaaccgggagacauacuuuugauuaauagcaccgggaaucuaauugcuccucgggguuacuucaaaauacgaacugggaaaagcucgauaaugaggucagaugcacccauuggcaccugcaguucugaaugcaucacuccaaauggaagcauccccaaugacaaaccuuuucaaaauguaaacaggaucacauauggggcauguccaagauauguuaagcaaaacacucugaaauuggcaacagggaugcggaauguaccagagaaacaaacuagaggcauauucggcgcaauugcagguuucauagaaaaugguugggagggaaugguagacgguugguacgguuucaggcaucaaaauucugaaggcacaggacaagcagcagaucuuaaaagcacucaagcagcaaucgaccaaaucaacgggaaacugaauagguuaaucgagaaaacgaacgagaaauuccaucaaauugaaaaggaauucucagaaguagaagggagaauucaggaccucgagaaauauguugaagacacuaaaauagaucucuggucuuacaacgcggagcuucuuguugcccuggagaaccaacauacaauugaucugacugacucagaaaugaacaaacuguuugaaaaaacaaggaagcaacugagggaaaaugcugaggacaugggcaaugguugcuucaaaauauaccacaaaugugacaaugccugcauagggucaaucagaaauggaacuuaugaccaugauguauacagagacgaagcauuaaacaaccgguuccagaucaaagguguugagcugaagucaggauacaaagauuggauccuauggauuuccuuugccauaucaugcuuuuugcuuuguguuguuuugcugggguucaucaugugggccugccaaaaaggcaacauuaggugcaacauuugcauuuga

SEQ ID NO: 40659 - RNA, 1701 nt, Artificial Sequence
  derived and/or modified CDS sequence (wt) from hemagglutinin__InfluenzaA__AFH00175
augaagacuaucauugcuuugagcuacauuuuaugucugguuuuugcucaaaaacuucccggaaaugacaacagcacagcaacgcugugccugggacaccaugcagugccaaacggaacgcuagugaaaacaaucacgaaugaucaaauugaagugacuaaugcuacugagcugguucagaguuccucaacagguagaauaugcgacaguccucaccgaauccuugauggaaaaaacugcacacugauagaugcucuauugggagacccucauugugauggcuuccaaaauaaggaaugggaccuuuuuguugaacgcagcaaagcuuacagcaacuguuacccuuaugaugugccggauuaugccucccuuaggucacuaguugccucaucaggcacccuggaguuuaucaaugaagacuucaauuggacuggagucgcucaggaugggaaaagcuaugcuugcaaaaggggaucuguuaaaaguuucuuuaguagauugaauugguugcacaaauuagaauacaaauauccagcgcugaacgugacuaugccaaacaauggcaaauuugacaaauuguacauuugggggguucaccacccgagcacggacagugaccaaaccagccuauauguucgagcaucagggagagucacagucucuaccaaaaaaagccaacaaacuguaaucccgaauaucgggucuagacccuggguaaggggucaguccaguagaauaagcaucuauuggacaauaguaaaaccgggagacauacuuuugauuaauagcacagggaaucuaauugcuccucgggguuacuucaaaauacgaaaugggaaaagcucaauaaugaggucagaugcacccauuggcaacugcaguucugaaugcaucacuccaaauggaagcauucccaaugacaaaccuuuucaaaauguaaacaggaucacauauggggccugccccagauauguuaagcaaaacacucugaaauuggcaacagggaugcggaauguaccagagaaacaaacuagaggcauauucggcgcaaucgcagguuucauagaaaaugguugggagggaaugguagacgguugguacgguuucaggcaucaaaauucugagggcacaggacaagcagcagaucuuaaaagcacucaagcagcaaucgaccaaaucaacgggaaacugaauagguuaaucgagaaaacgaacgagaaauuccaucaaaucgaaaaagaauucucagaaguagaagggagaauucaggaccucgagaaauauguugaagacacuaaaauagaucucuggucuuacaacgcggagcuucuuguugcccuggagaaccaacauacaauugaucuaacugacucagaaaugaacaaacuguuugaaagaacaaggaagcaacugagggaaaaugcugaggacaugggcaaugguugcuucaaaauauaccacaaaugugacaaugccugcauagggucaaucagaaauggaacuuaugaccaugauguauacagagacgaagcauuaaacaaccgguuccagaucaaagguguugagcugaagucaggauacaaagauuggauccuauggauuuccuuugccauaucaugcuuuuugcuuuguguuguuuugcugggguucaucaugugggccugccaaaaaggcaacauuaggugcaacauuugcauuuga

SEQ ID NO: 40660 - RNA, 1701 nt, Artificial Sequence
  derived and/or modified CDS sequence (wt) from hemagglutinin__InfluenzaA__AFH00186
augaagacuaucauugcuuugagccacauuuuaugucugguuuucgcucaaaaacuucccggaaaugacaacagcacagcaacgcuaugccugggacaucaugcagugccaaacggaacgcuagugaaaacaaucacgaaugaucaaauugaagugacuaaugcuacugaguugguucagaguucuucaacagguagaauaugcgacaguccucaccgaauccuugauggaaaaaacugcacacugauagaugcucuauugggagacccucauugugauggcuuccaaaauaaggaaugggaccuuuuuguugaacgcagcaaagcuuacagcaacuguuacccuuaugaugugccggauuaugccucccuuaggucacuaguugccucaucaggcacccuggaauuuaucaaugaagacuucaauuggacuggagucgcucaggaugggggaagcuaugcuugcaaaaggggaucuguuaacaguuucuuuaguagauugaauugguugcacaaauuagaauacaaauauccagcgcugaacgugacuaugccaaacaauggcaaauuugacaaauuguacauuugggggguucaccacccuagcacggacagugaccaaaccagccuauauguucgagcaucagggagagucacagucucuaccaaaagaagccaacaaacuguaaccccgaauaucgggucuagacccuggguaaggggucaguccaguagaauaagcaucuauuggacaauaguaaaaccgggagacauacuuuugauuaguagcacagggaaucuaauugcuccucgggguuacuucaaaauacgaaaugggaaaagcucaauaaugaggucagauguacccauuggcaacugcaguucugaaugcaucacuccaaauggaagcauucccaaugacaaaccuuuucaaaauguaaacaggaucacauauggggccugccccagauauguuaagcaaaacacucugaaauuggcaacagggaugcggaauguaccagagaaacaaacuagaggcauauucggcgcaaucgcagguuucauagaaaaugguugggagggaaugguagacgguugguaugguuucaggcaucaaaauucugagggcacaggacaagcagcagaucuuaaaagcacucaagcagcaaucgaccaaaucaacgggaaacugaauagguuaaucgagaaaacgaacgagaaauuccaucaaaucgaaaaagaauucucagaaguggaagggagaauucaggaccucgagaaauauguugaagacacuaaaauagaucucuggucuuacaacgcggagcuuauuguugccuuggagaaccaacauacaauugaucuaacugacucagaaaugaacaaacuguuugaaaaaacaaggaagcaacugagggaaaaugcugaggacaugggcaaugguugcuucaaaauauaccacaaaugugacaaugccugcauagggucaaucagaaauggaacuuaugaccaugauguauacagagacgaagcauuaaacaaccgguuccagaucaaagguguugagcugaagucaggauacaaagauuggauccuauggauuuccuuugccauaucaugcuuuuugcuuuguguuguuuugcugggguucaucaugugggccugccaaaaaggcaacauuaggugcaacauuugcauuuga

SEQ ID NO: 40661 - RNA, 1701 nt, Artificial Sequence
  derived and/or modified CDS sequence (wt) from hemagglutinin__InfluenzaA__AFH00197
augaagacuaucauugcuuugagcuacauuuuaugucugguuuucgcucaaaaacuucccggaaaugacaacagcacagcaacgcugugccugggacaucaugcagugccaaacggaacgcuagugaaaacaaucacgaaugaucaaauugaagugaccaaugcuacugagcugguucagaguuccucaacagguagaauaugcgacaguccucaccgaauccuugauggaaaaaacugcacacuaauagaugcucuauugggagacccucauugugauggcuuccaaaauaaggaaugggaccuuuuuguugaacgcagcaaagcuuacagcaacuguuacccuuaugaugugccggauuaugccucccuuaggucacuaguugccucaucaggcacccuggaguuuaucaaugaagacuucaauuggacuggagucgcucaggaugggggaagcuauacuugcaaaaggggaucuguuaacaguuucuuuaguagauugaauugguugcacaaauuagaauacaaauauccagcucugaacgugacuaugccaaacaauggcaaauuugacaaauuguacauuugggggguucaccacccgagcacggacagugaccaaaccagccuauauguucgagcaucagggagagucacagucucuaccaaaauaagccaacaaacuguaaucccgaauaucgggucuagacccuggguaaggggucuguccaguagaauaagcaucuauuggacaauaguaaaaccgggagacauacuuuugauuaacagcacagggaaucuaauugcuccucgggguuacuucaaaauacgaaaugggaaaagcucaauaaugaggucagaugcacccauuggcaacugcaguucugaaugcaucacuccaaauggaagcauucccaaugacaaaccuuuucaaaauguaaacaggaucacauauggggccugccccagauauguuaagcaaaacacucugaaauuggcaacagggaugcggaauguaccagagaaacaaacuagaggcauauucggcgcaaucgcagguuucauagaaaaugguugggagggaaugguagacgguugguacgguuucaggcaucaaaauucugagggcacaggacaagcagcagaucuuaaaagcacucaagcagcaaucgaccaaaucaacgggaaacugaauagguuaaucgagaaaacgaacgagaaauuccaucaaaucgaaaaagaauucucagaaguagaagggagaauucaggaccucgagaaauauguugaagacacuaaaauagaucucuggucuuacaacgcggagcuucuuguugcccuggagaaccaacauacaauugaucuaacugacucagaaaugaacaaacuguuugaaagaacaaggaagcaacugagggaaaaugcugaggacaugggcaaugguugcuucaaaauauaccacaaaugugacaaugccugcauagggucaaucagaaauggaacuuaugaccaugauguauacagggacgaagcauuaaacaaccgguuccagaucaaagguguugagcugaagucaggauacaaagauuggauccuauggauuuccuuugccauaucaugcuuuuugcuuuguguuguuuugcugggguucaucaugugggccugccaaaaaggcaacauuaggugcaacauuugcauuuga

SEQ ID NO: 40662 - RNA, 1701 nt, Artificial Sequence
  derived and/or modified CDS sequence (wt) from hemagglutinin__InfluenzaA__AFH00208
augaagacuaucauugcuuugagcuacauuuuaugucugguuuucgcccaaaaacuucccggaaaugacaacagcacagcaacgcugugccuggggcaucaugcagugccaaacggaacucuagugaaaacaaucacgaaugaucaaauugaagugacuaaugcuacugagcugguucagaguuccucaacagguagaauaugcgacaguccucaccgaauccucgauggaaaaaacugcacacugauagaugcucuauugggagacccucauugugauggcuuccaaaauaaggaaugggaccuuuuuguugaacgcagcaaagcuuacagcaauuguuacccuuaugaugugccagauuaugccucccuuaggucacuaguugccucaucaggcacccuggaguuuaucaaugaagacuucaauuggacuggagucgcucagaauggggacagcuaugcuugcaaaaggggaucuguuaaaaguuucuuuaguagauugaauugguugcacgaaucagaauacaaauauccagcgcugaacgugacuaugccaaacaaugacaaauuugacaaguuguacauuugggggguucaccacccgagcacggacagagaacaaaccagccuauauauucgagcaucagggagagucacagucucuaccaaaagaagccaacaaacuguaaucccgaauaucggguccagacccuggguaaggggucuguccaguagaauaagcaucuauuggacaauaguaaaaccgggagacauacuuuugauuaauagcaccgggaaucuaauugcuccucgggguuacuucaaaauacgaacugggaaaagcucgguaaugaggucagaugcacccauuggcaccugcaguucugaaugcaucacuccaaauggaagcauccccaaugacaaaccuuuucaaaauguaaacaggaucacauauggggcaugucccagauauguuaagcaaaacacucugaaauuggcaacagggaugcggaauguaccagagaaacaaacuagaggcauauucggcgcaauugcagguuucauagaaaaugguugggagggaaugguagacgguugguacgguuucaggcaucaaaauucugaaggcacaggacaagcagcagaucuuaaaagcacucaagcagcaaucgaccaaaucaacgggaaacugaguagguuaaucgagaaaacgaacgagaaauuccaucaaaucgaaaaggaauucucagaaguagaagggagaauucaggaccucgagaaauauguugaagacacuaaaauagaucucuggucuuacaacgcggagcuucuuguugcccuggagaaccaacauacaauugaucugacugacucagaaaugaacaaacuguuugaaaaaacaaggaagcaacuaagggaaaaugcugaggacaugggcaaugguugcuucaaaauauaccacaaaugugacaaugccugcauagggucaaucagaaauggaacuuaugaccaugauguauacagagacgaagcauuaaacaaccgguuccagaucaaagguguugagcugaagucaggauacaaagauuggauccuauggauuuccuuugccauaucaugcuuuuugcuuuguguuguuuugcugggguucaucaugugggccugccaaaaaggcaacauuaggugcaacauuugcauuuga

SEQ ID NO: 40663 - RNA, 1701 nt, Artificial Sequence
  derived and/or modified CDS sequence (wt) from hemagglutinin__InfluenzaA__AFH00219
augaagacuaucauugcuuugagcuacauuuuaugucugguuuucgcucaaaaacuucccggaaaugacaacagcacagcaacgcugugccugggacaccaugcagugccaaacggaacgcuagugaaaacaaucacgaaugaucaaauugaagugacuaaugcuacugagcugguucagaguuccucaacagguagaauaugcgacaguccucacaggauccuugauggaaaaaacugcacacugauagaugcucuauugggagacccuaauugugauggcuuccaaaauaaggaaugggaccuuuuuguugaacgcagcaaagcuuacagcaacuguuacccuuaugaugugccggauuaugccucccuuaggucacuaguugccucaucaggcacccuggaguuuaccaaugaagacuucaauuggacuggagucgcucaggaugggggaagcuaugcuugcaaaaggggaucuguuaacaguuucuuuaguagauugaauugguugcacaaauuagaauacaaauauccagcgcugaacgugacuaugccaaacaauggcaaauuugacaaauuguacauuugggggguucaccacccgagcacggacagugaccaaaccagccuauauguucgagcaucagggagagucacagucucuaccaaaagaagccaacaaacuguaaccccgaauaucgggucuagacccuggguaaggggucuguccaguagaauaagcaucuauuggacaauaguaaaaccgggagacauacuuuugauuaauagcacaggaaaucuaauugcuccucgggguuacuucaagauacgaaaugggaaaagcucaauaaugaggucagaugcacccauuggcaccugcaguucugaaugcaucacuccaaauggaagcauucccaaugacaaaccuuuucaaaauguaaacaggaucacauauggggccugccccagauauguuaagcaaaacacucugaaauuggcaacagggaugcggaauguaccagagaaacaaacuagaggcauauucggcgcaaucgcagguuucauagaaaaugguugggagggaaugguagacgguugguacgguuucaggcaucaaaauucugagggcacaggacaagcagcagaucuuaaaagcacucaagcagcaaucgaccaaaucaacgggaaacugaauagguuaaucgauaaaacgaacgagaaauuccaucaaaucgaaaaagaauucucagaaguagaagggagaauucaggaccucgagaaauauguugaagacacuaaaauagaucucuggucuuacaacgcggagcuucuuguugcccuggagaaccaacauacaauugaucuaacugacucagaaaugaacaaacuguuugaaaaaacaaggaagcaacugagggaaaaugcugaggacaugggcaaugguugcuucaaaauauaccacaaaugugacaaugccugcauagggucaaucagaaauggaacuuaugaccaugauguauacagagacgaagcauuaaacaaccgguuccagaucaaagguguugagcugaagucaggauacaaagauuggauccuauggauuuccuuugccauaucaugcuuuuugcuuuguguuguuuugcugggguucaucaugugggccugccaaaaaggcaacauuaggugcaacauuugcauuuga

SEQ ID NO: 40664 - RNA, 1701 nt, Artificial Sequence
  derived and/or modified CDS sequence (wt) from hemagglutinin__InfluenzaA__AFH00230
augaagacuaucauugcuuugagcuacauuuuaugucuggucuucgcucaaaaacuucccggaaaugacaacagcacagcaacgcugugccugggacaccaugcagugccaaacggaacgcuagugaaaacaaucacgaaugaucaaauugaagugacuaaugcuacugagcugguucagaguuccucaacagguagaauaugcgacaguccucaccgaauccuugauggaaaaaacugcacacugauagaugcucuauugggagacccucauugugauggcuuccaaaauaaggaaugggaccuuuuuguugaacgcagcaaagcuuacagcaacuguuacccuuaugaugugccggauuaugccucccuuaggucacuaguugccucaucaggcacccuggaguuuaucaaugaagacuucaauuggacuggagucgcucaggaugggaaaagcuaugcuugcaaaaggggaucuguuaaaaguuucuuuaguagauugaauugguugcacaaauuagaauacaaauauccagcgcugaacgugacuaugccaaacaauggcaaauuugacaaauuguacauuugggggguucaccacccgagcacgaacagugaccaaaccagccuauauguucgagcaucagggagagucacagucucuaccaaaagaagccaacaaacuguaaucccgaauaucggguuuagacccuggguaaggggucuguccaguagaauaagcaucuauuggacaauaguaaaaccgggagacauacuuuugauuaauagcacagggaaucuaauugcuccucgggguuacuucaaaauacgaaaugggaaaagcucaauaaugaggucagaugcacccauuggcaacugcaguucugaaugcaucacuccaaauggaagcauucccaaugacaaaccuuuucaaaauguaaacaggaucacauauggggccugccccagauauguuaagcaaaacacucugaaguuggcaacagggaugcggaauguaccagagaaacaaacuagaggcauauucggcgcaaucgcagguuucauagaaaaugguugggagggaaugguagacgguugguacgguuucaggcaucaaaauucugagggcacaggacaagcagcagaucuuaaaagcacucaagcagcaaucgaccaaaucaacgggaaacugaauagguuaaucgagaaaacgaacgagaaauuucaucaaaucgaaaaagaauucucagaaguagaagggagaauucaggaccucgagaaauauguugaagacacuaaaauagaucucuggucuuacaacgcggggcuucuuguugcccuggagaaccaacauacaauugaucuaacugacucagaaaugaacaaacuguuugaaagaacaaggaagcaacugagggaaaaugcugaggacaugggcaaugguugcuucaaaauauaccacaaaugugacaaugccugcauagggucaaucagaaauggaacuuaugaccaugauguauacagagacgaagcauuaaacaaccgguuccagaucaaagguguugagcugaagucaggauacaaagauuggauccuauggauuuccuuugccauaucaugcuuuuugcuuuguguuguuuugcugggguucaucaugugggccugccaaaaaggcaacauuaggugcaacauuugcauuuga

SEQ ID NO: 40665 - RNA, 1701 nt, Artificial Sequence
  derived and/or modified CDS sequence (wt) from hemagglutinin__InfluenzaA__AFH00241
augaagacuaucauugcuuugagcuacauuuuaugucugguuuucgcucaaaaacuucccggaaaugacaacagcacagcaacgcugugccugggacaccaugcagugccaaacggaacgcuagugaaaacaaucacgaaugaucaaauugaagugacuaaugcuacugagcugguucagaguuccucaacagguagaauaugcgacaguccucaccgaauccuugauggaaaaaacugcacacugauagaugcucuauugggagacccucauugugauggcuuccaaaauaaggaaugggaccuuuuuguugaacgcagcaaagcuuacagcaacuguuacccuuaugaugugccggauuaugccucccuuaggucacuaguugccucaucaggcacccuggaguuuaucaaugaagacuucaauuggacuggagucgcucaggaugggaaaagcuaugcuugcaaaaggggaucuguuaacaguuucuuuaguagauugaauugguugcacaaauuagaauacaaauauccagcgcugaacgugacuaugccaaacaauggcaaauuugacaaauuguacauuugggggguucaccacccgagcacggacagugaccaaaccagccuauauguucgagcaucagggagagucacagucucuaccaaaagaagccaacaaacuguaaucccgaauaucggguuuagacccuggguaaggggucuguccaguagaauaagcaucuauuggacaauaguaaaaccgggagacauacuuuugauuaauagcacagggaaucuaauugcuccucgggguuacuucaaaauacgaaaugggaaaagcucaauaaugaggucagaugcacccauuggcaacugcaguucugaaugcaucacuccaaauggaagcauucccaaugacaaaccuuuucaaaauguaaacaggaucacauauggggccugccccagauauguuaagcaaaacacucugaaguuggcaacagggaugcggaauguaccagagaaacaaacuagaggcauauucggcgcaaucgcagguuucauagaaaaugguugggagggaaugguagacgguugguacgguuucaggcaucaaaauucugagggcacaggacaagcagcagaucuuaaaagcacucaagcagcaaucgaccaaaucaacgggaaacugaauagguuaaucgagaaaacgaacgagaaauuucaucaaaucgaaaaagaauucucagaaguagaagggagaauucaggaccucgagaaauauguugaagacacuaaaauagaucucuggucuuacaacgcggggcuucuuguugcccuggagaaccaacauacaauugaucuaacugacucagaaaugaacaaacuguuugaaagaacaaggaagcaacugagggaaaaugcugaggacaugggcaaugguugcuucaaaauauaccacaaaugugacaaugccugcauagggucaaucagaaauggaacuuaugaccaugauguauacagagacgaagcauuaaacaaccgguuccagaucaaagguguugagcugaagucaggauacaaagauuggauccuauggauuuccuuugccauaucaugcuuuuugcuuuguguuguuuugcugggguucaucaugugggccugccaaaaaggcaacauuaggugcaacauuugcauuuga

SEQ ID NO: 40666 - RNA, 1701 nt, Artificial Sequence
  derived and/or modified CDS sequence (wt) from hemagglutinin__InfluenzaA__AFH00252
augaagacuaucauugcuuugagcuacauuuuaugucugguuuucgcccaaaaacuucccggaaaugacaacagcacagcaacgcugugccuggggcaucaugcagugccaaacggaacucuagugaaaacaaucacgaaugaucaaauugaagugacuaaugcuacugagcugguucagaguuccucaacagguagaauaugcgacaguccucaccgaauccucgauggaaaaaacugcacacugauagaugcucuauugggagacccucauugugaugacuuccaaaauaaggaaugggaccuuuuuguugaacgcagcaaagcuuacagcaauuguuacccuuaugaugugccagauuaugccucccuuaggucacuaguugccucaucaggcacccuggaguuuaucaaugaagacuucaauuggacuggagucgcucagaguggggacagcuaugcuugcaaaaggggaucuguuaaaaguuucuuuaguagauugaauugguugcacgaaucagaauacaaauauccagcgcugaacgugacuaugccaaacaaugacaaauuugacaaguuguacauuugggggguucaccacccaagcacggacagagaacaaaccagccuauauauucgagcaucagggagagucacagucucuaccaaaagaagccaacaaacuguaaucccgaauaucggguccagacccuggguaaggggucuguccaguagaauaagcaucuauuggacaauaguaaaaccgggagacauacuuuugauuaauagcaccgggaaucuaauugcuccacgggguuacuucaaaauaagaacugggaaaagcucgauaaugaggucagaugcacccauuggcaccugcaguucugaaugcaucacuccaaauggaagcauccccaaugacaaaccuuuucaaaauguaaacaggaucacauauggggcaugucccagauauguuaagcaaaacacucugaaauuggcaacagggaugcggaauguaccagagaaacaaacuagaggcauauucggcgcaauugcagguuucauagaaaaugguugggagggaaugguagacgguugguacgguuucaggcaucaaaauucugaaggcacaggacaagcagcagaucuuaaaagcacucaagcagcaaucgaccaaaucaacgggaaacugaauagguuaaucgagaaaacgaacgagaaauuccaucaaaucgaaaaggaauucucagaaguagaagggagaauucaggaccucgagaaauauguugaagacacuaaaauagaucucuggucuuacaacgcggagcuucuuguugcccuggagaaccaacauacaauugaucugacugacucagaaaugaacaaacuguuugaaaaaacaaggaagcaacugagggaaaaugcugaggacaugggcaaugguugcuucaaaauauaccacaaaugugacaaugccugcauagggucaaucagaaauggaacuuaugaccaugauguauacagagacgaagcauuaaacaaccgguuccagauaaaagguguugagcugaagucaggauacaaagauuggauccuauggauuuccuuugccauaucaugcuuuuugcuuuguguuguuuugcugggguucaucaugugggccugccaaaaaggcaacauuaggugcaacauuugcauuuga

SEQ ID NO: 40667 - RNA, 1701 nt, Artificial Sequence
  derived and/or modified CDS sequence (wt) from hemagglutinin__InfluenzaA__AFH00263
augaagacuaucauugcuuugagcuacauuuuacaucugguuuucgcucaaaaacuucccggaaaugacaacagcacagcaacgcugugccugggacaccaugcagugccaaacggaacgcuagugaaaacaaucacgaaugaucaaauugaagugacuaaugcuacugagcugguucagaguuccucaacagguagaauaugcgacaguccucaccgaauccuugauggaaaaaacugcacacugauagaugcucuauugggagacccuaauugugauggcuuccaaaauaaggaaugggaccuuuuuguugaacgcagcaaagcuuacagcaacuguuacccuuaugaugugccggauuaugccucccuuaggucacuaguugccucaucaggcacccuggaguuuaccaaugaagacuucaauuggacuggagucgcucaggaugggggaagcuaugcuugcaaaaggggaucuguuaacaguuucuuuaguagauugaauugguugcacaaauuagaauacaaauauccagcgcugaacgugacuaugccaaacaauggcaaauuugacaaauuguacauuugggggguucaccacccgagcacggacaguguccaaaccagccuauauguucgagcaucagggaaagucacagucucuaccaaaagaagccaacaaacuguaaccccgaauaucgggucuaaacccuggguaaggggucuguccaguagaauaagcaucuauuggacaauaguaaaaccgggagacauacuuuugauuaauagcacaggaaaucuaauugcuccucgggguuacuucaaaauacgaaaugggaaaagcucaauaaugaggucagaugcacccauuggcaccugcaguucugaaugcaucacuccaaauggaagcauucccaaugacaaaccuuuucaaaauguaaacaggaucacauauggggccugccccagauauguuaagcaaaacacucugaaauuggcaacagggaugcggaauguaccagagaaacaaacuagaggcauauucggcgcaaucgcagguuucauagaaaaugguugggagggaaugguagacgguugguacgguuucaggcaucaaaauucugagggcacaggacaagcagcagaucuuaaaagcacucaagcagcaaucgaccaaaucaacgggaaacugaauagguuaaucgagaaaacgaacgagaaauuccaucaaaucgaaaaagaauucucagaaguagaagggagaauucaggaccucgagaaauauguugaagacacuaaaauagaucucuggucuuacaacgcggagcuucuuguugcccuggagaaccaacauacaauugaucuaacugacucagaaaugaacaaacuguuugaaaaaacaaggaagcaacugagggaaaaugcugaggacaugggcaaugguugcuucaaaauauaccacaaaugugacaaugccugcauagggucaaucagaaauggaacuuaugaccaugauguauacagagacgaagcauuaaacaaccgguuccagaucaaagguguugagcugaagucaggauacaaagauuggauccuauggauuuccuuugccauaucaugcuuuuugcuuuguguuguuuugcugggguucaucaugugggccugccaaaaaggcaacauuaggugcaacauuugcauuuga

SEQ ID NO: 40668 - RNA, 1701 nt, Artificial Sequence
  derived and/or modified CDS sequence (wt) from hemagglutinin__InfluenzaA__AFH00274
augaagacuaucauugcuuugagcuacauuuuaugucugguuuucgcucaaaaacuucccggaaaugacaacagcacagcaacgcugugccugggacaccaugcagugccaaacggaacgcuagugaaaacaaucacgaaugaucaaauugaagugacuaaugcuacugagcugguucagaguuccucaacagguagaauaugcgacaguccucaccgaauccuugauggaaaaaacugcacacugauagaugcucuauugggagacccucauugugauggcuuccaaaauaaggaaugggaccuuuuuguugaacgcagcaaagcuuacagcaacuguuacccuuaugaugugccggauuaugccucccuuaggucacuaguugccucaucaggcacccuggaguuuaucaaugaagacuucaauuggacuggagucgcucaggaugggaaaagcuaugcuugcaaaaggggaucuguuaacaguuucuuuaguagauugaauuggcugcacaaauuagaauacaaauauccagcgcugaacgugacuaugccaaacaauggcaaauuugacaaauuguacauuugggggguucaccacccgagcacggacagugaccaaaccagccuauauguucgagcaucagggagagucacagucucuaccaaaagaagccaacaaacuguaaucccgaauaucggguuuagacccuggguaaggggucuguccaguggaauaagcaucuauuggacaauaguaaaaccgggagacauacuuuugauuaauagcacagggaaucuaauugcuccucgggguuacuucaaaauacgaaaugggaaaagcucaauaaugaggucagaugcacccauuggcaacugcaguucugaaugcaucacuccaaauggaagcauucccaaugacaaaccuuuucaaaauguaaacaggaucacauauggggccugccccagauauguuaagcaaaacacucugaaguuggcaacagggaugcggaauguaccagagaaacaaacuagaggcauauucggcgcaaucgcagguuucauagaaaaugguugggagggaaugguagacgguugguacgguuucaggcaucaaaauucugagggcacaggacaagcagcagaucuuaaaagcacucaagcagcaaucgaccaaaucaacgggaaacugaauagguuaaucgagaaaacgaacgagaaauuccaucaaaucgaaaaagaauucucagaaguagaagggagaauucaggaccucgagaaauauguugaagacacuaaaauagaucucuggucuuacaacgcggggcuucuuguugcccuggagaaccaacauacaauugaucuaacugacucagaaaugaacaaacuguuugaaagaacaaggaagcaacugagggaaaaugcugaggacaugggcaaugguugcuucaaaauauaccacaaaugugacaaugccugcauagggucaaucagaaauggaacuuaugaccaugauguauacagagacgaagcauuaaacaaccgguuccagaucaaaggugucgagcugaagucaggauacaaagauuggauccuauggauuuccuuugccauaucaugcuuuuugcuuuguguuguuuugcugggguucaucaugugggccugccaaaaaggcaacauuaggugcaacauuugcauuuga

SEQ ID NO: 40669 - RNA, 1701 nt, Artificial Sequence
  derived and/or modified CDS sequence (wt) from hemagglutinin__InfluenzaA__AFH00285
augaagacuaucauugcuuugagcuacauuuuaugucugguuuucgcucaaaaacuucccggaaaugacaacagcacagcaacgcugugccugggacaucaugcagugccaaacggaacgcuagugaaaacaaucacgaaugaucaaauugaagugacuaaugcuacugaguugguucagaguuccucaacagguagaauaugcggcaguccucaccgaauccuugauggaaaaaacugcacacugauagaugcucuauugggagacccucauugugauggcuuccaaaauaaggaaugggaccuuuuuguugaacgcagcaaagcuuacagcaacuguuacccuuaugaugugccggauuaugccucccuuaggucacuaguugccucaucaggcacccuggaguuuaucaaugaagacuucaauuggacuggagucgcucaggaugggggaagcuaugcuugcaaaagaggaucuguuaacaguuucuuuaguagauugaauugguugcacaaauuagaauacaaauauccagcgcugaacgugacuaugccaaacaauggcaaauuugacaaauuguacauuugggggguucaccacccgagcacggacagugaccaaaccagccuauauguucgagcaucagggagagucacagucucuaccaaaagaagccaacaaacuguaaccccgaauaucgggucuagacccuggguaaggggucaguccaguagaauaagcaucuauuggacaauaguaaaaccgggagacauacuuuugauuaauagcacagggaaucuaauugcuccucgggguuacuucaaaauacgaaaugggaaaagcucaauaaugaggucagaugcacccauuggcaacugcaguucugaaugcaucacuccaaauggaagcauucccaaugacaaaccuuuucaaaauguaaacagaaucacauauggggccugccccagauauguuaagcaaaacacucugaaauuggcaacagggaugcggaauguaccagagaaacaaacuagaggcauauucggcgcaaucgcagguuucauagaaaaugguugggagggaaugguagacgguugguacgguuucaggcaucaaaauucugagggcacaggacaagcagcagaucuuaaaagcacucaagcagcaaucgaccaaaucaacgggaaacugaauagguuaaucgagaaaacgaacgagaaauuccaucaaaucgaaaaagaauucucagaaguagaagggagaauucaggaccucgagaaauauguugaagacacuaaaauagaucucuggucuuacaacgcggagcuucuuguugcccuggagaaccaacauacaauugaucuaacugacucagaaaugaacaaacuguuugaaaaaacaaggaagcaacugagggaaaaugcugaggacaugggcaaugguugcuucaaaauauaccacaaaugugacaaugccugcauagggucaaucagaaauggaacuuaugaccaugauguauacagagacgaagcauuaaacaaccgguuccagaucaaagguguugagcugaagucaggauacaaagauuggauccuauggauuuccuuugccauaucaugcuuuuugcuuuguguuguuuugcugggguucaucaugugggccugccaaaaaggcaacauuaggugcaacauuugcauuuga

SEQ ID NO: 40670 - RNA, 1701 nt, Artificial Sequence
  derived and/or modified CDS sequence (wt) from hemagglutinin__InfluenzaA__AFH00296
augaagacuaucauugcuuugagcuacauuuucugucugguuuucgcccaaaaacuucccggaaaugacaacagcacagcaacgcugugccugggacaucaugcagugccaaacggaacacuagugaaaacaaucacgaaugaucaaauugaagugacuaaugcuacugagcugguucagaguuccucaacagguagaauaugcgacaguccucaccgaauccuugauggaaaaaacugcacacugauagaugcucuauugggagacccucauugugauggcuuucaaaauaaggaaugggaccuuuuuguugaacgcagcaaagcuuacagcaacuguuacccuuaugaugugccggauuaugccucccuuaggucacuaguugccucaucaggcacccuggaguuuaucaaugaagacuucaauuggacuggagucgcucagagugggggaagcuaugcuugcaaaaggggaucuguuaacaguuucuuuaguagauugaauugguugcacgaaucagaauacaaauauccagcgcugaacgugacuaugccaaacaauggcaaauuugacaaauuguacauuugggggguucaccacccgagcacggacagagaacaaaccaaccuauauguucgagcaucagggagagucacagucucaaccaaaagaagccagcaaacuguaaucccgaauaucgggucuagacccuggguaaggggucuguccaguagaauaagcaucuauuggacaauaguaaaaccgggagacauacuuuugauuaauagcaccgggaaccuaauugcuccucgggguuacuucaaaauacgaacugggaaaagcucaauaaugaggucagaugcacccauuggcaccugcaguucugaaugcaucacuccaaauggaagcauucccaaugacaaacccuuucaaaauguaaacaggaucacauauggggcaugucccagauauguuaagcaaaacacucugaaauuggcaacagggaugcggaauguaccagagaaacaaacuagaggcauauucggcgcaaucgcagguuucauagaaaaugguugggagggaaugguagacgguugguacgguuucaggcaucaaaauucugagggcacaggacaagcagcagaucuuaaaagcacucaagcagcaaucgaccaaaucaacgggaaacugaauagguuaaucgagaaaacgaacgagaaauuccaucaaaucgaaaaggaauucucagaaguagaagggagaauucaggaccucgagaaauauguugaagacacuaaaauagaucucuggucuuacaacgcggagcuucuugucgcccuggagaaccaacauacaauugaucugacugacucagaaaugaacaaacuguuugaaaaaacaaggaagcaacugagggaaaaugcugaggacaugggcaaugguugcuucaaaauauaccacaaaugugacaaugccugcauagggucaaucagaaauggaacuuaugaccaugauguauacagagacgaagcauuaaacaaccgguuccagaucaaagguguugagcugaagucaggauacaaagacuggauccuauggauuuccuuugccacaucaugcuuuuugcuuuguguuguuuugcugggguucaucaugugggccugccaaaaaggcaacauuaggugcaacauuugcauuuga

SEQ ID NO: 40671 - RNA, 1701 nt, Artificial Sequence
  derived and/or modified CDS sequence (wt) from hemagglutinin__InfluenzaA__AFH00307
augaagacuaucauugcuuugagcuacauuuuaugucugguuuucgcucaaaaacuucccggaaaugacaacagcacagcaacgcugugccugggacaucaugcagugccaaacggaacgcuagugaaaacaaucacgaaugaucaaauugaagugacuaaugcuacugaguugguucagaguuccucaacagguagaauaugcgacaguccucaccgaauccuugauggaaaaaacugcacacugauagaugcucuauugggagacccucauugugauggcuuccaaaauaaggaaugggaccuuuuuguugaacgcagcaaagcuuacagcaacuguuacccuuaugaugugccggauuaugccucccuuaggucacuaguugccucaucaggcacccuggaguuuaucaaugaagacuucaauuggacuggagucgcucaggaugggggaagcuaugcuugcaaaaggggaucuguuaacaguuucuuuaguagauugaauugguugcacaaauuagaauacaaauauccagcgcugaacgugacuaugccaaacaauggcaaauuugacaaauuguacauuugggggguucaccacccgagcacggacagugaccaaaccagccuauauguuagagcaucagggagagucacagucucuaccaaaagaagccaacaaacuguaaccccgaauaucgggucuagacccuggguaaggggucaguccaguagaauaagcaucuauuggacaauaguaaaaccgggagacauacuuuugauuaauagcacagggaaucuaauugcuccucgggguuacuucaaaauacgaaaugggaaaagcucaauaaugaggucagaugcacccauuggcaacugcaguucugaaugcaucacuccaaauggaagcauucccaaugacaaaccuuuucaaaauguaaacaggaucacauauggggccugccccagauauguuaagcaaaacacucugaaauuggcaacagggaugcggaauguaccagagaaacaaacuagaggcauauucggcgcaaucgcagguuucauagaaaaugguugggagggaaugguagacgguugguacgguuucaggcaucaaaauucugagggcacaggacaagcagcagaucuuaaaagcacucaagcagcaaucgaccaaaucaacgggaaacugaauagguuaaucgagaaaacgaacgagaaauuccaucaaaucgaaaaagaauucucagaaguagaagggagaauucaggaccucgagaaauauguugaagacacuaaaauagaucucuggucuuacaacgcggagcuucuuguugcccuggagaaccaacauacaauugaucuaacugacucagaaaugaacaaacuguuugaaaaaacaaggaagcaacugagggaaaaugcugaggacaugggcaaugguugcuucaaaauauaccacaaaugugacaaugccugcauagggucaaucagaaauggaacuuaugaccaugauguauacagagacgaagcauuaaacaaccgguuccagaucaaagguguugagcugaagucaggauacaaagauuggauccuauggaucuccuuugccauaucaugcuuuuugcuuuguguuguuuugcugggguucaucaugugggccugccaaaaaggcaacauuaggugcaacauuugcauuuga

SEQ ID NO: 40672 - RNA, 1701 nt, Artificial Sequence; identical to SEQ ID NO: 40671
  derived and/or modified CDS sequence (wt) from hemagglutinin__InfluenzaA__AFH00318

SEQ ID NO: 40673 - RNA, 1701 nt, Artificial Sequence
  derived and/or modified CDS sequence (wt) from hemagglutinin__InfluenzaA__AFH00329
augaagacuaucauugcuuugagcuacauuuuaugucugguuuucgcucaaaaacuucccggaaaugacaacagcacagcaacgcugugccugggacaccaugcagugccaaacggaacgcuagugaaaacaaucacgaaugaucaaauugaagugacuaaugcuacugagcugguucagaguuccucaacagguagaauaugcgacagucaucaccgaauccuugauggaaaaaacugcacacugauagaugcucuauugggagacccucauugugauggcuuccaaaauaaggaaugggaccuuuuuguugaacgcagcaaagcuuacagcaacuguuacccuuaugaugugccggauuaugccucccuuaggucacuaguugccucaucaggcacccuggaguuuaucaaugaagacuucaauuggacuggagucgcucaggaugggaaaagcuaugcuugcaaaaggggaucuguuaacaguuucuuuaguagauugaauugguugcacaaauuagaauacaaauauccagcgcugaacgugacuaugccaaacaauggcaaauuugacaaauuguacauuugggggguucaccacccgagcacggacagugaccaaaccagcauauauguucgagcaucagggagagucacagucucuaccaaaagaagccaacaaacuguaaucccgaauaucggaucuagacccuggguaagggguaucuccaguagaauaagcaucuauuggacaauaguaaaaccgggagacauacuuuugauuaauagcacagggaaucuaauugcuccucgggguuacuucaaaauacgaaaugggaaaagcucaauaaugaggucagaugcacccauuggcaacugcaauucugaaugcaucacuccaaauggaagcauucccaaugacaaaccuuuucaaaauguaaacaggaucacauauggggccugccccagauauguuaagcaaaacacucugaaauuggcaacagggaugcggaauguaccagagaaacaaacuagaggcauauucggcgcaaucgcagguuucauagaaaaugguugggagggaaugguggacgguugguacgguuucaggcaucaaaauucugagggcacaggacaagcagcagaucuuaaaagcacucaagcagcaaucgaccaaaucaacgggaaacugaauagguuaaucgagaaaacgaacgagaaauuccaucaaaucgaaaaagaauucucagaaguagaagggagaauccaggaccucgagaaauauguugaagacacuaaaauagaucucuggucuuacaacgcggagcuucuuguugcccuggagaaccaacauacaauugaucuaacugacucagaaaugaacaaacuguuugaaagaacaaggaagcaacugagggaaaaugcugaggacaugggcaaugguugcuucaaaauauaccacaaaugugacaaugccugcauagggucaaucagaaauggaacuuaugaccaugauguauacagagacgaagcacuaaacaaccgguuccagaucaaagguguugagcugaagucaggauacaaagauuggauccuauggauuuccuuugccacaucaugcuuuuugcuuuguguuguuuugcugggguucaucaugugggccugccaaaaaggcaacauuaggugcaacauuugcauuuaa

SEQ ID NO: 40674 - RNA, 1701 nt, Artificial Sequence
  derived and/or modified CDS sequence (wt) from hemagglutinin__InfluenzaA__AFH00340
augaagacuaucauugcuuugagcuacauuuuaugucugguuuucgcucaaaaacuucccggaaaugacaacagcacagcaacgcugugccugggacaccaugcagugccaaacggaacgcuagugaaaacaaucacgaaugaucaaauugaagugacuaaugcuacugagcugguucagaguuccucaacagguagaauaugcgacaguccucaccgaauccuugauggaaaaaacugcacacugauagaugcucuauugggagacccucauugugauggcuuccaaaauaaggaaugggaccuuuuuguugaacgcagcaaagcuuacagcaacuguuacccuuaugaugugccggauuaugccucccuuaggucacuaguugccucaucaggcacccuggaguuuaucaaugaagacuucaauuggacuggagucgcucaggaugggaaaagcuaugcuugcaaaaggggaucuguuaacaguuucuuuaguagauugaauugguugcacaaauuagaauacaaauauccagcgcugaacgugacuaugccaaacaauggcaaauuugacaaauuguacauuugggggguucaccacccgagcacagacagugaccaaaccagccuauauguucgagcaucagggagagucacagucucuaccaaaagaagccaacaaacuguaaucccgaauaucggguuuagacccuggguaaggggucuguccaguagaauaagcaucuauuggacaauaguaaaaccgggagacauacuuuugauuaguagcacagggaaucuaauugcuccucgggguuacuucaaaauacgaaaugggaaaagcucaauaaugaggucagaugcacccauuggcaacugcaguucugaaugcaucacuccaaauggaagcauucccaaugacaaaccuuuucaaaauguaaacaggaucacauauggggccugccccagauauguuaagcaaaacacucugaaguuggcaacagggaugcggaauauaccagagaaacaaacuagaggcauauucggcgcaaucgcagguuucauagaaaaugguugggagggaaugguagacgguugguacgguuucaggcaucaaaauucugagggcacaggacaagcagcagaucuuaaaagcacucaagcagcaaucgaccaaaucaacgggaaacugaauagguuaaucgagaaaacgaacgagaaauuccaucaaaucgaaaaagaauucucagaaguagaagggagaauucaggaccucgagaaauauguugaagacacuaaaauagaucucuggucuuacaacgcggggcuucuuguugcccuggagaaccaacauacaauugaucuaacugacucagaaaugaacaaacuguuugaaagaacaaggaagcaacugagggaaaaugcugaggacaugggcaaugguugcuucaaaauauaccacaaaugugacaaugccugcauagggucaaucagaaauggaacuuaugaccaugauguauacagagacgaagcauuaaacaaccgguuccagaucaaagguguugagcugaagucaggauacaaagauuggauccuauggauuuccuuugccauaucaugcuuuuugcuuuguguuguuuugcugggguucaucaugugggccugccaaaaaggcaacauuaggugcaacauuugcauuuga

SEQ ID NO: 40675 - RNA, 1701 nt, Artificial Sequence
  derived and/or modified CDS sequence (wt) from hemagglutinin__InfluenzaA__AFH00351
augaagacuaucauugcuuugagcuacauuuuaugucugguuuucgcucaaaaacuucccggaaaugacaacagcacagcaacgcugugccugggacaccaugcagugccaaacggaacgcuagugaaaacaaucacgaaugaucaaauugaagugacuaaugcuacugagcugguucagaguuccucaacagguagaauaugcgacaguccucaccgaauccuugauggaaaaaacugcacacugauagaugcucuauugggagacccucauugugauggcuuccaaaauaaggaaugggaccuuuuuguugaacgcagcaaagcuuacagcaacuguuacccuuaugaugugccggauuaugccucccuuaggucacuaguugccucaucaggcacccuggaguuuaccaaggaaggcuucaauuggacuggagucgcucaggaugggaaaagcuaugcuugcaaaaggggaucuguuaaaaguuucuuuaguagauugaauugguugcacaaauuagaauacaaauauccagcacugaacgugacuaugccaaacaaugacaaauuugacaaauuguacauuugggggguucaccacccgagcacggacagugaccaaaccagccuauauguucaagcaucagggagagucacagucucuaccaaaagaagccaacaaacuguaaucccgaauaucgggucuagacccuggguaagggguaucuccaguagaauaagcaucuauuggacaauaguaaaaccgggagacauacuuuugauuaacagcacagggaaucuaauugcuccucgggguuacuucaaaauacgaaaugggaaaagcucaauaaugaggucagaugcacccauuggcaacugcaauucugaaugcaucacuccagauggaagcauucccaaugacaaaccuuuucaaaauguaaacaggaucacauauggggccugucccagauauguuaagcaaaacacucugaaguuggcaacagggaugcggaauguaccagagaaacaaacuagaggcauauucggcgcaaucgcagguuucauagaaaaugguugggagggaaugguagacgguugguacgguuucaggcaucaaaauucugagggcacaggacaagcagcagaucuuaaaagcacucaagcagcaaucgaccaaaucaacgggaaacugaauagguuaaucgagaaaacgaacaagaaauuccaucaaaucgaaaaagaauucucagaaguagaagggagaauucaggaccucgagaaauauguugaagacacuaaaauagaucucuggucuuacaacgcggagcuucuuguugcccuggagaaccaacauacaauugaucuaacugacucagaaaugaacaaacuguuugaaagaacaaggaagcaacugagggaaaaugcugaggacaugggcaaugguugcuucaaaauauaccacaaaugugacaaugccugcauagggucaaucagaaauggaacuuaugaccaugauguauacagagacgaagcauuaaacaaccgguuccagaucaaagguguugagcugaagucaggauacaaagauuggauccuauggauuuccuuugccauaucaugcuuuuugcuuuguguuguuuugcugggguucaucaugugggccugccaaaaaggcaacauuaggugcaacauuugcauuuga

SEQ ID NO: 40676 - RNA, 1701 nt, Artificial Sequence
  derived and/or modified CDS sequence (wt) from hemagglutinin__InfluenzaA__AFH00362
augaagacuaucauugcuuugagcuacauuuuaugucugguuuucgcucaaaaacuucccggaaaugacaacagcacagcaacgcugugccugggacaccaugcagugccaaacggaacgcuagugaaaacaaucacgaaugaucaaauugaagugacuaaugcuacugagcugguucagaguuccucaacagguagaauaugcgacaguccucaccgaauccuugauggaaaaaacugcacacugauagaugcucuauugggagacccucauugugauggcuuccaaaauaaggaaugggaccuuuuuguugaacgcagcaaagcuuacagcaacuguuacccuuaugaugugccggauuaugccucccuuaggucacuaguugccucaucaggcacccuggaguuuaccaaugaaggcuucaauuggacuggggucgcucaggaugggaaaagcuaugcuugcaaaaggggaucuguuaaaaguuucuuuaguagauugaauugguugcacaaauuagaauacaaauauccagcacugaacgugacuaugccaaacaaugacaaauuugacaaauuguacauuugggggguucaccacccgagcacggacagugaccaaaccagccuauauguucaagcaucagggagagucacagucucuaccaaaagaagccaacaaacuguaaucccgaauaucggguccagacccugggugaggggcaucuccaguagaauaagcaucuauuggacaauaguaaaaccgggagacauacuuuugauuaacagcacagggaaucuaauugcuccucgggguuacuucaaaauacgaaaugggaaaagcucaauaaugaggucagaugcacccauugacaacugcaauucugaaugcaucacuccaaauggaagcauucccaaugacaaaccuuuucaaaauguaaacaggaucacauauggggccugucccagauauguuaagcaaaacacucugaaauuggcaacagggaugcggaauguaccagagaaacaaacuagaggcauauucggcgcaaucgcagguuucauagaaaaugguugggagggaaugguagacgguugguacgguuucaggcaucaaaauucugagggcacaggacaagcagcagaucuuaaaagcacucaagcagcaaucgaucaaaucaacgggaaacugaauagguuaaucgagaaaacgaacgagaaauuccaucaaaucgaaaaagaauucucagaaguagaagggagaauucaggaccucgagaaauauguugaagacacuaaaauagaucucuggucuuacaacgcugagcuucuuguugcccuggagaaucaacauacaauugaucuaacugacucagaaaugaacaaacuguuugaaagaacaaggaagcaacugagggaaaaugcugaggacaugggcaaugguugcuucaaaauauaccacaaaugugacaaugccugcauagggucaaucagaaauggaacuuaugaccaugauguauacagagacgaagcauuaaacaaccgguuccagaucaaagguguugagcugaagucaggauacaaagauuggauccuauggauuuccuuugccacaucaugcuuuuugcuuuguguuguuuugcugggguucaucaugugggccugccaaaaaggcaacauuaggugcaacauuugcauuuga

SEQ ID NO: 40677 - RNA, 1701 nt, Artificial Sequence
  derived and/or modified CDS sequence (wt) from hemagglutinin__InfluenzaA__AFH00384
augaagaccaucauugcuuugagcuacauuuuaugucugguuuucgcucaaaaacuucccggaaaugacaacagcacagcaacgcugugccugggacaccaugcagugccaaacggaacgcuagugaaaacaaucacgaaugaucaaauugaagugacuaaugcuacugagcugguucagaguuccucaacagguagaauaugcgacaguccucaccgaauccuugauggaaaaaacugcacacugauagaugcucuauugggagacccucauugugauggcuuccaaaauaaggaaugggaccuuuuuguugaacgcagcaaagcuuacagcaacuguuacccuuaugaugugccggauuaugccucccuuaggucacuaguugccucaucaggcacccuggaguuuaccaaggaaggcuucaauuggacuggagucgcucaggaugggaaaagcuaugcuugcaaaaggggaucuguuaacaguuucuuuaguagauugaauugguugcacaaauuagaauacaaauauccagcacugaacgugacuaugccaaacaaugacaaauuugacaaauuguacauuugggggguucaccacccgagcacggacagugaccaaaccagccuauauguucaagcaucagggagagucacagucucuaccaaaagaagccaacaaacuguaaucccgaauaucgggucuagacccuggguaagggguaucuccaguagaauaagcaucuauuggacaauaguaaaaccgggagacauacuuuugauuaacagcauagggaaucuaauugcuccucgggguuacuucaaaauacgaaaugggaaaagcucaauaaugaggucagaugcacccauuggcaacugcaauucugaaugcaucacuccaaauggaagcauucccaaugacaaaccuuuucaaaauguaaacaggaucacauauggggccugucccagauauguuaagcaaaacacucugaaguuggcaacagggaugcggaauguaccagagaaacaaacuagaggcauauucggcgcaaucgcagguuucauagaaaaugguugggagggaaugguagacgguugguacgguuucaggcaucaaaauucugagggcacaggacaagcagcagaucuuaaaagcacucaagcagcaaucgaccaaaucaacgggaagcugaauagguuaaucgagaaaacgaacgaaaaauuccaucaaaucgaaaaagaauucucagaaguagaagggagaauucaggaccucgagaaauauguugaagacacuaaaauagaucucuggucuuacaacgcggggcuucuuguugcccuggagaaccaacauacaauugaucuaacugacucagaaaugaacaaacuguuugaaagaacaaggaagcaacugagggaaaaugcugaggacaugggcaaugguugcuucaaaauauaccacaaaugugacaaugccugcauagggucaaucagaaauggaacuuaugaccaugauguauacagagacgaagcauuaaacaaccgguuccagaucaaagguguugagcugaagucaggauacaaagauuggauccuauggauuuccuuugccauaucaugcuuuuugcuuuguguuguuuugcugggguucaucaugugggccugccaaaaaggcaacauuaggugcaacauuugcauuuga

SEQ ID NO: 40678 - RNA, 1701 nt, Artificial Sequence
  derived and/or modified CDS sequence (wt) from hemagglutinin__InfluenzaA__AFH00395
augaaggcuaucauugcuuugagcuacauuuuaugucugguuuucgcucaaaaacuucccggaaaugacaacagcacagcaacgcugugccugggacaccaugcagugccaaacggaacgcuagugaaaacaaucacgaaugaucaaauugaagugacuaaugcuacugagcugguucagaguuccucaacagguagaauaugcgacaguccucaccgaauccuugauggaaaaaacugcacacugauagaugcucuauugggagacccucauugugauggcuuccaaaauaaggaaugggaccuuuuuguugaacgcagcaaagcuuacagcaacuguuacccuuaugaugugccggauuaugccucccuuaggucacuaguugccucaucaggcacccuggaguuuaccaaggaaggcuucaauuggacuggagucgcucaggaugggaaaagcuaugcuugcaaaaggggaucuguuaacgguuucuuuaguagauugaauugguugcacaaauuagaauacaaauauccagcacugaacgugacuaugccaaacaaugacaaauuugacaaauuguacauuugggggguucaccacccgagcacggacagugaccaaaccagccuauauguucaagcaucagggagagucacagucucuaccaaaagaagccaacaaacuguaaucccgaauaucgggucuagacccuggguaagggguaucuccaguagaauaagcaucuauuggacaauaguaaaaccgggagacauacuuuugauuaaaagcacagggaaucuaauugcuccucgggguuacuucaaaauacgaaaugggaaaagcucaauaaugaggucagaugcacccauuggcaacugcaauucugaaugcaucacuccaaauggaagcauucccaaugacaaaccuuuucaaaauguaaacaggaucacauauggggccugucccagauauguuaagcaaaacacucugaaguuggcaacagggaugcggaauguaccagagaaacaaacuagaggcauauucggcgcaaucgcagguuucauagaaaaugguugggagggaaugguagaugguugguacgguuucaggcaucaaaauucugagggcacaggacaagcagcagaucuuaaaagcacucaagcagcaaucgaccaaaucaacgggaaacugaauagguuaaucgagaaaacgaacgagaaauuccaucaaaucgaaaaagaauucucagaaguagaagggagaauucaggaccucgagaaauauguugaagacacuaaaauagaucucuggucuuacaacgcggagcuucuuguugcccuggagaaccaacauacaauugaucuaacugacucagaaaugaacaaacuguuugaaagaacaaggaagcaacugagggaaaaugcugaggacaugggcaaugguugcuucaaaauauaccacaaaugugacaaugccugcauagggucaaucagaaauggaacuuaugaccaugauguauacagagacgaagcauuaaacaaccgguuccagaucaaagguguugagcugaagucaggauacaaagauuggauccuauggauuuccuuugccauaucaugcuuuuugcuuuguguuguuuugcugggguucaucaugugggccugccaaaaaggcaacauuaggugcaacauuugcauuuga

SEQ ID NO: 40679 - RNA, 1701 nt, Artificial Sequence
  derived and/or modified CDS sequence (wt) from hemagglutinin__InfluenzaA__AFH00417
augaagacuaucauugcuuugagcuacauuuuaugucugguuuucgcucaaaaacuucccggaaaugacaacagcacagcaacgcugugccugggacaccaugcagugccaaacggaacgcuagugaaaacaaucacgaaugaucaaauugaagugacuaaugcuacugagcugguucagaguuccucaacagguagaauaugcgacaguccucaccgaauccuugauggaaaaaacugcacacugauagaugcucuauugggagacccucauugugauggcuuccaaaauaaggaaugggaccuuuuuguugaacgcagcaaagcuuacagcaacuguuacccuuaugaugugccggauuaugccucccuuaggucacuaguugccucaucaggcacccuggaguuuaccaaugaaggcuucaauuggacuggagucgcucaggaugggaaaagcuaugcuugcaaaaggggaucuguuaagaguuucuuuaguagauugaauugguugcacaaauuagaauacaaauauccagcacugaacgugacuaugccaaacaaugacaaauuugacaaacuguacauuugggggguucaccacccgagcacggacagugaccaaaccagccuauauguucaggcaucagggagagucacagucucuaccaaaagaagccaacaaacuguaaucccgaauaucggguccagacccugggugaggggcauuuccaguagaauaagcaucuauuggacaauaguaaaaccgggagacauacuuuugauuaacagcacagggaaucuaauugcuccucgggguuacuucaaaauacgaaaugggaaaagcucaauaaugaggucagaugcacccauugacaacugcaauucugaaugcaucacuccaaauggaagcauucccaaugacaaaccuuuucaaaauguaaacaggaucacauauggggccugucccagauauguuaagcaaaacacucugaaauuggcaacagggaugcggaauguaccagagaaacaaacuagaggcauauucggcgcaaucgcagguuucauagaaaaugguugggagggaaugguagacgguugguacgguuucaggcaucaaaauucugagggcacaggacaagcagcagaucuuaagagcacucaagcagcaaucgaucaaaucaacgggaaacugaauagguuaaucgagaaaacgaacgagaaauuccaucaaaucgaaaaagaauucucagaaguagaagggagaauucaggaccucgagaaauauguugaagacacuaaaauagaucucuggucuuacaacgcggagcuucuuguugcccuggagaaucaacauacaauugaucuaacugacucagaaaugaacaaacuguuugaaagaacaaggaagcaacugagggaaaaugcugaggacaugggcaaugguugcuucaaaauauaccacaaaugugacaaugccugcauagggucaaucagaaauggaacuuaugaccaugauguauacagagacgaagcauuaaacaaccgguuccagaucaaagguguugagcugaagucaggauacaaagauuggauccuauggauuuccuuugccauaucaugcuuuuugcuuuguguuguuuugcugggguucaucaugugggccugccaaaaaggcaacauuaggugcaacauuugcauuuga

SEQ ID NO: 40680 - RNA, 1701 nt, Artificial Sequence
  derived and/or modified CDS sequence (wt) from hemagglutinin__InfluenzaA__AFH00428
augaagacuaucauugcuuugagcuacauuuuaugucugguuuucgcucaaaaacuucccggaaaugacaacagcacagcaacgcugugccugggacaccaugcagugccaaacggaacgcuagugaaaacaaucacgaaugaucaaauugaagugacuaaugcuacugagcugguucagaguucuccaacagguagaauaugcgacaguccucaccgaauccuugauggaaagaacugcacacugauagaugcucuauugggagacccucauugugauggcuuccaaaauaaggaaugggaccuuuuuguugaacgcagcaaagcuuacagcaacuguuacccuuaugaugugccggauuaugccucccuuaggucacuaguugccucaucaggcacccuggaguuuaccaacgaaaacuucaauuggacuggagucgcucaggaugggaaaagcuaugcuugcaaaaggggaucuguuaacaguuucuuuaguagauugaauugguugcacaaauuagacuacaaauauccagcgcugaacgugacuaugccaaacaauggcaaauuugacaaauuguacauuugggggguucaccacccgagcacggacagugaccaaaccagccuauauguccgagcaucagggaaagucacagucucuaccaaaagaagccaacaaacuguaaucccggauaucggguauagaccauggguaaggggucuguccaguagaauaagcaucuauuggacaauaguaaaaccgggagacauacuuuugauuaauagcacagggaaucuaauugcuccucgggguuacuucaaaauacgaaaugggaaaagcucaauaaugaggucagaugcacccauuggcaacugcaguucugaaugcaucacuccaaauggaagcauucccaaugacaaaccuuuucaaaauguaaacaggaucacauauggggccugccccagauauguuaagcaaaacacucugaaauuggcaacagggaugcggaauguaccagagaaacaaacuagaggcauauucggcgcaaucgcagguuucauagaaaaugguugggagggaaugguagacgguugguacgguuucaggcaucagaauucugagggcacaggacaagcugcagaucuuaaaagcacucaagcagcaaucgaccaaaucaacgggaaacugaauagguuagucgagaaaacgaacgagaaauuccaucaaaucgaaaaagaauucucagaaguagaagggagaauucaggaccucgagaaauauguugaagacacuaaaauagaucucuggucuuacaaugcggagcuucuuguugcucuggagaaccaacauacaauugaucuaacugacucagaaaugaacaaacuauuugaaagaacaaggaagcaacugagggaaaaugcugaggacaugggcaaugguuguuucaaaauauaccacaaaugugacaaugccugcauagggucaaucagaaauggaacuuaugaccaugauguauacagagacgaagcauuaaacaaccgguuccagaucaaagguguugagcugaagucaggauacaaagauuggauccuauggauuuccuuugccauaucaugcuuuuugcuuuguuuuguuuugcuuggguucaucaugugggccugccaaaaaggcaacauuaggugcaacauuugcauuuga

SEQ ID NO: 40681 - RNA, 1701 nt, Artificial Sequence
  derived and/or modified CDS sequence (wt) from hemagglutinin__InfluenzaA__AFH00439
augaagacuaucauugcuuugagcuacauuuuaugucugguuuucgcucaaaaacuucccggaaaugacaacagcacggcaacgcugugccugggacaccaugcagugccaaacggaacgcuagugaaaacaaucacgaaugaccaaauugaagugacuaaugcuacugagcugguucagaguuccucaacagguagaauaugcgacaguccucaccgaauccuugauggaaaaaacugcacacugauagaugcucuauugggagacccucauugugauggcuuccaaaauaaggaaugggaccuuuuuguugaacgcagcaaagcuuacagcaacuguuacccuuaugaugugccggauuaugccucccuuaggucacuaguugccucauccggcacccuggaguuuaccaaugaaggcuucaauuggacuggagucgcucaggauggaacaagcuaugcuugcaaaaggggaucuguuaaaaguuucuuuaguagauugaauugguugcacaaauuagaauacaaauauccagcacugaaugugacuaugccaaacaaugacaaauuugacaaauuguacauuugggggguucaccacccgaguacggacagugaccaaaccagccuauauguucaagcaucagggagagucacagucucuaccaaaagaagccaacaaacuguaaucccgaauaucgggucuagacccuggguaagaggugucuccagcagaauaagcaucuauuggacaauaguaaaaccgggagacauacuuuugauuaacagcacagggaaucuaauugcuccucgggguuacuucaaaauacgaagugggaaaagcucaauaaugaggucagaugcacccauuggcaacugcaauucugaaugcaucacuccaaauggaagcauucccaaugacaaaccuuuucaaaauguaaacaggaucacauauggggccugucccagauauguuaagcaaaacacucugaaauuggcaacagggaugcggaauguaccagagaaacaaacuagaggcauauucggcgcaaucgcagguuucauagaaaaugguugggagggaaugguagacgguugguacgguuucaggcaucaaaauucugagggcacaggacaagcagcagaucuuaaaagcacucaagcagcaaucaaccaaaucaacgggaaacugaauagguuaaucgagaaaacgaacgagaaauuccaucaaaucgaaaaagaauucucagaaguagaagggagaauucaggaccucgagaaauauguugaagacacuaaaauagaucucuggucuuacaacgcggagcuucuuguugcccuggagaaccaacauacaauugaucuaacugacucagaaaugagcaaacuguuugaaagaacaaggaagcaacugagggaaaaugcugaggacaugggcaaugguugcuucaaaauauaccacaaaugugacaaugccugcauagggucaaucagaaauggaacuuaugaccaugauguauacagagacgaagcauuaaacaaccgguuccagaucaaagguguugagcugaagucaggauacaaagauuggauccuauggauuuccuuugccauaucaugcuuuuugcuuuguguuguuuugcugggguucaucaugugggccugccaaaaaggcaacauuaggugcaacauuugcauuuga

SEQ ID NO: 40682 - RNA, 1701 nt, Artificial Sequence
  derived and/or modified CDS sequence (wt) from hemagglutinin__InfluenzaA__AFH00450
augaagacuaucauugcuuugagcuacauuuuaugucugguuuucgcucaaaaacuucccggaaaugacaacagcacggcaacgcugugccugggacaccaugcagugccaaacggaacgcuagugaaaacaaucacgaaugaccaaauugaagugacuaaugcuacugagcugguucagaguuccucaacagguagaauaugcgacgguccucaccgaaucauugauggaaaaaacugcacacugauagaugcucuauugggagacccucauugugauggcuuccaaaauaaggaaugggaccuuuuuguugaacgcagcaaagcuuacagcaacuguuacccuuaugaugugccagauuaugccucccuuaggucacuaguugccucauccggcacccuggaguuuaccaaugaaagcuucaauuggacuggagucgcucagaauggaacaagcuaugcuugcaaaaggggaucuguuaaaaguuucuuuaguagauugaauugguugcacaaauuagaauacaaauauccagcacuaaacgugacuaugccaaacaaugacaaauuugacaaauuguacauuugggggguucaccacccgaguacggacagugaccaaaccagccuauauguucaaucaucagggagagucacagucucuaccaaaagaagccaacaaacuguaaucccgaauaucgggucuagacccuggguaaggggugucuccagcagaauaagcaucuauuggacaauaguaaaaccgggagacauacuuuugauuaacagcacagggaaucuaauugcuccucgggguuacuucaaaauacgaagugggaaaagcucaauaaugaggucagaugcacccauugacaacugcaauucugaaugcaucacuccaaauggaagcauucccaaugacaaaccuuuucaaaauguaaacaggaucacauauggggccugucccagauauguuaagcaaaacacucugaaauuggcaacagggaugcggaauguaccagagaaacaaacuagaggcauauucggcgcaaucgcagguuucauagaaaaugguugggagggaaugauagacgguugguacgguuucaggcaucaaaauucugagggcacaggacaagcagcagaucuuaaaagcacucaagcagcaaucaaccaaaucaacgggaaacugaauagguuaaucgagaaaacgaacgagaaauuccaucaaaucgaaaaagaauucucagaaguagaagggagaauucaggaccucgagaaauauguugaagacacuaaaauagaucucuggucuuacaacgcagagcuucuuguugcccuggagaaucaacauacaauugaucuaacugacucagaaaugaacaaacuguuugaaagaacaaggaagcaacugagggaaaaugcugaggacaugggcaaugguugcuucaaaauauaccacaaaugugacaaugccugcauagggucaaucagaaauggaacuuaugaccaugauguauacagagacgaagcauuaaacaaccgguuccagaucaaagguguugagcugaagucaggauacaaagauuggauccuauggauuuccuuugccauaucaugcuuuuugcuuuguguuguuuugcugggguucaucaugugggccugccaaaaaggcaacauuaggugcaacauuugcauuuga

SEQ ID NO: 40683 - RNA, 1701 nt, Artificial Sequence
  derived and/or modified CDS sequence (wt) from hemagglutinin__InfluenzaA__AFH00461
augaagacuaucauugcuuugagcuacauuuuaugucugguuuucgcucaaaaacuucccggaaaugacaacagcacagcaacgcugugccugggacaccaugcagugccaaacggaacgcuagugaaaacaaucacgaaugaucaaauugaagugacuaaugcuacugagcugguucagaguuccccaacagguagaauaugcgacaguccucaccggauccuugauggaaagaacugcacacugauagaugcucuauugggagacccucauugugauggcuuccaaaauaaggaaugggaccuuuuuguugaacgcagcaaagcuuacagcaacuguuacccuuaugaugugccggauuaugccucccuuaggucacuaguugccucaucaggcacccuggaguuuaucaacgaaaacuucaauuggacuggagucgcucaggaugggaaaagcuaugcuugcaaaaggggaucuguuaacaguuucuuuaguagauugaauugguugcacaaauuagacuacaaauacccagcgcugaacgugacuaugccaaacaauggcaaauuugacaaauuguacauuugggggguucaccacccgagcacugacagugaccaaaucagccuauauguccgaucaucagggagagucacagucucuaccaaaagaagccaacaaacuguaaucccggauaucggguauagaccauggguaaggggucuguccaguagaauaagcaucuauuggacaauaguaaaaccgggagacauacuuuugauuaauagcacagggaaucuaauugcuccucgggguuacuucaaacuacgaaaugggaaaagcucaauaaugaggucagaugcacccauuggcaacugcaguucuggaugcaucacuccaaauggaagcauucccaaugacaaaccuuuucaaaauguaaacaggaucacuuauggggccugccccagauauguuaagcaaaacacucugaaauuggcaacagggaugcggaauguaccagagaaacaaacuagaggcauauucggcgcaaucgcagguuucauagaaaaugguugggagggaaugguagacgguugguacgguuucaggcaucaaaauucugagggcacaggacaagcugcagaucuuaaaagcacucaagcagcaaucgaccaaaucaacgggaaacugaauagguuagucgagaaaacgaacgagaaauuccaucaaaucgaaaaagaauucucagaaguagaagggagaauucaggaccucgagaaauauguugaagacacuaaaauagaucucuggucuuacaaugcggagcuucuuguugcucuggagaaccaacauacaauugaucuaacugacucagaaaugaacaaacuguuugaaagaacaaggaagcaacugagggaaaaugcugaggacaugggcaaugguuguuucaaaauauaccacaagugugacaaugccugcauagggucaaucagaaauggaacuuaugaccaugauguauacagagacgaagcauugaacaaccgguuccagaucaaagguguugagcugaagucaggauacaaagauuggauccuauggauuuccuuugccauaucaugcuuuuugcuuuguguuguuuugcuuggguucaucaugugggccugccaaaaaggcaacauuaggugcaacauuugcauuuga

SEQ ID NO: 40684 - RNA, 1701 nt, Artificial Sequence
  derived and/or modified CDS sequence (wt) from hemagglutinin__InfluenzaA__AFH00472
augaagacuaucauugcuuugagcuacauuuuaugucugguuuucgcucaaaaacuucccggaaaugacaacagcacggcaacgcugugccugggacaccaugcagugccaaacggaacgcuagugaaaacaaucacgaaugaccaaauugaagugacuaaugcuacugagcugguucagaguuccucaacagguagaauaugcgacaguccucaccgaauccuugauggaaaaaacugcacacugauagaugcucuauugggagacccucauugugauggcuuccaaaauaaggaaugggaccuuuuuguugaacgcagcaaagcuuacagcaacuguuacccuuaugaugugucggauuaugccucccuuaggucacuaguugccucauccgguacccuggaguuuaacaaugaaagcuucaauuggacuggagucgcucagaauggaacaagcuaugcuugcaaaaggagaucuguuaaaaguuucuuuaguagauugaauugguugcacaaauuagaauacaaauauccagcacugaacgugacuaugccaaacaaugacaaauuugacaaauuguacauuugggggguucaccacccgaguacggacagugaccaaaccagccuauauguucaagcaucagggagagucacagucucuaccaaaagaagccaacaaacuguaaucccgaauaucggaucuagacccuggguaaggggugucuccagcagaauaagcaucuauuggacaauaguaaaaccgggagacauacuuuugauuaacagcacagggaaucuaauugcuccucgggguuacuucaaaauacgaagugggaaaagcucaauaaugaggucagaugcacccauuggcaacugcaauucugaaugcaucacuccaaauggaagcauucccaaugacaaaccauuucaaaauguaaacaggaucacauauggggccugucccagauauguuaagcaaaacacucugaaauuggcaacagggaugcggaauguaccagagaaacaaacuagaggcauauucggcgcaaucgcagguuucauagaaaaugguugggagggaaugguagacgguugguacgguuucaggcaucaaaauucugagggcacaggacaagcagcagaucuuaaaagcacucaagcagcaaucaaccaaaucaacgggaaacugaauagguuaaucgagaaaacgaacgagaaauuccaucaaaucgaaaaagaauucucagaaguagaagggagaauucaggaccucgagaaauauguugaagacacuaaaauagaucucuggucguacaacgcggagcuucuuguugcccuggagaaccaacauacaauugaucuaacugacucagaaaugaauaaacuguuugaaagaacaaggaagcaacugagggaaaaugcugaggacaugggcaaugguugcuucaaaauauaccacaaaugugacaaugccugcauagggucaaucagaaauggaacuuaugaccaugauguauacagagacgaagcauuaaacaaccgguuccagaucaaagguguugagcugaagucaggauacaaagauuggauccuauggauuuccuuugccauaucaugcuuuuugcuuuguguuguuuugcugggguucaucaugugggccugccaaaaaggcaacauuaggugcaacauuugcauuuga

SEQ ID NO: 40685 - RNA, 1701 nt, Artificial Sequence
  derived and/or modified CDS sequence (wt) from hemagglutinin__InfluenzaA__AFH00483
augaagacuaucauugcuuugagcuacauuuuauguaugguuuucgcucaaaaacuucccggaaaugacaacagcacggcaacgcugugccugggacaccaugcagugccaaacggaacgcuagugaaaacaaucacgaaugaccaaauugaagugacuaaugcuacugagcugguucagaguuccucaacagguaaaauaugcgacaguccucaccgaauccuugauggaaaaaacugcacacugauagaugcucuauugggagacccucauugugauggcuuccaaaauaaggaaugggaccuuuuuguugaacgcagcaaagcuuacagcaacuguuacccuuaugaugugccggauuaugccucccuuaggucacuaguugccucauccggcacccuggaguuuaacaaugaaagcuucaauuggacuggagucgcucagaauggaacaagcuaugcuugcaaaaggggaucuguuaaaaguuucuuuaguagauugaauugguugcacaaauuagaauacaaauauccagcacugaacgugacuaugccaaacaaugacaaauuugacaaauuguacauuugggggguucaccacccgaguacggacagugaccaaaccagccuauauguucaagcaucagggagagucacagucucuaccaaaagaagccaacaaacuguaaucccgaauaucggaucuagacccuggguaaggggugucuccagcagaauaagcaucuauuggacaauaguaaaaccgggagacauacuuuugauuaacagcacagggaaucuaauugcuccucgggguuacuucaaaauacgaagugggaaaagcucaauaaugaggucagaugcacccauuggcaacugcaauucugaaugcaucacuccaaauggaagcauucccaaugacaaaccauuucaaaauguaaacaggaucacauauggggccugucccagauauguuaagcaaaacacucugaaauuggcaacagggaugcggaauguaccagagaaacaaacuagaggcauauucggcgcaaucgcagguuucauagaaaaugguugggagggaaugguagacgguugguacgguuucaggcaucaaaauucugagggcacaggacaagcagcagaucuuaaaagcacucaagcagcaaucaaccaaaucaacgggaaacugaauagguuaaucgagaaaacgaacgagaaauuccaucaaaucgaaaaagaauucucagaaguagaagggagaauucaggaccucgagaaauauguugaagacacuaaaauagaucucuggucguacaacgcggagcuucuuguugcccuggagaaccaacauacaauugaucuaacugacucagaaaugaacaaacuguuugaaagaacaaggaagcaacugagggaaaaugcugaggacaugggcaaugguugcuucaaaauauaccacaaaugugacaaugccugcauagggucaaucagaaauggaacuuaugaccaugauguauacagagacgaagcauuaaacaaccgguuccagaucaaagguguugagcugaagucaggauacaaagauuggauccuauggauuuccuuugccauaucauguuuuuugcuuuguguuguuuugcugggguucaucaugugggccugccaaaaaggcaacauuaggugcaacauuugcauuuga

SEQ ID NO: 40686 - RNA, 1701 nt, Artificial Sequence
  derived and/or modified CDS sequence (wt) from hemagglutinin__InfluenzaA__AFH00494
augaagacuaucauugcuuugagcuacauuuuaugucugguuuucgcucaaaaacuucccggaaaugacaacagcacagcaacgcugugccugggacaccaugcagugccaaacggaacgcuagugaaaacaaucacgaaugaucaaauugaagugacuaaugcuacugagcugguucagaguuccccaacagguagaauaugcgacaguccucaccgaauccuugauggaaagaacugcacacugauagaugcucuuuugggagacccucauugugauggcuuccaaaauaaggaaugggaccuuuuuguugaacgcagcaaagcuuacagcaacuguuacccuuaugaugugccggauuaugccucccuuaggucacuaguugccucaucaggcacccuggaguuuaucaacgaaaacuucaauuggacuggagucgcucaggaugggaaaagcuaugcuugcaaaaggggaucuguuaacaguuucuuuaguagauugaauugguugcacaaauuagaauacaaauauccagcgcugaacgugacuaugccaaacaauggcaaauuugacaaauuguacauuugggggguucaccacccgagcacggacagugaccaaaccagccuauauguccgagcaucagggagagucacagucucuaccaaaagaagccaacaaacuguaaucccggauaucggguauagaccauggguaaggggucaguccaguagaauaggcaucuauuggacaauaguaaaaccgggagacauacuucugauuaauagcacagggaaucuaauugcuccucgggguuacuucaaaauacgaaaugggaaaagcucaauaaugaggucagaugcacccauuggcaacugcaguucugaaugcaucacuccaaauggaagcauucccaaugacaaaccuuuucaaaauguaaacaggaucacauauggggccugucccagauauguuaagcaaaacacucugaaauuggcaacagggaugcggaauguaccagagaaacaaacuagaggcauauucggcgcaaucgcagguuucauagaaaaugguugggagggaaugguagacgguugguacgguuucaggcaucaaaauucugagggcacaggacaagcugcagaucuuaaaagcacucaagcagcaaucgaccaaaucaacgggaagcugaauagguuagucgagaaaacgaacgagaaauuccaucaaaucgaaaaagaauucucagaaguagaagggagaauucaggaccucgagaaauauguugaagacacuaaaauagaucucuggucuuacaaugcggagcuucuuguugcucuggagaaccaacauacaauugaucuaacugacucagaaaugaacaaacuguuugaaagaacaaggaagcaacugagggaaaaugcugaggacaugggcaaugguuguuucaaaauauaccacaaaugugacaaugccugcauagggucaaucagaaauggaacuuauaaccaugauguauacagagacgaagcauuaaacaaccgguuccagaucaaagguguugagcugaagucaggauacaaagauuggauucuauggauuuccuuugccauaucaugcuuuuugcuuuguguuguuuugcuuggguucaucaugugggccugccaaaaaggcaacauuaggugcaacauuugcauuuga

SEQ ID NO: 40687 - RNA, 1701 nt, Artificial Sequence
  derived and/or modified CDS sequence (wt) from hemagglutinin__InfluenzaA__AFH00505
augaagacuaucauugcuuugagcuacauuuuaugucugguuuucgcucaaaaacuucccggaaaugacaacagcacggcaacgcugugccugggacaccaugcagugccaaacggaacgcuagugaaaacaaucacaaaugaccaaauugaagugacuaaugcuacugagcugguucagaguuccucaacagguagaauaugcgacaguccucaccgaauccuugauggaaaaaacugcacacugauagaugcucuauugggagacccucauugugauggcuuccaaaauaaggaaugggaccuuuuuguugaacgcagcaaagcuuacagcaacuguuacccuuaugaugugccggauuaugccucccuuaggucacuaguugccucauccggcacccuggaguuuaccaaugaaggcuucaauuggacuggaguugcucaggauggaacaagcuaugcuugcaaaaggggaucuguuaaaaguuucuuuaguagauugaauugguugcacaaauuagaauacaaauauccagcacugaacguuacuaugccaaacaaugacaaauuugacaaauuguacauuugggggguucaccacccgaguacggacagugaccaaaucagccuauauguucaagcaucagggagagucacagucucuaccaaaagaagccaacaaacuguaaucccgaauaucgggucuagacccuggguuaggggugucuccagcauaauaagcaucuauuggacaauaguaaaaccgggagacauacuuuugauuaacagcacagggaaucuaauugcuccucgggguuacuucaaaauacgaagugggaaaagcucaauaaugaggucagaugcacccauugacaacugcaauucugaaugcaucacuccaaauggaagcauucccaaugacaaaccuuuucaaaauguaaacaggaucacauauggggccugucccagauauguuaagcaaaacacucugaaauuggcaacagggaugcggaauguaccagagaaacaaacuagaggcauauucggcgcaaucgcagguuucauagaaaaugguugggagggaaugguagacgguugguacgguuucaggcaucaaaauucugagggcacaggacaagcagcagaucuuaaaagcacucaagcagcaaucaaccaaaucaacgggaaacugaauagguuaaucgagaaaacgaacgagaaauuccaucaaaucgaaaaagaauucucagaaguagaagggagaauucaggaccucgagaaauauguugaagacacuaaaauagaucucuggucuuacaacgcggagcuucuuguugcccuggagaaccaacauacaauugaucuaacugacucagaaaugaacaaacuguuugaaagaacaaggaagcaacugagggaaaaugcugaggacaugggcaaugguugcuucaaaauauaccacaaaugugacaaugccugcauagggucaaucagaaauggaacuuaugaccaugauguauacagagacgaagcauuaaacaaccgguuccagaucaaagguguugagcugaagucaggauacaaagauuggauccuauggauuuccuuugccauaucaugcuuuuugcuuuguguuguuuugcugggguucaucaugugggccugccaaaaaggcaacauuaggugcaacauuugcauuuga

SEQ ID NO: 40688 - RNA, 1701 nt, Artificial Sequence
  derived and/or modified CDS sequence (wt) from hemagglutinin__InfluenzaA__AFH00516
augaagacuaucauugcuuugagcuacauuuuaugucagguuuucgcucaaaaacuucccggaaaugacaacagcacagcaacgcugugccugggacaccaugcagugccaaacggaacgcuagugaaaacaaucacgaaugaucaaauugaagugacuaaugcuacugagcugguucagaguuccucaacagguagaauaugcgacaguccucaccgaauccuugauggaaaaaacugcacacugauagaugcucuauugggagacccucauugugauggcuuccaaaauaaggaaugggaccuuuuuguugaacgcagcaaagcuuacagcaacuguuacccuuaugaugugccggauuaugccucccuuaggucacuaguugccucaucaggcacccuggaguuuaccaaugaaggcuucaauuggacuggagucgcucaggaugggaaaagcuaugcuugcaaaaggggaucuguuaacaguuucuuuaguagauugaauugguugcacaaauuagaauacaaauauccagcacugaacgugacuaugccaaacaaugacaaauuugacaaauuguacauuugggggguucaccacccgagcacggacagugaccaaaccagccuauauguucaagcaucagggagagucacagucucuaccaaaagaagccaacaaacuguaaucccgaauaucggguccagacccugggugaggggcaucuccaguagaauaagcaucuauuggacaauaguaaaaccgggagacauacuuuugauuaaaagcacagggaaucuaauugcuccucgggguuacuucaaaauacgaaaugggaaaagcucaauaaugaggucagaugcacccauugacaacugcaauucugaaugcaucacuccaaauggaagcauucccaaugacaaaccuuuucaaaauguaaacaggaucacauauggggccugucccagauauguuaagcaaaacacccugaaauuggcaacagggaugcggaauguaccagagaaacaaacuagaggcauauucggcgcaaucgcagguuucauagaaaaugguugggagggaaugguagacgguugguacgguuucaggcaucaaaauucugagggcacaggacaagcagcagaucuuaaaagcacucaagcagcaaucgaucaaaucaacgggaaacugaauagauuaaucgagaaaacgaacgagaaauuccaucaaaucgaaaaagaauucucagaaguagaagggagaauucaggaccucgagaaauauguugaagacacuaaaauagaucucuggucuuacaacgcggagcuucuuguugcccuggagaaucaacauacaauugaucuaacugacucagaaaugaacaaacuguuugaaagaacaaggaagcaacugagggaaaaugcugaggacaugggcaaugguugcuucaaaauauaccacaaaugugacaaugccugcauagggucaaucagaaauggaacuuaugaccaugauguauacagagacgaagcauuaaacaaccgguuccagaucaaagguguugagcugaagucgggauacaaagauuggauccuauggauuucuuuugccauaucaugcuuuuugcuuuguguuguuuugcugggguucaucaugugggccugccaaaaaggcaacauuaggugcaacauuugcauuuga

SEQ ID NO: 40689 - RNA, 1701 nt, Artificial Sequence
  derived and/or modified CDS sequence (wt) from hemagglutinin__InfluenzaA__AFH00527
augaagacuaucauugcuuugagcuacauuuuaugucugguuuucgcucaaaaaauucccggaaaugacaacagcacggcaacgcugugccugggacaccaugcagugccaaacggaacgcuagugaaaacaaucacgaaugaccaaauugaagugacuaaugcuacugagcugguucagaguuccucaacagguagaauaugcgacaguccucaccgaauccuugauggagaaaacugcacacugauagaugcucuauugggagacccucauugugauggcuuccaaaauaaggaaugggaccuuuuuguugaacgcagcaaagccuacagcaacuguuacccuuaugaugugccggauuaugccucccuuaggucacuaguugccucaucuggcacccuggaguuuaacaaugaaagcuucaauuggacuggagucgcucagaauggaacaagcuaugcuugcaaaaggagaucuauuaaaaguuucuuuaguagauugaauugguugcaccaauuaaaauacaaauauccagcacugaacgugacuaugccaaacaaugacaaauuugacaaauuguacauuugggggguucaccacccgaguacggacagugaccaaaccagccuauaugcucaagcaucagggagagucacagucucuaccaaaagaagccaacaaacuguaaucccgaauaucggaucuagacccuggguaaggggugucuccagcagaauaagcauccauuggacaauaguaaaaccgggagacauacuuuugauuaacagcacagggaaucuaauugcuccucgggguuacuucaaaauacgaagugggaaaagcucaauaaugaggucagaugcacccauuggcaaaugcaauucugaaugcaucacuccaaauggaagcauucccaaugacaaaccauuucaaaauguaaacaggaucacauauggggccugucccagauauguuaagcaaaacacucugaaauuggcaacagggaugcggaauguaccagagaaacaaacuagaggcauauucggcgcaaucgcagguuucauagaaaaugguugggagggaaugguagacgguugguacgguuucaggcaucaaaauucugagggcacaggacaagcagcagaucuuaaaagcacucaagcagcaaucaaccaaaucaacgggaaacugaauagguuaaucgagaaaacgaacgagaaauuccaucaaauugaaaaagaauucucagaaguagaagggagaauucaggaccucgagaaauauguugaggacacuaaaauagaucucuggucguacaacgcggagcuucuuguugcccuggagaaccaacauacaauugaucuaacugacucagaaaugaacaaacuguuugaaagaacaaggaagcaacugagggaaaaugcugaggauaugggcaaugguuguuucaaaauauaccacaaaugugacaaugccugcauagggucaaucagaaauggaacuuaugaccaugauguauacagagacgaagcauuaaacaaccgguuccagaucaaagguguugagcugaagucaggauacaaagauuggauccuauggauuuccuuugccauaucauguuuuuugcuuuguguuguuuugcugggguucaucaugugggccugccaaaaaggcaacauuaggugcaacauuugcauuuga

SEQ ID NO: 40690 - RNA, 1701 nt, Artificial Sequence
  derived and/or modified CDS sequence (wt) from hemagglutinin__InfluenzaA__AFH00538
augaagacuaucauugcuuugagcuacauuuuaugucugguuuucgcucaaaaaauucccggaaaugacaacagcacggcaacgcugugccugggacaccaugcagugccaaacggaacgcuagugaaaacaaucacgaaugaccaaauugaagugacuaaugcuacugagcugguucagagguccucaacagguagaauaugcgacaguccucaccgaauccuugauggagaaaacugcacacugauagaugcucuauugggagacccucauugugauggcuuccaaaauaaggaaugggaccuuuuuguugaacgcagcaaagccuacagcaacuguuacccuuaugaugugccggauuaugccucccuuaggucacuaguugcaucauccggcacccuggaguuuaacaaugaaagcuucaauuggacuggagucgcucagaauggaacaagcuaugcuugcaaaaggagaucuauuaaaaguuucuuuaguagauugaacugguugcaccaauuaaaauacaaauauccagcacugaacgugacuaugccaaacaaugacaaauuugacaaauuguacauuugggggguucaccacccgaguacggacagugaccaaaccagccuauaugcucaagcaucagggagagucacagucucuaccaaaagaagccaacaaacuguaaucccgaauaucggaucuagacccuggguaaggggugucuccagcagaauaagcaucuauuggacaauaguaaaaccgggagacauacuuuugauuaacagcacagggaaucuaauugcuccucgggguuacuucaaaauacgaagugggaaaagcucaauaaugaggucagaugcacccauuggcaaaugcaauucugaaugcaucacuccaaauggaagcauucccaaugacaaaccauuucaaaauguaaacaggaucacauauggggccugucccagauauguuaagcaaaacacucugaaauuggcaacagggaugcggaauguaccagagaaacaaacuagaggcauauucggcgcaaucgcagguuucauagaaaaugguugggagggaaugguagacgguugguacgguuucaggcaucaaaauucugagggcacaggacaagcagcagaucuuaaaagcacucaagcagcaaucaaccaaaucaacgggaaacugaauagguuaaucgagaaaacgaacgagaaauuccaucaaauugaaaaagaauucucagaaguagaagggagaauucaggaccucgagaaauauguugaggacacuaaaauagaucucuggucguacaacgcggagcuucuuguugcccuggagaaccaacauacaauugaucuaacugacucagaaaugaacaaacuguuugaaagaacaaggaagcaacugagggaaaaugcugaggauaugggcaaugguuguuucaaaauauaccacaaaugugacaaugccugcauagggucaaucagaaauggaacuuaugaccaugauguauacagagacgaagcauuaaacaaccgguuccagaucaaagguguugagcugaagucaggauacaaagauuggauccuauggauuuccuuugccauaucauguuuuuugcuuuguguuguuuugcugggguucaucaugugggccugccaaaaaggcaacauuaggugcaacauuugcauuuga

SEQ ID NO: 40691 - RNA, 1701 nt, Artificial Sequence
  derived and/or modified CDS sequence (wt) from hemagglutinin__InfluenzaA__AFH00549
augaagacuaucauugcuuugagcuacauuuuaugucugguuuucgcucaaaaacuucccggaaaugacaacagcacggcaacgcugugccugggacaccaugcagugccaaacggaacgcuagugaaaacaaucacgaaugaccaaauugaagugacuaaugcuacugagcugguucagaguuccucaacagguagaauaugcgacaguccucaccgaauccuugauggagaaaacugcacacugauagaugcucuauugggagacccucauugugauggcuuccaaaauaaggaaugggaccuuuuuguugaacgcagcaaagccuacagcaacuguuacccuuaugauguaccggauuaugccucccuuaggucacuaguugccucauccggcacccuggaguuuaacaaugaaagcuucaauuggacuggagucgcucagaauggaacaagcucugcuugcaaaaggagaucuauuaaaaguuucuuuaguagauugaauugguugcaccaauuaaaauacaaauauccagcacugaacgugacuaugccaaacaaugacaaauuugacaaauuguacauuugggggguucaccacccgaguacggacagugaccaaaccagccuauaugcucaagcaccagggagagucacagucucuaccagaagaagccaacaaacuguaaucccgaauaucggaucuagacccuggguaaggggugucuccagcauaauaagcaucuauuggacaauaguaaaaccgggagacauacuuuugauuaacagcacagggaaucuaauugcuccucgggguuacuucaaaauacgaagugggaaaagcucaauaaugaggucagaugcacccauuagcaaaugcaauucugaaugcaucacuccaaauggaagcauucccaaugacaaaccauuucaaaauguaaacaggaucacauauggggccugucccagauauguuaagcaaaacacucugaaauuggcaacagggaugcggaauguaccagagaaacaaacuagaggcauauucggcgcaaucgcggguuucauagaaaaugguugggagggaaugguggacgguugguacgguuucaggcaucaaaauucugagggcacaggacaagcagcagaucuuaaaagcacucaagcagcaaucaaccaaaucaacgggaaacugaauagguuaaucgagaaaacaaacgagaaauuccaucaaauugaaaaagaauucucagaaguagaagggagaauucaggaccucgagaaauauguugaggacacuaaaauagaucucuggucguacaacgcagagcuucuuguugcccuggagaaccaacauacaauugaucuaacugacucagaaaugaacaaacuguuugaaagaacaaggaagcaacugagggaaaaugcugaggauaugggcaaugguuguuucaaaauauaccacaaaugugacaaugccugcauagggucaaucagaaauggaacuuaugaccaugauguauacagagacgaagcauuaaacaaccgguuccagaucaaagguguugagcugaagucaggauacaaagauuggauccuauggauuuccuuugccauaucauguuuuuugcuuuguguuguuuugcugggguucaucaugugggccugccaaaaaggcaacauuaggugcaacauuugcauuuga

SEQ ID NO: 40692 - RNA, 1701 nt, Artificial Sequence
  derived and/or modified CDS sequence (wt) from hemagglutinin__InfluenzaA__AFH00560
augaagacuaucauugcuuugagcuacauuuuaugucugguuuucgcucaaaaacuucccguaaaugacaacagcacggcaacgcugugccugggacaccaugcagugccaaacggaacgcuagugaaaacaaucacgaaugaccacauugaagugacuaaugcuacugagcugguucagaguuccucaacagguagaauaugcgacauuccucaccaaauccuugauggagaaaacugcacacuaauagaugcucuauugggagacccucauugugauggcuuccaaaauaaggaaugggaccuuuuuguugaacgcagcacagccuacagcaacuguuacccuuaugaugugccggauuaugccucccuuaggucacuaguugccucauccggcacacuggaguuuaacaaugaaagcuucaauuggacuggagucgcucagaauggaacaagcucugcuugcaaaaggagaucuauuaaaaguuucuuuaguagauugaauugguugcaccaauuaaaauacaaauauccagcacugaacgugacuaugccaaacaaugaaaaauuugacaaauuguacauuugggggguucaccacccgaguacggacagugaccaaaucagccuauaugcucaagcaccagggagagucacagucucuaccaaaagaagccaacaaacuguaaucccgaauaucggaucuagacccuggguaaggggugucuccagcagaauaagcaucuauuggacaauaguaaaaccgggagacauacuuuugauuaacaguacagggaaucuaauugcuccucgggguuacuucaaaauacgaagugggaaaagcucaauaaugaggucagaugcacccauuggcaaaugcaauucugaaugcaucacuccaaauggaagcauucccaaugacaaaccauuucaaaauguaaacaggaucacauauggggccugucccagauauguuaagcaaaacacucugaaauuggcaacagggaugcggaauguaccagagaaacaaacuagaggcauauucggcgcaaucgcggguuucauagaaaaugguugggagggaaugguggacgguugguacgguuucaggcaucaaaauucugagggcacaggacaagcagcagaucuuaaaagcacucaagcagcaaucaaccaaaucaacgggaaacugaauagguuaaucgagaaaacaaacgagaaauuccaucaaauugaaaaagaauucucagaagcagaagggagaauucaggaccucgagaaauauguugaggacacuaaaauagaccucuggucguacaacgcggagcuucuuguugcccuggagaaccaacauacaauugaucuaacugacucagaaaugaacaaacuguuugaaagaacaaggaagcaacugagggaaaaugcugaggauauggguaaugguuguuucaaaauauaccacaaaugugacaaugccugcauagggucaaucagaaauggaacuuaugaccaugauguauacagagacgaagcauuaaacaaccgguuccagaucaaagguguugagcugaagucaggauacaaagauuggauccuauggauuuccuuugccauaucauguuuuuugcuuuguauuguuuugcugggguucaucaugugggccugccaaaaaggcaacauuaggugcaacauuugcauuuga

SEQ ID NO: 40693 - RNA, 1701 nt, Artificial Sequence
  derived and/or modified CDS sequence (wt) from hemagglutinin__InfluenzaA__AFH00571
augaagacuaucauugcuuugagcuacauuuuaugucugguuuucgcucaaaaacuucccguaaaugacaacagcacggcaacgcugugccugggacaccaugcagugccaaacggaacgcuagugaaaacaaucacgaaugacaacauugaagugacuaaugcuacugagcugguucagaguuccucaacagguagaauaugcgacaguccucaccaaauccuugauggagaaaacugcacacuaauagaugcucuauugggagacccucauugugauggcuuccaaaauaaggaaugggaccuuuuuguugaacgcagcacagccuacagcaacuguuacccuuaugaugugccggauuaugccucccuuaggucacuaguugccucauccggcacacuggaguuuaacaacgaaagcuucaauuggacuggagucgaucagaauggaacaagcucugcuugcaaaaggagaucuaauaaaaguuucuuuaguagauugaauugguugcaccaauuaaaauacaaauauccagcacugaacgugacuaugccaaacaaugaaaaauuugacaaauuguacauuugggggguucaccacccgaguacagacagugaccaaaucagccuauaugcucaagcaucagggagagucacagucucuaccaaaagaagccaacaaacuguaaucccgaauaucggaucuagacccuggguaaggggugucuccagcagaauaagcaucuauuggacaauaguaaaaccgggagacauacuuuugauuaacagcacagggaaucuaauugcuccucgggguuacuucaaaauacgaagugggaaaagcucaauaaugaggucaaaugcacccauuggaaaaugcaauucugaaugcaucacuccaaauggaagcauucccaaugacaaaccauuucaaaauguaaacaggaucacauauggggccugucccagauauguuaaacaaaacacucugaaauuggcaacagggaugcggaauguaccagagaaacaaacuagaggcauauucggcgcaaucgcagguuucauagaaaaugguugggagggaaugguggacgguugguacgguuucaggcaucaaaauucugagggcacaggacaagcagcagaucuuaaaagcacucaagcagcaaucaaccaaaucaacgggaaacugaauagguuaaucgagaaaacaaacgagaaauuccaucaaauugaaaaagaauucucagaaguagaagggagaauucaggaccucgagaaauauguugaggacacuaaaauagaucucuggucguacaacgcggagcuucuuguugcccuggagaaccaacauacaauugaucuaacugacucagaaaugaacaaacuguucgaaagaacaaggaagcaacugagggaaaaugcugaggauaugggcaaugguuguuucaaaauauaccacaaaugugacaaugccugcauagggucaaucagaaauggaacuuaugaccaugauguauacagagacgaagcauuaaacaaccgguuccagaucaaagguguugagcugaagucaggauacaaagauuggauccuauggauuuccuuugccauaucauguuuuuugcuuuguguuguuuugcugggguucaucaugugggccugccaaaaaggcaacauuaggugcaacauuugcauuuaa

SEQ ID NO: 40694 - RNA, 1701 nt, Artificial Sequence
  derived and/or modified CDS sequence (wt) from hemagglutinin__InfluenzaA__AFH00582
augaagacuaucauugcuuugagcuacauuuuaugucugguuuucgcucaaaaacuucccggaaaugacaacagcacggcaacgcugugccugggacaccaugcagugccaaacggaacgcuagugaaaacaaucacgaaugaccaaauugaagugacuaaugcuacugagcugguucagaguuccucaacagguggaauaugcgacaguccucaccaaauccuugauggagaaaacugcacacuaauagaugcucuauugggagacccucauugugauggcuuccaaaauaaggaaugggaccuuuuuguugaacgcagcaaagccuacagcaacuguuacccuuaugaugugccggauuaugccucccuuaggucacuaguugccucauccggcacacuggaguuuaacaaugaaagcuucaauuggacuggagucgcucagaauggaacaagcucugcuugcaaaaggagaucuaauaaaaguuucuuuaguagauugaauugguugcaccaauuaaaauacaaauacccagcacugaacgugacuaugccaaacaaugaaaaauuugacaaauuguacauuugggggguucaccacccgaguacggacagugaccaaaucagcuuauaugcucaagcaccagggagagucacagucucuaccaaaagaagccaacaaacuguaaucccgaauaucggaucuagacccuggguaaggggugucuccagcagaauaagcaucuauuggacaauaguaaaaccgggagacauacuuuugauuaacugcacagggaaucuaauugcuccucgggguuacuucaaaauacgaagugggaaaagcucaauaaugaggucagaugcauccauuggcaaaugcaauucugaaugcaucacuccaaauggaagcauucccaaugacaaaccauuucaaaauguaaacaggaucacauauggggccugucccagauauguuaagcaaaacacucugaaauuggcaacagggaugcggaauguaccagagaaacaaacuagaggcauauucggcgcaaucgcggguuucauagaaaaugguugggagggaaugguggacgguugguacgguuucaggcaucaaaauucugagggcacaggacaagcagcagaucucaaaagcacucaagcagcaaucaaccaaaucaacgggaaacugaauagguuaaucgagaaaacgaacgagaaauuccaucaaauugaaaaagaauucucagaaguggaagggagaauucaggaccucgagaaauauguugaggacacuaaaauagaucucuggucguacaacgcggagcuucuuguugcccuggagaaccagcauacaauugaucuaacugacucagaaaugaacaaacuguuugaaagaacaaagaagcaacugagggaaaaugcugaggauaugggcaaugguuguuucaaaauauaccacaaaugugacaaugccugcauagggucaaucagaaaugggacuuaugaccaugauguauacagagacgaagcauuaaacaaccgguuccagaucaaagguguugagcugaagucaggauacaaagauuggauccuauggauuuccuuugccacaucauguuuuuugcuuuguguugucuugcugggguucaucaugugggccugccaaaaaggcaacauuaggugcaacauuugcauuuga

SEQ ID NO: 40695 - RNA, 1701 nt, Artificial Sequence
  derived and/or modified CDS sequence (wt) from hemagglutinin__InfluenzaA__AFH00593
augaagacuaucauugcuuugagcuacauuuuaugccugguuuucgcucaaaaacuucccggaaaugacaacagcacggcaacgcugugccuggggcaucaugcagugccaaacggaacgcuagugaaaacaaucacgaaugaccaaauugaaguaacuaaugcuacugagcugguucagaguuccucaacagguagaauaugcgacaguccucaccaaauccuugauggagaaaacugcacacuaauagaugcucuauugggagacccucauugugauggcuuccaaaauaaggaaugggaccuuuuuguugaacgcagcaaagccuacagcaacuguuacccuuaugaugugccggauuaugucucccuuaggucacuaguugccucaucaggcacgcuggaguuuaacaaugaaagcuucaauuggacuggagucgcucagaauggaacaagcucugcuugcaaaaggagaucugauaaaaguuucuuuaguagauugaauugguugcaccaauuaaaauacaaauauccagcacugaacgugacuaugccaaacaaugaaaaauuugacaaauuguacauuugggggguucaccacccggguacagacagugaccaaaucagccuauaugcucaagcaucagggagagucacagucucuaccaaaagaagccaacaaacuguaaucccgaauaucggaucuagacccuggguaaggggugucuccagcagaauaagcaucuauuggacaauaguaaaaccgggagacauacuuuugauuaacagcacagggaaucuaauugcuccucgggguuacuucaaaauacgaagugggaaaagcucaauaaugaggucagaugcacccauuggcaaaugcaauucugaaugcaucacuccaaauggaagcauucccaaugacaaaccauuucaaaauguaaacaggaucacauauggggccugucccagauauguuaagcaaaacacucugaaauuggcaacagggaugcggaaugugccagagaaacaaacuagaggcauauucggugcaaucgcgggcuucauagaaaaugguugggagggaaugauggacgguugguacgguuucaggcaucaaaauucugagggcacagggcaagcagcagaucuuaaaagcacucaagcagcaaucaaccaaaucaacgggaaacugaauagguuaaucgagaaaacgaacgagaaauuccaucaaauugaaaaagaauucucagaaguagaagggagaauucaggaccucgagaaauauguugaggacacuaaaauagaucucuggucguacaaugcggagcuucuuguugcccuggagaaccaacauacaauugaucuaacugacucagaaaugaacaaacuguuugaaagaacaaagaagcaacugagggaaaaugcugaggauaugggcaaugguuguuucaaaauauaccacaaaugugacaaugccugcauagggucaaucagaaauggaacuuaugaccaugauguauacagagacgaagcauugaacaaccgguuccagaucaaagguguugagcugaagucaggauacaaagauuggauccuauggauuuccuuugccauaucauguuuuuugcuuugcauuguuuugcugggguucaucaugugggccugccaaaaaggcaacauuaggugcaacauuugcauuuga

SEQ ID NO: 40696 - RNA, 1701 nt, Artificial Sequence; identical to SEQ ID NO: 40695
  derived and/or modified CDS sequence (wt) from hemagglutinin__InfluenzaA__AFH00604

SEQ ID NO: 40697 - RNA, 1701 nt, Artificial Sequence
  derived and/or modified CDS sequence (wt) from hemagglutinin__InfluenzaA__AFH00615
augaagacuaucauugcuuugagcuacauucuaugucugguuuucgcucaaaagcuucccggaaaugacaacagcacggcaacgcugugccuugggcaccaugcaguaccaaacggaacgauagugaaaacaaucacgaaugaccaaauugaaguuacuaaugcuacugagcugguucagaguuccucaacagguggaauaugcaacaguccucaucagauccuugauggagaaaacugcacacuaauagaugcucuauugggagacccucagugugauggcuuccaaaauaagaaaugggaccuuuuuguugaacgcagcaaagccuacagcaacuguuacccuuaugaugugccggauuaugccucccuuaggucacuaguugccucauccggcacacuggaguuuaacaaugaaagcuucaauuggacuggagucacucagaauggaacaagcucugcuugcaaaaggagaucuaauaaaaguuucuuuaguagauuaaauugguugacccacuuaaaguacaaauacccagcauugaacgugacuaugccaaacaaugaaaaauuugacaaauuguacauuugggggguucaccacccggguacggacagugaccaaaucagccuauaugcucaagcaucaggaagaaucacagucucuaccaaaagaagccaacaaacuguaaucccgaauaucggaucuagacccaggguaagggauaucuccagcagaauaagcaucuauuggacaauaguaaaaccgggagacauacuuuugauuaacagcacagggaaucuaauugcuccucgggguuacuucaaaauacgaagugggaaaagcucaauaaugagaucagaugcacccauuggcaaaugcaauucugaaugcaucacuccaaauggaagcauucccaaugacaaaccauuucaaaauguaaacaggaucacauauggggccugucccagauauguuaagcaaaacacucugaaauuggcaacagggaugcgaaauguaccagagaaacaaacuagaggcauauuuggcgcaaucgcggguuucauagaaaaugguugggagggaaugguggacgguugguacgguuucaggcaucaaaauucugagggcacaggacaagcagcagaucucaaaagcacucaagcagcaaucaaccaaaucaaugggaaacugaauagguuaaucgggaaaacaaacgagaaauuccaucagauugaaaaagaauucucagaaguagaagggagaauucaggacaucgagaaauauguugaggacacuaaaauagaucucuggucauacaacgcggagcuucuuguugcccuggagaaccaacauacaauugaucuaacugacucagaaaugaacaaacuguuugaaagaacaaagaagcaacugagggaaaaugcugaggauaugggcaaugguuguuucaaaauauaccacaaaugugacaaugccugcauagagucaaucagaaauggaacuuaugaccaugauguauacagagaugaagcauuaaacaaccgguuccagaucaaagguguugagcugaagucaggauacaaagauuggauccuauggauuuccuuugccauaucauguuuuuugcuuuguguugcuuuguugggguucaucaugugggccugccaaaaaggcaacauuaggugcaacauuugcauuuga

SEQ ID NO: 40698 - RNA, 1701 nt, Artificial Sequence
  derived and/or modified CDS sequence (wt) from hemagglutinin__InfluenzaA__AFH00626
augaagacuaucauugcuuugagcuacauucuaugucugguuuucgcucaaaaacuucccggaaaugacaacagcacggcaacgcugugccuugggcaccaugcaguaccaaacggaacgauagugaaaacaaucacgaaugaccaaauugaaguuacuaaugcuacugagcugguucagaguuccucaacagguggaauaugcgacaguccucaucagauccuugauggagaaaacugcacacuaauagaugcucuauugggagacccucagugugauggcuuccaaaauaagaaaugggaccuuuuuguugaacgcagcaaagccuacagcaacuguuacccuuaugaugugccggauuaugccucccuuaggucacuaguugccucauccggcacacuggaguuuaacaaugaaagcuucaacuggacuggagucacucagaauggaacaagcucugcuugcaaaaggaaaucuaauaaaaguuucuuuaguagauugaauugguugacccacuuaaaauacaaauacccagcauugaacgugacuaugccaaacaaugaaaaauuugacaaauuguacauuugggggguucaccacccggguacggacaaugaccaaaucagccuguaugcucaagcaucaggaagaaucacagucucuaccaaaagaagccaacaaacuguaaucccgaauaucggaucuagacccaggguaagggacgucuccagcagaauaagcaucuauuggacaauaguaaaaccgggagacauacuuuugauuaacagcacagggaaucuaauugcuccucgggguuacuucaaaauacgaagugggaaaagcucaauaaugagaucagaugcacccauuggcaaaugcaauucugaaugcaucacuccaaauggaagcauucccaaugacaaaccauuucaaaauguaaacaggaucacauauggggccugucccagauauguuaagcaaaacacucugaaauuggcaacagggaugcgaaauguaccagagaaacaaacuagaggcauauuuggcgcaaucgcggguuucauagaaaaugguugggagggaaugguggacgguugguacgguuucaggcaucaaaauucugagggcacaggacaagcagcagaucucaaaagcacucaagcagcaaucaaccaaaucaaugggaaacugaauagguuaaucgggaaaacaaacgagaaauuccaucagauugaaaaagaauucucagaaguagaggggagaauucaggaccucgagaaauauguugaggacacuaaaauagaucucuggucauacaacgcggagcuucuuguugcccuggagaaccaacauacaauugaucuaacugacucagaaaugaacaaacuguuugaaagaacaaagaagcaacugagggaaaaugcugaggauaugggcaaugguuguuucaaaauauaccacaaaugugacaaugccugcauagggucaaucagaaauggaacuuaugaccaugauguauacagagaugaagcauuaaacaaccgguuccagaucaaagguguugagcugaagucaggauacaaagauuggauccuauggauuuccuuugccauaucauguuuuuugcuuuguguugcuuuguugggguucaucaugugggccugccaaaaaggcaacauuaggugcaacauuugcauuuga

SEQ ID NO: 40699 - RNA, 1701 nt, Artificial Sequence
  derived and/or modified CDS sequence (wt) from hemagglutinin__InfluenzaA__AFH00637
augaagacuaucauugcuuugagcuacauucuaugucugguuuucgcucaaaaacuucccggaaaugacaacagcacggcaacgcugugccuugggcaccaugcaguaccaaacggaacgauagugaaaacaaucacgaaugaccaaauugaaguuacuaaugcuacugagcugguucagaguuccucaacagguggaauaugcgacaguccucaucagauccuugauggagaaaacugcacacuaauagaugcucuauugggagacccucagugugauggcuuccaaaauaagaaaugggaccuuuuuguugaacgcagcaaagccuacagcaacuguuacccuuaugaugugccggauuaugccucccuuaggucacuaguugccucauccggcacacuggaguuuaacaaugaaagcuucaauuggacuggagucacucaaaauggaacaagcucuucuugcaaaaggagaucuaauaacaguuucuuuaguagauugaauugguugacccauuuaaaauucaaauacccagcauugaacgugacuaugccaaacaaugaaaaauuugacaaauuguacauuugggggguucaccacccggguacgaacaaugaccaaaucagccuauauacucaagcaucaggaagaaucacagucucuaccaaaagaagccaacaaacuguaaucccgaauaucggaucuagacccaggguaagggauauccccagcagaauaagcaucuauuggacaauaguaaaaccgggagacauacuuuugauuaacagcacagggaaucuaauugcuccucgggguuacuucaaaauacgaagugggaaaagcucaauaaugagaucagaugcacccauuggcaaaugcaauucugaaugcaucacuccaaauggaagcauucccaaugacaaaccauuucaaaauguaaacaggaucacauauggggccugucccagauauguuaagcaaaacacucugaaauuggcaacagggaugcgaaauguaccagagaaacaaacuagaggcauauuuggcgcaaucgcggguuucauagaaaaugguugggagggaaugguggaugguugguacgguuucaggcaucaaaauucugagggaauaggacaagcagcagaucucaaaagcacucaagcagcaaucaaccaaaucaaugggaagcugaauagguugaucgggaaaaccaacgagaaauuccaucagauugaaaaagaauucucagaaguagaagggagaauucaggaccucgagaaauauguugaggacacuaaaauagaucucuggucauacaacgcggagcuucuuguugcccuggagaaccaacauacaauugaucuaacugacucagaaaugaacaaacuguuugaaagaacaaagaagcaacugagggaaaaugcugaggauaugggcaaugguuguuucaaaauauaccacaaaugugacaaugccugcauagggucaaucagaaauggaacuuaugaccaugauguauacagagaugaagcauuaaacaaccgguuccagaucaaagguguugagcugaagucaggauacaaagauuggauccuauggauuuccuuugccauaucauguuuuuugcuuuguguugcuuuguugggguucaucaugugggccugccaaaaaggcaacauuaggugcaacauuugcauuuga

SEQ ID NO: 40700 - RNA, 1701 nt, Artificial Sequence
  derived and/or modified CDS sequence (wt) from hemagglutinin__InfluenzaA__AFH00648
augaagacuaucauugcuuugagcuacauucuaugucugguuuucgcucaaaaacuucccggaaaugacgacagcacggcaacgcugugccuugggcaccaugcaguaccaaacggaacgauagugaaaacaaucacgaaugaccaaauugaaguuacuaaugcuacugagcugguucagaguuccucaacagguggaauaugcgacaguccucaucagauccuugauggagaaaacugcacacuaauagaugcucuauugggagacccucagugugauggcuuccaaaauaagaaaugggaccuuuuuguugaacgcagcaaagccuacagcaacuguuacccuuaugaugugccggauuaugccucccuuaggucacuaguugccucauccggcacacuggaguuuaacgaugaaagcuucaauuggacuggagucacucaaaauggaacaagcucuucuugcaaaaggagaucuaauaacaguuucuuuaguagauugaauugguugacccacuuaaaauucaaauacccagcauugaacgugacuaugccaaacaaugaaaaauuugacaaauuguacauuugggggguucaccacccgguuacggacaaugaccaaaucuuccuguaugcucaagcaucaggaagaaucacagucucuaccaaaagaagccaacaaacuguaaucccgaauaucggaucuagacccagaauaaggaauauccccagcagaauaagcaucuauuggacaauaguaaaaccgggagacauacuuuugauuaacagcacagggaaucuaauugcuccuagggguuacuucaaaauacgaagugggaaaagcucaauaaugagaucagaugcacccauuggcaaaugcaauucugaaugcaucacuccaaauggaagcauucccaaugacaaaccauuucaaaauguaaacaggaucacauauggggccugucccagauauguuaagcaaaacacucugaaauuggcaacagggaugcgaaauguaccagagaaacaaacuagaggcauauuuggcgcaaucgcggguuucauagaaaaugguugggagggaaugguggaugguugguacgguuucaggcaucaaaauucugagggaauaggacaagcagcagaucucaaaagcacucaagcagcaaucaaucaaaucaaugggaagcugaauagguugaucgggaaaaccaacgagaaauuccaucagauugaaaaagaauucucagaaguagaagggagaauucaggaccucgagaaauauguugaggacacuaaaauagaucucuggucauacaacgcggagcuucuuguugcccuggagaaccaacauacaauugaucuaacugacucagaaaugaacaaacuguuugaaagaacaaagaagcaacugagggaaaaugcugaggauaugggcaaugguuguuucaaaauauaccacaaaugugacaaugccugcauaggaucaaucagaaauggaacuuaugaccaugauguauacagagaugaagcauuaaacaaccgguuccagaucaaaggcguugagcugaagucaggauacaaagauuggauccuauggauuuccuuugccauaucauguuuuuugcuuuguguugcuuuguugggguucaucaugugggccugccaaaaaggcaacauuaggugcaacauuugcauuuga

SEQ ID NO: 40701 - RNA, 1701 nt, Artificial Sequence
  derived and/or modified CDS sequence (wt) from hemagglutinin__InfluenzaA__AFH00659
augaagacuaucauugcuuugagcuacauucuaugucugguuuuuacucaaaaacuucccggaaaugacaacagcacggcaacgcugugccuugggcaccaugcaguaccaaacggaacgauggugaaaacaaucacgaaugaccaaauugaaguuacuaaugcuacugagcugguucagaguuccucaacaggugaaauaugcgacaguccucaucagauccuugauggagaaaacugcacacuaauagaugcucuauugggagacccucagugugauggcuuccaaaauaagaaaugggaccuuuuuguugaacgcagcaaagcccacagcaacuguuacccuuaugaugugccggauuaugccucccuuaggucacuaauugccucauccggcacccuggaguuuaacaaugaaagcuucaauuggacuggagucacucaaaaugggacaagcucugcuugcaaaaggagaucugauaacaguuucuuuaguagauugaauugguugacccacuuaaaauucaaauacccagcauugaacgugacuaugccaaacaaugaagaauuugacaaauuguacauuugggggguucaccacccggguacggacaaugaccaaaucagccuauaugcucaagcaucaggaagaaucacagucucuaccaaaagaagccaacaaacuguaaucccgaauaucggaucuagacccaggguaagggauauccccagcagaauaagcaucuauuggacaauaguaaaaccgggagacauacuuuugauuaacagcacagggaaucuaauugcuccucgggguuacuucaaaauacgaagugggaaaagcucaauaaugagaucagaugcacccauuggcaaaugcaauucuggaugcaucacuccaaauggaagcauucccaaugacaaaccauuucaaaauguaaacaggaucacauauggggccugucccagauauguuaagcaaaacacucuaaaauuggcaacagggaugcgaaauguaccagagaaacaaacuagaggcauauuuggcgcaaucgcggguuucauagaaaaugguugggagggaaugguggaugguugguacgguuucaggcaucaaaauucugagggaauaggacaagcagcagaucucaaaagcacucaagcagcaaucgaccaaaucaaugggaagcugaauagguugaucgggaaaaccaacgagaaauuccaucagauugaaaaagaauucucagaaguagaagggagaauucaggaccucgagaaauauguugaggacacuaaaauagaucucuggucauacaacgcggagcuucuuguugcccuggagaaccaacauacaauugaucuaacugacucagaaaugaacaaacuguuugaaagaacaaagaagcaacugagggaaaaugcugaggauaugggcaaugguuguuucaaaauauaccacaaaugugacaaugccugcauagggucaaucagaaauggaacuuaugaccaugauguauacagagaugaagcauuaaacaaccgguuccagaucaaagguguugagcugaagucaggauacaaagauuggauccuauggauuuccuuugccauaucauguuuuuugcuuuguguugcuuuguugggguucaucaugugggccugccaaaaaggcaacauuaggugcaacauuugcauuuga

SEQ ID NO: 40702 - RNA, 1701 nt, Artificial Sequence
  derived and/or modified CDS sequence (wt) from hemagglutinin__InfluenzaA__AFH00670
augaagacuaucauugcuuugagcuacauucuaugucugguuuucgcucaaaaacuucccggaauugacaacagcacggcaacgcugugccuugggcaccaugcaguaccaaacggaacgauagugaaaacaaucacgaaugaccaaauugaaguuacuaaugcuacugagcugguucagaauuccucaacagguggaauaugcgacaguccucaucagauccuugauggagaaaacugcacacuaauagaugcucuauugggagacccucagugugauggcuuccaaaauaagaaaugggaccuuuuuguugaacgcagcaaagccuacagcaacuguuacccuuaugaugugccggauuaugccucccuuaggucacuaguugccucauccggcacacuggaguuuaacaaugaaagcuucaauuggacuggagucacucaaaauggaacaagcucugcuugcaaaaggggaucuaauaacaguuucuuuaguagauugaauugguugacccacucaaaauucaaauacccagcauugaacgugacuaugccaaacaaugaagaauuugacaaauuguacauuugggggguucuccacccggguacggacaaugaccaaaucuuccuguaugcucaagcaucaggaagaaucacagucucuaccaaaagaagucaacaaacuguaaucccgaauaucggaucuagacccagaguaaggaauauccccagcagaauaagcaucuauuggacaauaguaaaaccgggagacauacuuuugauuaacagcacagggaaucuaauugcuccuagggguuacuucaaaauacgaagugggaaaagcucaauaaugagaucagaugcacccauuggcaaaugcaauucugaaugcaucacuccaaauggaagcauucccaaugacaaaccauuucaaaauguaaacaggaucacauacggggccugucccagauauguuaagcaaaacacucugaaauuggcaacagggaugcgaaauguaccagagaaacaaacuagaggcauauuuggcgcaaucgcggguuucauagaaaaugguugggagggaaugguggaugguugguacgguuucaggcaucaaaauucugagggaauaggacaagcagcagaucucaaaagcacucaagcagcaaucgaucaaaucaaugggaagcugaauagguugaucgggaaaaccaacgagaaauuccaccagauugaaaaagaauucucagaaguagaagggagaauucaggaccucgagaaauauguugaggacacuaaaauagaucucuggucauacaacgcggagcuucuuguugcccuggagaaccaacauacaauugaucuaacugacucagaaaugaacaaacuguuugaaaagacaaagaagcaacugagggaaaaugcugaggauaugggcaaugguuguuucaaaauauaccacaaaugugacaaugccugcauaggaucaaucagaaauggaacuuaugaccaugauguauacagagaugaagcauuaaacaaccgguuucagaucaagggcguugagcugaagucaggauacaaagauuggauccuauggauuuccuuugccauaucauguuuuuugcuuuguguugcuuuguugggguucaucaugugggccugccaaaaaggcaacauuaggugcaacauuugcauuuga

SEQ ID NO: 40703 - RNA, 1701 nt, Artificial Sequence
  derived and/or modified CDS sequence (wt) from hemagglutinin__InfluenzaA__AFH00681
augaagacuaucauugcuuugagcuacauucuaugucugguuuucgcucaaaaacuuccuggaaaugacaacagcacggcaacgcugugccuugggcaccaugcaguaccaaacggaacgauagugaaaacaaucacgaaugaccaaauugaaguuacuaaugcuacugagcugguucagaguuccucaacaggugaaauaugcgacaguccucaucagauccuugauggagaaaacugcacauuaauagaugcucuauugggagacccucagugugauggcuuccaaaauaagaaaugggaccuuuuuauugaacgcagcaaagccuacagcaacuguuacccuuaugaugugccggauuaugccucccuuaggucacuaguugccucauccggcacacuggaguuuaacaaugaaagcuucaauuggacuggagucacucaaaacggaacaagcucugcuugcauaaggagaucuaauaacaguuucuuuaguagauugaauugguugacccacuuaaaauucaaauacccagcauuaaacgugacuaugccaaacaaagaaaaauuugacaaauuguacauuugggggguucaccacccggguacggacaaugaccaaaucuuccuguaugcucaagcaucaggaagaaucacagucucuaccaaaagaagucaacaaacuguaaucccgaauaucggaucuagacccagaguaaggaauaucccuagcagaauaagcaucuauuggacaauaguaaaaccgggagacauacuuuugauuaacagcacagggaaucuaauugcuccuagggguuacuucaaaauacgaagugggaaaagcucaauaaugagaucagaugcacccauuggcaaaugcaauucugaaugcaucacuccaaauggaagcauucccaaugacaaaccauuccaaaauguaaacaggaucacauacggggccugucccagauauguuaagcaaaacacucugaaauuggcaacagggaugcgaaauguaccagagaaacaaacuagaggcauauuuggcgcaaucgcggguuucauagaaaaugguugggagggaaugguggaugguugguacgguuucaggcaucaaaauucugagggaauaggacaagcagcagaucucaaaagcacucaagcagcaaucgaucaaaucaaugggaagcugaauagguugaucgggaaaaccaacgagaaauuccaucagauugaaaaagaauucucagaagucgaagggagaauucaggaccuugagaaauauguugaggacaccaaaauagaucucuggucauacaacgcggagcuucuuguugcccuggagaaccaacauacaauugaucuaacugauucagaaaugaacaaacuguuugaaaaaacaaagaagcaacugagggaaaaugcugaggauaugggcaaugguuguuucaaaaucuaccacaaaugugacaaugccugcauaggaucaaucagaaauggaacuuaugaccacgauguauacagagaugaagcauuaaacaaccgguuccagaucaagggcguugagcugaagucaggauacaaagauuggauccuauggauuuccuuugccauaucauguuuuuugcuuuguguugcuuuguugggguucaucaugugggccugccaaaaaggcaacauuaggugcaacauuugcauuuga

SEQ ID NO: 40704 - RNA, 1701 nt, Artificial Sequence
  derived and/or modified CDS sequence (wt) from hemagglutinin__InfluenzaA__AFH00692
augaagacuaucauugcuuugagcuacauucuaugucugguuuucgcucaaaaacuucccggaaaugacaacagcacggcaacgcugugccuugggcaccaugcaguaccaaacggaacgauagugaaaacaaucacgaaugaccaaauugaaguuacuaaugcuacugagcugguucagaguuccucaacaggugaaauaugcgacaguccucaucagauccuugauggagaaaacugcacacuaauagaugcucuauugggagacccucagugugauggcuuccaaaauaagaaaugggaccuuuuuguugaacgcagcaaagccuacagcaacuguuacccuuaugaugugccggauuaugccucccuuaggucacuaguugccucauccggcacacuggaguuuaacaaugaaagcuucaauuggacuggagucacucaaaacggaacaagcucugcuugcauaaggagaucuaauaacaguuucuuuaguagauugaauugguugacccacuuaaaauucaaauacccagcauugaacgugacuaugccaaacaaugaaaaauuugacaaauuguacauuugggggguucaccacccggguacggacaaugaccaaaucuuccuguaugcucaagcaucaggaagaaucacagucucuaccaaaagaagccaacaaacuguaaucccgaauaucggaucuagacccagaguaaggaauauccccagcagaauaagcaucuauuggacaauaguaaaaccgggagacauacuuuugauuaacagcacagggaaucuaauugcuccuagggguuacuucaaaauacgaagugggaaaagcucaauaaugagaucagaugcacccauuggcaaaugcaauucugaaugcaucacuccaaauggaagcauucccaaugacaaaccauuccaaaauguaaacaggaucacauacggggccugucccagauauguuaagcaaaacacucugaaauuggcaacagggaugcgaaauguaccagagaaacaaacuagaggcauauuuggcgcaaucgcggguuucauagaaaaugguugggagggaaugguggaugguugguacgguuucaggcaucaaaauucugagggaauaggacaagcagcagaucucaaaagcacucaagcagcaaucgaucaaaucaaugggaagcugaauagguugaucgggaaaaccaacgagaaauuccaucagauugaaaaagaauucucagaagucgaagggagaauucaggaccuugagaaauauguugaggacaccaaaauagaucucuggucauacaacgcggagcuucuuguugcccuggagaaccaacauacaauugaucuaacugacucagaaaugaacaaacuguuugaaaaaacaaagaagcaacugagggaaaaugcugaggauaugggcaaugguuguuucaaaauauaucacaaaugugacaaugccugcauaggaucaaucagaaauggaacuuaugaccacgauguauacagagaugaagcauuaaacaaccgguuccagaucaagggcguugagcugaagucaggauacaaagauuggauccuauggauuuccuuugccauaucaugcuuuuugcuuuguguugcuuuguugggguucaucaugugggccugccaaaaaggcaacauuaggugcaacauuugcauuuga

SEQ ID NO: 40705 - RNA, 1701 nt, Artificial Sequence
  derived and/or modified CDS sequence (wt) from hemagglutinin__InfluenzaA__AFH00703
augaagacuaucauugcuuugagcuacauucuaugucugguuuucgcucaaaaacuuccuggaaaugacaacagcacggcaacgcugugccuugggcaccaugcaguaccaaacggaacgauagugaaaacaaucacaaaugaccaaauugaaguuacuaaugcuacugagcugguucagaguucuucaacagguaaaauaugcgacaguccucaucagauccuugauggaaaaaacugcacacuaauagaugcucuauugggagacccucagugugauggcuuccaaaauaagaaaugggaccuuuuuguugaacgcagcaaagccuacagcaacuguuacccuuaugaugugccggauuaugcuucccuuaggucacuaguugccucauccggcacacuggaguuuaacaaugaaagcuucaauuggacuggagucacucaaaacggaacaagcucugcuugcauaaggagaucuaaaaacaguuucuuuaguagauugaauugguuaacccacuuaaacuucaaauacucagcauugaacgugacuaugccgaacaaugaacaauuugacaaauuguacauuugggggguucaccacccggguacggacaaagaccaaaucuuccuguaugcccaagcaucaggaagaaucacagucucuaccaaaaggagccaacaaacuguaaucccgaauaucggaucuagaccccgaguaaggaauaucccuagcagaauaagcaucuauuggacaauaguaaaaccgggagacauacuuuugauuaacagcacagggaaucuaauugcuccuagggguuacuucaaaaugcaaagugggaaaagcucaauaaugagaucagaugcacccauuggcaaaugcaauucugaaugcaucacuccaaauggaagcauucccaaugacaaaccauuccaaaaugugaacaggaucacauacggggccugucccagauauguuaagcaaaacacucugaaauuggcaacagggaugcgaaauguaccagagaaacaaacuagaggcauauuuggcgcaaucgcggguuucauagaaaaugguugggagggaaugguggaugguugguacgguuucaggcaucaaaauucugagggaagaggacaagcagcagaucucaaaagcacucaagcagcaaucgaucaaaucaaugggaagcugaauagauugaucgggaaaaccaacgagaaguuccaucagauugaaaaagaauucucagaagucgaagggagaauucaggaccuugagaaauauguugaggacacuaaaauagaucucuggucauacaacgcggagcuucuuguugcccuggagaaccaacauacaauugaucuaacugacucagaaaugaacaaacuguuugaaaaaacaaagaagcaacugagggaaaaugcugaggauaugggcaaugguuguuucaaaauauaccacaaaugugacaaugccugcauaggaucaaucagaaauggaacuuaugaccaugauguauacagagaugaagcauuaaacaaccgguuucagaucaagggaguugagcugaagucaggguacaaagauuggauccuauggauuuccuuugccauaucauguuuuuugcuuuguguugcuuuguugggguucaucaugugggccugccaaaaaggcaacauuaggugcaacauuugcauuuga

SEQ ID NO: 40706 - RNA, 1701 nt, Artificial Sequence
  derived and/or modified CDS sequence (wt) from hemagglutinin__InfluenzaA__AFH00714
augaagacuaucauugcuuugagcuacauuuucugucugguuuucgcccaaaaccuucccggaaaugacaacagcacagcaacgcugugccugggacaccaugcagugccaaacggaacgcuagugaaaacaaucacgaaugaucagauugaagugacuaaugcuacugagcugguucagaguuccucaacagguagaauaugcgacaguccucaccgaauccuugaugggaaaaacugcacacugauagaugcucuauugggagacccucauugugauggcuuucaaaaugagaaaugggaccuuuuuguugaacgcagcaaagcuuucagcaacuguuacccuuaugaugugccagauuaugccucccuuaggucacuaguugccucgucaggcacccuggaguuuaucaaugaaggcuucaauuggacuggagucacucagagugggggaagcuaugcuugcaaaaggggaucugauaaaaguuucuucaguagacugaauugguuguacgaaucagaaagcaaauauccagugcugaacgugacuaugccaaacaauggcaauuuugacaaacuguacauuugggggguucaccacccgagcacggacaaagaacaaaccaaccuauauguucgagcaucagggagagucacagucucuaccaagagaagccagcaaacuauaaucccgaauaucgggucuagacccuggguaaggggucugucuaguggaauaaguaucuauuggacaauaguaaaaccgggagacauacuguuaauuaauaguaaugggaaccuaauugcuccucgggguuacuucaaaauacgcacugggaaaagcucaauaaugaggucagaugcaccuauuggcaccugcaguucugaaugcaucacuccaaauggaagcauucccaaugacaagcccuuucaaaacguaaacaagaucacauauggggcaugucccaaguauguuaagcaaaacacucugaaguuggcaacagggaugcggaauguaccagagaaacaaacuagaggcauauucggcgcaauagcagguuucauagaaaaugguugggagggaaugguagacgguugguacgguuucaggcaucaaaauucugagggcacaggacaagcagcagaucuuaaaagcacucaagcagcaaucgaccaaaucaaugggaaacugaauaggguaaucgagaaaacgaacgagaaauuccaucaaaucgaaaaggaauucucagaaguagaagggagaauucaggaccucgagaaauacguugaagacacuaaaauagaucucuggucuuacaacgcggagcuucuugucgcucuggagaaccaacauacaauugaucugacugacucggaaaugaacaaacuguuugaaaaaacaaggaggcaacugagggaaaaugcugaggacaugggcaaugguugcuucaaaauauaccacaaaugugacaaugcuugcauagggucaaucagaaauggaacuuaugaccaugauguauacagagacgaagcauuaaacaaccgguuucagaucaaagguguugagcugaagucaggauacaaagacuggauccuguggauuuccuuugccauaucaugcuuuuugcuuuguguuguuuugcugggguucaucaugugggccugccaaaaaggcaacauuaggugcaacauuugcauuuga

SEQ ID NO: 40707 - RNA, 1701 nt, Artificial Sequence
  derived and/or modified CDS sequence (wt) from hemagglutinin__InfluenzaA__AFH00725
augaagacuaucauugcuuugagcuacauuuucugucugauuuucgcccaaaaccuucccggaaaugacaacagcacagcaacgcugugccugggacaucaugcagugccaaacggaacgcuagugaaaacaaucacgaaugaucagauugaagugacuaaugcuacugagcugguucagaguuccucaacagguagaauaugcgacaguccucaccgaauccuugaugggaaaaacugcacacugauagaugcucuauugggagacccucauugugauggcuuccaaaaugagaaaugggaccuuuuuguugaacgcagcaaagcuuucagcaacuguuacccuuaugaugugccagauuaugccucccuuaggucacuaguugccucaucaggcacccuggaguuuaucaaugaaggcuucaauuggacuggagucacucagagugggggaagcuaugcuugcaaaaggggaucugauaacaguuucuucaguagacugaacugguuguacgaaucagaaagcaaauauccagugcugaacgugacuaugccaaacaauggcaaauuugacaaauuguacauuugggggguucaccacccgagcacggacaaagaacaaaccaaacuauauguucgagcaucagggagagucacagucucuaccaagagaagccagcaaacuguaaucccgaauaucgggucuagacccuggguaaggggucugucuaguagaauaaguaucuauuggacaauaguaaaaccgggagacauacuguuaauuaauagcacugggaaccuaauugcuccucgggguuacuucaaaauacgcacugggaaaagcucaauaaugaggucagaugcaccuauuggcaccugcaguucugaaugcaucacuccaaauggaagcauucccaaugacaagcccuuucaaaacguaaacaagaucacauauggggcaugucccagguauguuaagcaaaacacucugaaguuggcaacagggaugcggaauguaccagagaaacaaacuagaggcauauucggcgcaauagcagguuucauagaaaaugguugggagggaaugguagacgguugguacgguuucaggcaucaaaauucugagggcacaggacaagcagcagaucuuaaaagcacucaagcagcaaucgaccaaaucaaugggaaacugaauaggguaaucgagaaaacgaacgagaaauuccaucaaaucgaaaaggaauucucagaaguagaagggagaauucaggaccucgagaaauauguugaagacacuaaaauagaucucuggucuuacaacgcggagcuucuugucgcucuggagaaccaacauacaauugaucugacugacucagaaaugaacaaacuguuugaaaaaacaaggaagcaacugagggaaaaugcugaggacaugggcaaugguugcuucaaaauauaccacaaaugugacaaugcuugcauagggucaaucagaaauggaacauaugaccaugauguauacagagacgaagcauuaaacaaccgguuucagaucaaagguguugagcugaagucaggauacaaagacuggauccuguggauuuccuuugccauaucaugcuuuuugcuuuguguuguuuugcugggguucaucaugugggccugccaaaaaggcaacauuaggugcaacauuugcauuuga

SEQ ID NO: 40708 - RNA, 1701 nt, Artificial Sequence
  derived and/or modified CDS sequence (wt) from hemagglutinin__InfluenzaA__AFH00736
augaagacuaucauugcuuugagcuacauuuucugucugguuuucgcccaaaaacuucccggaaaugacaacagcacagcaacgcugugccugggacaucaugcagugccaaacggaacgcuagugaaaacaaucacgaaugaucagauugaagugacuaaugcuacugagcugguucagaguuccucaacagguagaauaugcgacaguccucaccgaauccuugauggaaaaaacugcacacugauagaugcucuauugggagacccucauugugauggcuuccaaaaugagaaaugggaccuuuuuguugaacgcagcaaagcuuacagcaacuguuacccuuaugaugugccggauuaugccucccuuaggucacuaguugccucaucaggcacccuggaguuuaucaaugaagacuucaauuggacuggagucacucagagugggggaagcuaugcuugcaaaaggggaucuguuaaaaguuucuucaguagauugaauugguugcacgaaucagaauacaaauauccagcgcugaacgugacuaugccaaacaauggcaaauuugacaaauuguacauuugggggguucaccacccgagcacggacagagaacaaaccaaccuauauguucgagcaucagggagagucacagucucuaccaagagaagccagcaaacuguaauuccgaauaucgggucuagacccuggguaaggggucuguccaguagaauaagcaucuauuggacaauaguaaaaccgggagacauacuguugauuaauagcaccgggaaccuaauugcuccucgggguuacuucaaaauacgcacugggaaaagcucaauaaugaggucagaugcaccuauuggcaccugcagcucugaaugcaucacuccaaauggaagcauucccaaugacaaacccuuucaaaauguaaacaagaucacauauggggcaugucccagguauguuaagcaaaacacucugaaauuggcaacagggaugcggaauguaccagagaaacaaacuagaggcauauucggcgcaauagcagguuucauagaaaaugguugggagggaaugguagacgguugguacgguuucaggcaucaaaauucugagggcacaggacaagcagcagaucuuaaaagcacucaagcagcaaucgaccaaaucaacgggaaacugaauagguuaaucgagaaaacgaacgagaaauuccaucaaaucgaaaaggaauucucagaaguagaagggagaauucaggaccucgagaaauauguugaagacacuaaaauagaucucuggucuuacaacgcggagcuucuugucgcccuggagaaccaacauacaauugaucugacugacucagaaaugaacaaacuguuugaaaaaacaaggaagcaacugagggaaaaugcugaggacaugggcaaugguugcuucaagauauaccacaaaugugacaaugccugcauagggucaaucagaaauggaacuuaugaccaugauguauacagagacgaagcauuaaacaaccgguuccagaucaaagguguugagcugaagucaggauacaaagacuggaucuuauggauuuccuuugccauaucaugcuuuuugcuuuguguuguuuugcugggguucaucaugugggccugccaaaaaggcaacauuaggugcaacauuugcauuuga

SEQ ID NO: 40709 - RNA, 1701 nt, Artificial Sequence
  derived and/or modified CDS sequence (wt) from hemagglutinin__InfluenzaA__AFH00747
augaagacuaucauugcuuugagcuacauuuucugucugguuuucgcccaaaaacuucccggaaaugacaacagcacagcaacgcugugccugggacauuaugcagugccaaacggaacacuagugaaaacaaucacgaaugaucagauugaagugacuaaugcuacugagcugguucagaguuccucaacagguagaauaugcgacaguccucaccgaauccuugauggaaaaaacugcacacugauagaugcucuauugggagacccucauugugacggcuuccaaaaugagaaaugggaccuuuuuguugaacgcagcaaagcuuacagcaacuguuacccuuaugaugugccggauuaugccucccuuaggucacuaguugccucaucaggcacccuggaguuuaucaaugaagacuucaauuggacuggagucacucagagugggggaagcuaugcuugcaaaaggggaucuguuaaaaguuucuucaguagauugaauugguugcacgaaucagaauacaaauauccagcgcugaacgugacuaugccaaacaauggcaaauuugacaaauuguacauuugggggguucaccacccgagcacggacagagaacaaaccaaccuauauguucgagcaucagggagagucacagucucuaccaagagaagccagcaaacuguaaucccgaauaucgggucuaggcccuggguaaggggucuguccaguagaauaagcaucuauuggacaauaguaaaaccgggagacauacuguugauuaauagcaccgggaaccuaauugcuccucgggguuacuucaaaauacgcacugggaaaagcucaauaaugaggucagaugcaccuauuggcaccugcaguucugaaugcaucacuccaaauggaagcauucccaaugacaaacccuuucaaaauguaaacaagaucacauauggggcaugucccagauauguuaagcaaaacacucugaaauuggcaacagggaugcggaauguaccagagaaacaaacuagaggcauauucggcgcaauagcagguuucauagaaaaugguugggagggaaugguagacggcugguacgguuucaggcaucaaaauucugagggcacaggacaagcagcagaucuuaaaagcacucaagcagcaaucgaccaaaucaacgggaaacugaauagguuaaucgagaaaacgaacgagaaauuccaucaaaucgaaaaggaauucucagaaguagaagggagaauucaggaccucgagaaauauguugaagacacuaaaauagaucucuggucuuacaacgcggagcuucuugucgcccuggagaaccaacauacaauugaucugacugacucagaaaugaacaaacuguuugaaaaaacaaggaagcaacugagggaaaaugcugaggacaugggcaaugguugcuucaagauauaccacaaaugugacaaugccugcauaggaucaaucagaaauggaacuuaugaccaugauguauacagagacgaagcauuaaacaaccgguuccagaucaaagguguugagcugaaaucaggauacaaagacuggauccuauggauuuccuuugccauaucaugcuuuuugcuuuguguuguuuugcugggguucaucaugugggccugccaaaaaggcaacauuaggugcaacauuugcauuuga

SEQ ID NO: 40710 - RNA, 1701 nt, Artificial Sequence
  derived and/or modified CDS sequence (wt) from hemagglutinin__InfluenzaA__AFH00758
augaagacuaucauugcuuugagcuacauuuuaugucugguuuucgcccaaaaacuucccggaaaugacaacagcacagcaacgcugugccugggacaucaugcagugccaaacggaacgcuagugaaaacaaucacgaaugaucaaauugaagugacuaaugcuacugagcugguucagaguuccucaacagguagaauaugcgacaguccucaccgaauccuugauggaaaaaacugcacacugauagaugcucuauugggagacccucauugugauggcuuccaaaauaaggaaugggaccuuuuuguugaacgcagcaaagcuuacagcaacuguuacccuuaugaugugccggauuaugccucccuuaggucacuaguugccucaucaggcacccuggaguuuaucaaugaagacuucaauuggacuggagucgcucagaguggggaaagcuaugcuugcaaaaggggaucuguuaaaaguuucuuuaguagauugaauugguugcacgaaucagaauacaaauauccagcgcugaacgugacuaugccaaacaauggcaaauuugacaaauuguacauuugggggguucaccacccgagcacggacagagaacaaaccaaacuauauguucgagcaucagggagagucacagucucuaccaaaagaagccaacaaacuguaaucccgaauaucgggucuagacccuggguaaggggucuguccaguagaauaagcaucuauuggacaauaguaaaaccgggagacauacuuuugauuaauagcaccgggaaccuaauugcuccucgggguuacuucaaaauacgaacugggaaaagcucaauaaugaggucagaugcacccauuggcaccugcaguucugaaugcaucacuccaaauggaagcauccccaaugacaaaccuuuucaaaauguaaacaggaucacauauggggcaugucccagauauguuaagcaaaacacucugaaauuggcaacagggaugcggaauguaccagagaaacaaacuagaggcauauucggcgcaaucgcagguuucauagaaaaugguugggagggaaugguagacgguugguacgguuucaggcaucaaaauucugagggcacaggacaagcagcagaucuuaaaagcacucaagcagcaaucgaccaaaucaacgggaaacugaauagguuaaucgagaaaacgaacgagaaauuccaucaaaucgaaaaggaauucucagaaguagaagggagaauucaggaccucgagaaauauguugaagacacuaaaauagaucucuggucuuacaacgcggagcuucuuguugcccuggagaaccaacauacaauugaucugacugacucagaaaugaacaaacuguuugaaaaaacaaggaagcaacugagggaaaaugcugaggacaugggcaaugguugcuucaaaauauaccacaaaugugacaaugccugcauagggucaaucagaaauggaacuuaugaccaugauguauacagagacgaagcauuaaacaaccgguuccagaucaaagguguugagcugaagucaggauacaaagauuggauccuauggauuuccuuugccauaucaugcuuuuugcuuuguguuguuuugcugggguucaucaugugggccugccaaaaaggcaacauuaggugcaacauuugcauuuga

SEQ ID NO: 40711 - RNA, 1701 nt, Artificial Sequence
  derived and/or modified CDS sequence (wt) from hemagglutinin__InfluenzaA__AFH00769
augaagacuaucauugcuuugagcuacauuuuaugucugguuuucgcccaaaaacuucccggaaaugacaacagcacagcaacgcugugccuggggcaucaugcagugccaaacggaacucuagugaaaacaaucacgaaugaucaaauugaagugacuaaugcuacugagcugguucagaguuccucaacagguagaauaugcgacaguccucaccgaauccuugauggaaaaaacugcacacugauagaugcucuauugggagacccucauugugauggcuuccaaaauaaggaaugggaccuuuuuguugaacgcagcaaagcuuacagcaacuguuacccuuaugaugugccagauuaugccucccuuaggucacuaguugccucaucaggcacccuggaguuuaucaaugaagacuucaauuggacuggagucgcucagaguggggaaagcuauacuugcaaaaggggaucuguuaaaaguuucuuuaguagauugaauugguugcacgaaucagaauacaaauauccagcgcugaacgugacuaugccaaacaaugacaaauuugacaaauuguacauuugggggguucaccacccgagcacggacagagaacaaaccagccuauauauucgagcaucagggagagucacagucucuaccaaaagaagccaacaaacuguaaucccgaauaucggguccagacccuggguaaggggucuguccaguagaauaagcaucuauuggacaauaguaaaaccgggagacauacuuuugauuaauagcaccgggaaccuaauugcuccucgggguuacuucaaaauacgaacugggaaaagcucgauaaugaggucagaugcacccauuggcaccugcaguucugaaugcaucacuccaaauggaagcauccccaaugacaaaccuuuucaaaauguaaacaggaucacauauggggcaugucccagauauguuaagcaaaacacucugaaauuggcaacagggaugcggaauguaccagagaaacaaacuagaggcauauucggcgcaauugcagguuucauagaaaaugguugggagggaaugguagacgguugguacgguuucaggcaucaaaauucugagggcacaggacaagcagcagaucuuaaaagcacucaagcagcaaucgaccaaaucaacgggaaacugaauagguuaaucgagaaaacgaacgagaaauuccaucaaaucgaaaaggaauucucagaaguagaagggagaauucaggaccucgagaaauauguugaagacacuaaaauagaucucuggucuuacaacgcggagcuucuuguugcccuggagaaccaacauacaauugaucugacugacucagaaaugaacaaacuguuugaaaaaacaaggaagcaacugagggaaaaugcugaggacaugggcaaugguugcuucaaaauauaccacaaaugugacaaugccugcauagggucaaucagaaauggaacuuaugaccaugauguauacagagacgaagcauuaaacaaccgguuccagaucaaagguguugagcugaagucaggauacaaagauuggauccuauggauuuccuuugccauaucaugcuuuuugcuuuguguuguuuugcugggguucaucaugugggccugccaaaaaggcaacauuaggugcaacauuugcauuuga

SEQ ID NO: 40712 - RNA, 1701 nt, Artificial Sequence
  derived and/or modified CDS sequence (wt) from hemagglutinin__InfluenzaA__AFH00780
augagggcuaucauugcuuugagcuacauuuuaugucugguuuucgcucaaaaacuucccggaaaugacaacagcacggcaacgcugugccugggacaccaugcagugccaaacggaacgcuagugaaaacaaucacgaaugaccaaauugaagugacuaaugcuacugagcugguucagaguuccucaacagguagaauaugcgacaguccucaccgaauccuugauggaaaaaacugcacacugauagaugcucuauugggagacccucauugugauggcuuccaaaauaaggaaugggaccuuuuuguugaacgcagcaaagcuuacagcgacuguuacccuuaugaugugccggauuaugcuucccuuaggucacuaguugccucauccggcacccuggaguuuaccaaugaaggcuucaauuggacuggagucgcucaggauggaacaagcuaugcuugcaaaaggggaucuguuaaaaguuucuuuaguagauugaauugguugcacaaauuagaauacaaauauccagcacugaacgugacuaugccaaacaaugacaaauuugacaaauuguacauuugggggguucaccacccgaguacggacagugaccaaaccagccuauauguucaagcaucagggagagucacagucucuaccaaaagaagccaacaaacuguaaucccgaauaucgggucuagacccuggguaaggggggucuccagcagaauaagcaucuauuggacaauaguaaaaccgggagacauacuuuugauuaauagcacagggaaucuaauugccccucgggguuacuucaaaauacgaagugggaaaagcucaauaaugaggucagaugcacccauuggcaacugcaauucugaaugcaucacuccaaauggaagcauucccaaugacaaaccuuuucaaaauguaaacaggaucacauauggggccugucccagauauguuaagcaaaacacucugaaauuggcaacagggaugcggaauguaccagagaaacaaacuagaggcauauucggcgcaaucgcagguuucauagaaaaugguugggagggaaugguagacgguugguacgguuucaggcaucaaaauucugagggcacaggacaagcagcagaucuuaaaagcacucaagcagcaaucaaccaaaucaacgggaaacugaauagguuaaucgagaaaacgaacgagaaauuccaucaaaucgaaaaagaauucucagaaguagaagggagaauucaggaccucgagaaauauguugaagacacuaaaauagaucucuggucuuacaacgcagagcuucuuguugcccuggagaaccaacauacaauugaucuaacugacucagaaaugaacaaacuguuugaaagaacaaggaagcaacugagggaaaaugcugaggacaugggcaaugguugcuucaaaauauaccacaaaugugacaaugccugcauagggucaaucagaaauggaacuuaugaccaugauguauacagagacgaagcauuaaacaaccgguuccagaucaaagguguugagcugaagucaggauacaaagauuggauccuauggauuuccuuugccauaucaugcuuuuugcuuuguguuguuuugcugggguucaucaugugggccugccaaaaaggcaacauuaggugcaacauuugcauuuga

SEQ ID NO: 40713 - RNA, 1701 nt, Artificial Sequence
  derived and/or modified CDS sequence (wt) from hemagglutinin__InfluenzaA__AFH00791
augaagacuaucauugcuuugagcuacauuuuaugucugguuuucgcucaaaaacuucccggaaaugacaacagcacggcaacgcugugccugggacaccaugcagugccaaacggaacgcuagugaaaacaaucacgaaugaccaaauugaagugacuaaugcuacugagcugguucaggguuccucaacagguagaauaugcgacaguccucaccaaauccuugauggaaaaaacugcacacugauagaugcucuauugggagacccucauugugauggcuuccaaaauaaggaaugggaccuuuuugucgaacgcagcacagcuuacagcaacuguuacccuuaugaugugccggauuaugccucccuuaggucacuaguugccucauccggcacccuggaguuuaccaaagaaggcuucaauuggacuggagucgcucaggauggaacaagcuauacuugcaaaaggggaucuguuaaaaguuucuuuaguagauugaauugguugcacaaauuagaauacaaauauccagcacugaacgugacuaugccaaacaaugacaaauuugacaaauuguacauuugggggguucaccacccgaguacggacagugaccaaaccagccuauauguucaagcaucagggagagucacagucucuaccaaaagaagccaacaaacuguaaucccgaauaucgggucuagacccuggguaaggggugucuccagcagaauaagcaucuauuggacaauaguaaaaccgggagacauacuuuugauuaacagcacagggaaucuaauugcuccucgggguuacuucaaaauacgaagugggaaaagcucaauaaugaggucggaugcacccauugacaacugcaauucugaaugcauuacuccaaauggaagcauucccaaugacaaaccuuuucaaaauguaaacaggaucacauauggggccugucccagauauguuaagcaaaacacucugaaauuggcaacagggaugcggaauguaccagagaaacagacuagaggcauauucggcgcaaucgcagguuucauagaaaaugguugggagggaaugguggacgguugguacgguuucaggcaucaaaacucugaaggcacaggacaagcagcagaucuuaaaagcacucaagcagcaaucaaccaaaucaacgggaaacugaauagguuaaucgagaaaacgaacgagaaauuccaucaaaucgaaaaagaauucucagaaguagaagggagaauucaggaccucgagaaauauguugaagacacuaaaauagaucucuggucuuacaacgcggagcuucuuguugcccuggagaaccaacauacaauugaucuaacugacucagaaaugaacaaacuguucgaaagaacaagaaaacaacugagggaaaaugcugaggacaugggcaaugguugcuucaaaauauaccacaaaugugacaaugccugcauagggucaaucagaaauggaacuuaugaucaugauguauacagagacgaagcauuaaacaaccgguuccagaucaaagguguugagcugaagucaggauacaaagauuggauccuauggauuuccuuugccauaucaugcuuuuugcuuuguguuguuuugcugggguucauuaugugggccugccaaaaaggcaacauuaggugcaacauuugcauuuga

SEQ ID NO: 40714 - RNA, 1701 nt, Artificial Sequence; identical to SEQ ID NO: 38281
  derived and/or modified CDS sequence (wt) from hemagglutinin__InfluenzaA__AFH00802

SEQ ID NO: 40715 - RNA, 1701 nt, Artificial Sequence
  derived and/or modified CDS sequence (wt) from hemagglutinin__InfluenzaA__AFH00813
augaagacuaucauugcuuugagcuacauucuaugucugguuuucgcucaaaaacuuccuggaaaugacaacagcacggcaacgcugugccuugggcaccaugcagugccaaacggaacgauagugaaaacaaucacgaaugaccaaauugaaguuacuaaugcuacugagcugguucagaguuccucaacaggugaaauaugcaacaguccucaucagauccuugauggagaaaacugcacacuaauagaugcucuauugggagacccucagugugauggcuuccaaaacaagaaaugggaccuuuuuguugaacgaagcaaagcccacagcaacuguuacccuuaugaugugccggauuaugccucccuuaggucacuaguugccucauccggcacacuggaguuuaacaaugaaagcuucaauuggacuggagucacucaaaacggaacaagcucugcuugcauaaggagaucuaauaauaguuucuuuaguagauugaauugguugacccacuugaacuucaaauacccagcauugaacgugacuaugccaaacaaugaacaauuugacaaauuguacauuugggggguucaccacccggguacggacaaggaccaaaucuuccuguaugcucaagcaucaggaagaaucacaguaucuaccaaaagaagccaacaagcuguaauuccgaauaucggaucuagacccagaguaagggauaucccuagcagaguaagcaucuauuggacaauaguaaaaccgggagauauacuuuugauuaacagcacagggaaucuaauugcuccuagggguuacuucaaaauacgaagugggaaaagcucaauaaugagaucagaugcacccauuggcaaaugcaauucugcaugcaucacuccaaauggaagcauucccaaugacaaaccauuccaaaauguaaacaggaucacauacggggccugucccagauauguuaagcaaaacacucugaaauuggcaacaggaaugcgaaauguaccagagaaacaaacuagaggcauauuuggcgcaauagcggguuucauagaaaaugguugggagggaaugguggaugguugguacgguuucaggcaucaaaauucugagggaaggggacaagcagcagaucucaaaagcacucaagcagcaaucgaucaaaucaaugggaagcugaauagauugaucgggaaaaccaacgagaaauuccaucagauugaaaaagaauucucagaagucgaagggagaauucaggaccuugagaaauauguugaggacacuaaaauagaucucuggucauacaacgcggagcuucuuguugcccuggagaaccaacacacaauugaucuaacugacucagaaaugaacaaacuguuugaaaaaacaaagaagcaacugagggaaaaugcugaggauaugggcaaugguuguuucaaaauauaccacaaaugugacaaugccugcauaggaucgaucagaaauggaacuuaugaccacgauguguacagagaugaagcauuaaacaaccgauuccagaucaagggaguugagcugaagucaggguacaaagauuggauccuauggauuuccuuugccauaucauguuuuuugcuuuguguugcuuuguugggguucaucaugugggccugccaaaaaggcaacauuaggugcaacauuugcauuuga

SEQ ID NO: 40716 - RNA, 1701 nt, Artificial Sequence
  derived and/or modified CDS sequence (wt) from hemagglutinin__InfluenzaA__AFH00824
augaagacuaucauugcuuugagcuacauucuacgucugguuuucgcucaaaaacuuccuggaaaugacaacagcacggcaacgcugugccuugggcaccaugcaguaccaaacggaacgauagugaaaacaaucacgaaugaccaaauugaaguuacuaaugcuacugagcugguucagaauuccucaauaggugaaauaugcaacaguccucaucagauccuugauggagaaaacugcacacuaauagaugcucuauugggagacccucagugugauggcuuccaaaauaagaaaugggaccuuuuuguugaacgaagcaaagccuacagcaacuguuacccuuaugaugugccggauuaugccucccuuaggucacuaguugccucauccggcacacuggaguuuaacaaugaaagcuucaauuggacuggagucacucaaaacggaacaaguucugcuugcauaaggagaucuaauaauaguuucuuuaguagauugaauugguugacccacuuaaacuucaaauacccagcauugaacgugacuaugccaaacaaugaacaauuugacaaauuguacauuugggggguucaccacccggguacggacaaggaccaaaucuuccuguaugcucaaucaucaggaagaaucacaguaucuaccaaaagaagccaacaagcuguaaucccgaauaucggaucuagacccagaauaagggauaucccuagcagaauaagcaucuauuggacaauaguaaaaccgggagacauacuuuugauuaacagcacagggaaucuaauugcuccuagggguuacuucaaaauacgaagugggaaaagcucaauaaugagaucagaugcacccauuggcaaaugcaauucugaaugcaucacuccaaauggaagcauucccaaugacaaaccauuccaaaauguaaacaggaucacauacggggccugucccagauauguuaagcaaagcacucugaaauuggcaacaggaaugcgaaauguaccagagaaacaaacuagaggcauauuuggcgcaauagcggguuucauagaaaaugguugggagggaaugguggaugguugguacgguuucaggcaucaaaauucugagggaagaggacaagcagcagaucucaaaagcacucaagcagcaaucgaucaaaucaaugggaagcugaaucgauugaucgggaaaaccaacgagaaauuccaucagauugaaaaagaauucucagaagucgaagggagaauucaggaccuugagaaauauguugaggacacuaaaauagaucucuggucauacaacgcggagcuucuuguugcccuggagaaccaacauacaauugaucuaacugacucagaaaugaacaaacuguuugaaaaaacaaagaagcaacugagggaaaaugcugaggauaugggcaaugguuguuucaaaauauaccacaaaugugacaaugccugcauaggaucaaucagaaauggaacuuaugaccacgauguauacagagaugaagcauuaaacaaccgguuccagaucaagggaguugagcugaagucaggguacaaagauuggauccuauggauuuccuuugccauaucauguuuuuugcuuuguguugcuuuguugggguucaucaugugggccugccaaaagggcaacauuaggugcaacauuugcauuuga

SEQ ID NO: 40717 - RNA, 1701 nt, Artificial Sequence
  derived and/or modified CDS sequence (wt) from hemagglutinin__InfluenzaA__AFH01407
augaagacuaucauugcuuugagcuacauucuaugucugguuuucgcucaaaagcuucccggaaaugacaacagcacggcaacgcugugccuugggcaccaugcaguaccaaacggaacgauagugaaaacaaucacgaaugaccaaauugaaguuacuaaugcuacugagcugguucagaguuccucaacagguggaauaugcaacaguccucaucagauccuugauggagaaaacugcacacuaauagaugcucuauugggagacccucagugugauggauuccaaaauaagaaaugggaccuuuuuguugaacgcagcaaagccuacagcaacuguuacccuuaugaugugccggauuaugccucccuuaggucacuaguugccucauccggcacacuggaguuuaacaaugaaagcuucaauuggacuggagucacucagaauggaacaagcucugcuugcaaaaggagaucuaauaaaaguuucuuuaguagauugaauugguugacccacuuaaaauacaaauacccagcauugaacgugacuaugccaaacaaugaaaaauuugacaaauuguacauuugggggguucaccacccggguacggacagugaccaaaucagccuauaugcucaagcaucaggaagaaucacagucucuaccaaaagaagccaacaaacuguaaucccgaauaucggaucuagacccaggguaagggauaucuccagcagaauaagcaucuauuggacaauaguaaaaccgggagacauacuuuugauuaacagcacagggaaucuaauugcuccucgggguuacuucaaaauacgaagugggaaaagcucaauaaugagaucagaugcacccauuggcaaaugcaauucugaaugcaucacuccaaauggaagcauucccaaugacaaaccauuucaaaauguaaacaggaucacauauggggccugucccagauauguuaagcaaaacacucugaaauuggcaacagggaugcgaaauguaccagagaaacaaacuagaggcauauuuggcgcaaucgcggguuucauagaaaaugguugggagggaaugguggacgguugguacgguuucaggcaucaaaauucugagggcacaggacaagcagcagaucucaaaagcacucaagcagcaaucaaccaaaucaaugggaaacugaauagguuaaucgggaaaacaaacgagaaauuccaucagauugaaaaagaauucucagaaguagaagggagaauucaggaccucgagaaauauguugaggacacuaaaauagaucucuggucauacaacgcggagcuucuuguugcccuggagaaccaacauacaauugaucuaacugacucagaaaugaacaaacuguuugaaagaacaaagaagcaacugagggaaaaugcugaggauaugggcaaugguuguuucaaaauauaccacaaaugugacaaugccugcauagagucaaucagaaauggaacuuaugaccaugauguauacagagaugaagcauuaaacaaccgguuccagaucaaagguguugagcugaagucaggauacaaagauuggauccuauggauuuccuuugccauaucauguuuuuugcuuuguguugcuuuguugggguucaucaugugggccugccaaaaaggcaacauuaggugcaacauuugcauuuga

SEQ ID NO: 40718 - RNA, 1701 nt, Artificial Sequence
  derived and/or modified CDS sequence (wt) from hemagglutinin__InfluenzaA__AFH34940
augaagacuaucauugcuuugagcuacauucuaugucugguuuucgcucaaaaacuuccuggaaaugacaacagcacggcaacgcugugccuugggcaccaugcaguaccaaacggaacgauagugaaaacaaucacgaaugaccaaauugaaguuacuaaugcuacugaacugguucagaguuccucaacaggugaaauaugcgacaguccucaucagauccuugauggagaaaacugcacacuaauagaugcucuauugggagacccucagugugauggcuuccaaaauaagaagugggaccuuuuuguugaacgaagcaaagccuacagcaacuguuacccuuaugaugugccggauuaugccucccuuaggucacuaguugccucauccggcacacuggaguuuaacaaugaaagcuucaauuggacuggagucacucaaaacggaacaagcucugcuugcauaaggagaucuaauaguaguuucuuuaguagauugaauugguugacccacuuaaacuucaaauacccagcauugaacgugacuaugccaaacaaugaacaauuugacaaauuguacauuugggggguucaccacccggguacggacaaggaccaaaucuuccuguaugcucaaucaucaggaagaaucacaguaucuaccaaaagaagccaacaagcuguaaucccgaauaucggaucuagacccagaauaaggaauaucccuagcagaauaagcaucuauuggacaauaguaaaaccgggagacauacuuuugauuaacagcacagggaaucuaauugcuccuaggggguacuucaaaauacgaagugggaaaagcucaauaaugagaucagaugcacccauuggcaaaugcaauucugaaugcaucacuccaaauggaagcauucccaaugauaaaccauuccaaaauguaaacaggaucacauacggggccugucccagauauguuaagcaaagcacucugaaauuggcaacaggaaugcgaaauguaccagagaaacaaacuagaggcauauuuggcgcaauagcggguuucauagaaaaugguugggagggaaugguggaugguugguacgguuucaggcaucaaaauucugagggaagaggacaagcagcagaucucaaaagcacucaagcagcaaucgaucaaaucaaugggaagcugaaucgauugaucgggaaaaccaacgagaaauuccaucagauugaaaaagaauucucagaagucgaagggagaauucaggaccuugagaaauauguugaggacacuaaaauagaucucuggucauacaacgcggagcuucuuguugcccuggagaaccaacauacaauugaucuaacuggcucagaaaugaacaaacuguuugaaaaaacaaagaagcaacugagggaaaaugcugaggauaugggcaaugguuguuucaaaauauaccacaaaugugacaaugccugcauaggaucaaucagaaauggaacuuauaaccacgauguauacagagaugaagcauuaaacaaccgguuccagaucaagggaguugagcugaagucaggguacaaagauuggauccuauggauuuccuuugccauaucauguuuuuugcuuuguguugcuuuguugggguucaucaugugggccugccaaaagggcaacauuaggugcaacauuugcauuuga

SEQ ID NO: 40719 - RNA, 1701 nt, Artificial Sequence
  derived and/or modified CDS sequence (wt) from hemagglutinin__InfluenzaA__AFH34961
augaagacuaucauugcuuugagcuacauucuaugucugguuuucgcucaaaaacuuccuggaaaugacaacagcacggcaacgcugugccuugggcaccaugcaguaccaaacggaacgauagugaaaacaaucacgaaugaccaaauugaaguuacuaaugcuacugagcugguucagaguuccucaacaggugaaauaugcgacaguccucaucagauccuugauggagaaaacugcacacuaauagaugcucuauuaggagacccucagugugauggcuuccaaaauaagaagugggaccuuuuuguugaacgaagcaaagccuacagcaacuguuacccuuaugaugugccggauuaugccucccuuaggucacuaguugccgcauccggcacacuggaguuuaacaaugaaagcuucaauuggacuggagucacucaaaacggaacaagcucugcuugcauaaggagaucuaauaguaguuucuuuaguagauugaauugguugacccacuuaaacuucaaauacccagcauugaacgugacuaugccaaacaaugaacaauuugacaaauuguacauuugggggguucaccacccggguacggacaaggaccaaaucuuccuguaugcucaaucaucaggaagaaucacaguaucuaccaaaagaagccaacaagcuguaaucccgaauaucggaucuagacccagaauaaggaauaucccuagcagaauaagcaucuauuggacaauaguaaaaccgggagacauacuuuugauuaacagcacagggaaucuaauugcuccuagggguuacuucaaaauacgaagugggaaaagcucaauaaugagaucagaugcacccauuggcaaaugcaauucugaaugcaucacuccaaauggaagcauucccaaugacaaaccauuccaaaauguaaacaggaucacauacggggccugucccagauauguuaagcaaagcacucugaaauuggcaacaggaaugcgaaauguaccagagaaacaaacuagaggcauauuuggcgcaauagcggguuucauagaaaaugguugggagggaaugguggaugguugguacgguuucaggcaucaaaauucugagggaagaggacaagcagcagaucucaaaagcacucaagcagcaaucgaucaaaucaaugggaagcugaaucgguugaucgggaaaaccaacgagaaauuccaucagauugaaaaagaauucucagaagucgaagggagaauucaggaccuugagaaauauguugaggacacuaaaauagaucucuggucauacaacgcggagcuucuuguugcccuggagaaccagcauacaauugaucuaacugacucagaaaugaacaaacuguuugaaaaaacaaagaagcaacugagggaaaaugcugaggauaugggcaaugguuguuucaaaauauaccacaaaugugacaaugccugcauaggaucaaucagaaauggaacuuauaaccacgauguauacagagaugaagcauuaaacaaucgguuccagaucaagggaguugagcugaagucaggguacaaagauuggauccuauggauuuccuuugccauaucauguuuuuugcuuuguguugcuuuguugggguucaucaugugggccugccaaaagggcaacauuaggugcaacauuugcauuuga

SEQ ID NO: 40720 - RNA, 1701 nt, Artificial Sequence
  derived and/or modified CDS sequence (wt) from hemagglutinin__InfluenzaA__AFH34968
augaagacuaucauugcuuugagcuacauucuaugucugguuuucgcucaaaaacuuccuggaaaugacaacagcacggcaacgcugugccuugggcaccaugcaguaccaaacggaacgauagugaaaacaaucacgaaugaccaaauugaaguuacuaaugcuacugagcugguucagaguuccucaacaggugaaauaugcgacaguccucaucagauccuugauggagaaaacugcacacuaauagaugcucuauugggagacccucagugugauggcuuccaaaauaagaagugggaccuuuuuguugaacgaagcaaagccuacagcaacuguuacccuuaugaugugccggauuaugccucccuuaggucacuaguugccgcauccggcacacuggaguuuaacaaugaaagcuucaauuggacuggagucacucaaaacggaacaagcucugcuugcauaaggagaucuaauaguaguuucuuuaguagauugaauugguugacccacuuaaacuucaaauacccagcauugaacgugacuaugccaaacaaugaacaauuugacaaauuguacauuugggggguucaccacccggguacggacaaggaccaaaucuuccuguaugcucaaucaucaggaagaaucacaguaucuaccaaaagaagccaacaagcuguaaucccgaauaucggaucuagacccagaauaagggauaucccuagcagaauaagcaucuauuggacaauaguaaaaccgggagacauacuuuugauuaacagcacagggaaucuaauugcuccuagggguuacuucaaaauacgaagugggaaaagcucaauaaugagaucagaugcacccauuggcaaaugcaauucugcaugcaucacuccaaauggaagcauucccaaugacaaaccauuccaaaauguaaacaggaucacauacggggccugucccagauauguuaagcaaagcacucuaaaauuggcaacaggaaugcgaaauguaccagagaaacaaacuagaggcauauuuggcgcaauagcggguuucauagaaaaugguugggagggaaugguggaugguugguacgguuucaggcaucaaaauucugagggaagaggacaagcagcagaucucaaaagcacucaagcagcaaucgaucaaaucaaugggaagcugaaucgguugaucgggaaaaccaacgagaaauuccaucagauugaaaaagaauucucagaagucgaagggagaauucaggaccuugagaaauauguugaggacacuaaaauagaucucuggucauacaacgcggagcuucuuguugcccuggagaaccagcauacaauugaucuaacugacucagaaaugaacaaacuguuugaaaaaacaaagaagcaacugagggaaaaugcugaggauaugggcaaugguuguuucaaaauauaccacaaaugugacaaugccugcauaggaucaaucagaaauggaacuuauaaccacgauguauacagagaugaagcauuaaacaaccgguuccagaucaagggaguugagcugaagucaggguacaaagauuggauccuauggauuuccuuugccauaucauguuuuuugcuuuguguugcuuuguugggguucaucaugugggccugccaaaagggcaacauuaggugcaacauuugcauuuga

SEQ ID NO: 40721 - RNA, 1701 nt, Artificial Sequence
  derived and/or modified CDS sequence (wt) from hemagglutinin__InfluenzaA__AFH34975
augaagacuaucauugcuuugagcuacauucuaugucugguuuucgcucaaaaacuuccuggaaaugacaauagcacggcaacgcugugccuugggcaccaugcaguaccaaacggaacgauagugaaaacaaucacgaaugaccgaauugaaguuacuaaugcuacugagcugguucagaauuccucaauaggugaaauaugcgacaguccucaucagauccuugauggagaaaacugcacacuaauagaugcucuauugggagacccucagugugauggcuuccaaaauaagaaaugggaccuuuuuguugaacgaagcaaagccuacagcaacuguuacccuuaugaugugccggauuaugccucccuuaggucacuaguugccucauccggcacacuggaguuuaacaaugaaagcuucaauuggaauggagucacucaaaacggaacaaguucugcuugcauaaggagaucuaauaauaguuucuuuaguagauuaaauugguugacccacuuaaacuucaaauacccagcauugaacgugacuaugccaaacaaugaacaauuugacaaauuguacauuugggggguucaccacccggguacggacaaggaccaaaucuuccuguaugcucaaccaucaggaagaaucacaguaucuaccaaaagaagccaacaagcuguaaucccgaauaucggaucuagacccagaauaaggaauaucccuagcagaauaagcaucuauuggacaauaguaaaaccgggagacauacuuuugauuaacagcacagggaaucuaauugcuccuagggguuacuucaaaauacgaagugggaaaagcucaauaaugagaucagaugcacccauuggcaaaugcaagucugaaugcaucacuccaaauggaagcauucccaaugacaaaccauuccaaaauguaaacaggaucacauacggggccugucccagauauguuaagcaaagcacucugaaauuggcaacaggaaugcgaaauguaccagagaaacaaacuagaggcauauuuggcgcaauagcggguuucauagaaaaugguugggagggaaugguggaugguugguacgguuucaggcaucaaaauucugagggaagaggacaagcagcagaucucaaaagcacucaagcagcaaucgaucaaaucaaugggaagcugaaucgauugaucgggaaaaccaacgagaaauuccaucagauugaaaaagaauucucagaaguagaagggagaauucaggaccuugagaaauauguugaggacacuaaaauagaucucuggucauacaacgcggagcuucuuguugcccuggagaaccaacauacaauugaucuaacugacucagaaaugaacaaacuguuugaaaaaacaaagaagcaacugagggaaaaugcugaggauaugggcaaugguuguuucaaaauauaccacaaaugugacaaugccugcauaggaucaaucagaaauggaacuuaugaccacgauguauacagagaugaagcauuaaacaaccgguuccagaucaagggaguugagcugaagucaggguacaaagauuggauccuauggauuuccuuugccauaucauguuuuuugcuuuguguugcuuuguugggguucaucaugugggccugccaaaagggcaacauuaggugcaacauuugcauuuga

SEQ ID NO: 40722 - RNA, 1701 nt, Artificial Sequence; identical to SEQ ID NO: 40196
  derived and/or modified CDS sequence (wt) from hemagglutinin__InfluenzaA__AFH74464

SEQ ID NO: 40723 - RNA, 1701 nt, Artificial Sequence; identical to SEQ ID NO: 35311
  derived and/or modified CDS sequence (wt) from hemagglutinin__InfluenzaA__AFH74465

SEQ ID NO: 40724 - RNA, 1701 nt, Artificial Sequence; identical to SEQ ID NO: 35442
  derived and/or modified CDS sequence (wt) from hemagglutinin__InfluenzaA__AFH74477

SEQ ID NO: 40725 - RNA, 1701 nt, Artificial Sequence
  derived and/or modified CDS sequence (wt) from hemagglutinin__InfluenzaA__AFH74488
augaagacuaucauugcuuugagcuacauucuaugucugguuuucgcucaaaaacuuccuggaaaugacaacagcacggcaacgcugugccuugggcaccaugcaguaccaaacggaacgauagugaaaacaaucacgaaugaccaaauugaaguuacuaaugcuacugagcugguucagaguuccucaacaggugaaauaugcgacaauccucaucagauccuugauggaaaaaacugcacacuaauagaugcucuauugggagacccucagugugauggcuuccaaaauaagaaaugggaccuuuuuguugaacgcagcaaagccuacagcaacuguuacccuuaugaugugccggauuaugccucccuuaggucacuaguugccucauccggcacauuggaguuuaacaaugaaagcuucaauuggacuggagucacucaaaacggaacaagcucugcuugcauaaggagaucuaaaaacaguuucuuuaguagauugaauugguugacccacuuaaacuucaaauacccagcauugaacgugacuaugccaaacaaugaacaauuugacaaauuguacauuugggggguucaccacccggguacggacaaagaccaaaucuuccuguaugcucaagcaucaggaagaaucacagucucuaccaaaagaagccaacaaacuguaaucccgaauaucggaucuagacccagaguaaggaauaucccuagcagaauaagcaucuauuggacaauaguaaaaccgggagacauacuuuugauuaacagcacagggaaucuaauugcuccuagggguuacuucaaaauacgaagugggaaaagcucaauaaugagaucagaugcacccauuggcaaaugcaauucugaaugcaucacuccaaauggaagcauucccaaugacaaaccauuccaaaauguaaacaggaucacauacggggccugucccagauauguuaagcaaaacacucugaaauuggcaacagggaugcgaaauguaccagagaaacaaacuagaggcauauuuggcgcaaucgcggguuucauagaaaaugguugggagggaaugguggaugguugguacgguuucaggcaucaaaauucugagggaagaggacaagcagcagaucucaaaagcacucaagcagcaaucgaucaaaucaaugggaagcugaauagauugaucgggaaaaccaacgagaaguuccaucagauugaaaaagaauucucagaaguugaagggagaauucaggaccuugagaaauauguugaggacacuaaaauagaucucuggucauacaacgcggagcuucuuguugcucuggagaaccaacauacaauugaucuaacugacucagaaaugaacaaacuguuugaaagaacaaagaagcaacugagggaaaaugcugaggauaugggcaaugguuguuucaaaauauaccacaaaugugacaaugccugcauaggaucaaucagaaauggaacuuaugaccaugauguauacagagaugaagcauuaaacaaccgguuucagaucaagggaguugagcugaagucaggguacaaagauuggauccuauggauuuccuuugccauaucauguuuuuugcuuuguguugcuuuguugggguucaucaugugggccugccaaaaaggcaacauuaggugcaacauuugcauuuga

SEQ ID NO: 40726 - RNA, 1701 nt, Artificial Sequence; identical to SEQ ID NO: 40156
  derived and/or modified CDS sequence (wt) from hemagglutinin__InfluenzaA__AFH74499

SEQ ID NO: 40727 - RNA, 1701 nt, Artificial Sequence; identical to SEQ ID NO: 40157
  derived and/or modified CDS sequence (wt) from hemagglutinin__InfluenzaA__AFH74510

SEQ ID NO: 40728 - RNA, 1701 nt, Artificial Sequence
  derived and/or modified CDS sequence (wt) from hemagglutinin__InfluenzaA__AFH74521
augaagacuaucauugcuuugagcuacauucuaugucugguuuucgcucaaaaaauuccuggaaaugacaacagcacggcaacgcugugccuugggcaccaugcaguaccaaacggaacgauagugaaaacaaucacgaaugaccaaauugaaguuacuaaugcuacugagcugguucagaguuccucaacaggugaaauaugcaacaguccucaucagauccuugauggagaaaacugcacacuaauagaugcucuauugggagacccucagugugauggcuuccaaaauaagaaaugggaccuuuuuguugaacgcagcaaagcuuacagcaacuguuacccuuaugaugugccggauuaugccucccuuaggucacuaguugccucauccggcacacuggaguuuaacaaugaaagcuucaauuggacuggagucacucaaaacggaacaagcucugcuugcauaaggagaucuaauaacaguuucuuuaguagauugaauugguugacccacucaaaauccaaauacccagcauugaaugugacuaugccaaacaaugaacaauuugacaaauuguacauuugggggguucaccacccggguacggacaaugaccaaaucuuccuguaugcucaagcaucaggaagaaucacagucucuaccaaaagaagccaacaaacuguaaucccgaauaucggaucuagacccagaauaagggauaucccuagcagaauaagcaucuauuggacaauaguaaaaccgggagacauacuuuugauuaacagcacagggaaucuaauugcuccuagggguuacuucaaaauacgaagugggaaaagcucaauaaugaagucagaugcacccauuggcaaaugcaauucugaaugcaucacuccaaauggaagcauucccaaugacaaaccauuccaaaauguaaacaggaucacauacggggccugucccagauauguuaagcaaaacacucugaaauuggcaacagggaugcgaaauguaccagagaaacaaacuagaggcauauuuggcgcaaucgcggguuucauagaaaaugguugggagggaaugguggaugguugguacgguuucaggcaucaaaauucugagggaagaggacaagcagcagaucucaaaaguacucaagcagcaaucgaucaaaucaaugggaagcugaauagauugaucgggaaaaccaacgagaaauuccaucagauugaaaaagaauucucagaggucgaagggagaauucaggaccuugagaaauauguugaggacaccaaaguagaucucuggucauacaacgcggagcuucuuguugcccuggagaaccaacauacaauugaucuaacugacucagaaaugaacaaacuguuugaaaaaacaaagaagcaacugagggaaaaugcugaggauaugggcaaugguuguuucaaaauauaccacaaaugugacaaugcuugcauaggaucaaucagaaauggaacuuaugaccacgauguauacagagaugaagcauuaaacaaccgguuccagaucaagggaguugagcugaagucaggguacaaagauuggauccuauggauuuccuuugccauaucauguuuuuugcuuuguguugcuuuguugggguucaucaugugggccugccaaaaaggcaacauuaggugcaacauuugcauuuga

SEQ ID NO: 40729 - RNA, 1701 nt, Artificial Sequence; identical to SEQ ID NO: 40158
  derived and/or modified CDS sequence (wt) from hemagglutinin__InfluenzaA__AFH74532

SEQ ID NO: 40730 - RNA, 1701 nt, Artificial Sequence; identical to SEQ ID NO: 40159
  derived and/or modified CDS sequence (wt) from hemagglutinin__InfluenzaA__AFH74543

SEQ ID NO: 40731 - RNA, 1701 nt, Artificial Sequence; identical to SEQ ID NO: 40159
  derived and/or modified CDS sequence (wt) from hemagglutinin__InfluenzaA__AFH74554

SEQ ID NO: 40732 - RNA, 1701 nt, Artificial Sequence; identical to SEQ ID NO: 40159
  derived and/or modified CDS sequence (wt) from hemagglutinin__InfluenzaA__AFH74565

SEQ ID NO: 40733 - RNA, 1701 nt, Artificial Sequence; identical to SEQ ID NO: 40162
  derived and/or modified CDS sequence (wt) from hemagglutinin__InfluenzaA__AFH74576

SEQ ID NO: 40734 - RNA, 1701 nt, Artificial Sequence; identical to SEQ ID NO: 40164
  derived and/or modified CDS sequence (wt) from hemagglutinin__InfluenzaA__AFH74587

SEQ ID NO: 40735 - RNA, 1701 nt, Artificial Sequence
  derived and/or modified CDS sequence (wt) from hemagglutinin__InfluenzaA__AFH74598
augaagacuaucauugcuuugagcuacauucuaugucugguuuucgcucaaaaacuuccugaaaaugacaacagcacggcaacgcugugccuugggcaccaugcaguaccaaacggaacgauagugaaaacaaucacgaaugaccaaauugaaguuacuaaugcuacugagcugguucagaguuccucaacaggugaaauaugcgacaguccucaucagauccuugauggaaaaaacugcacacuaauagaugcucuauugggagacccucagugugauggcuuccaaaauaagaaaugggaccuuuuuguugaacgcagcaaagccuacagcaacuguuacccuuaugaugugccggauuaugccucccuuaggucacuaguugccucauccggcacacuggaguuuaacaaugaaagcuucaauuggacuggagucacucaaaacggaacaagcucugcuugcauaaggagaucuaaaaacaguuucuuuaguagauugaauugguugacccacuuaaacuucaaauacccagcauugaacgugacuaugccaaacaaugaacaauuugacaaauuguacauuugggggguucaccacccggguacggacaaagaccaaaucuuccuguaugcucaagcaucaggaagaaucacagucucuaccaaaagaagccaacaaacugcaaucccgaauaucggaucuagacccagaguaaggaauaucccuagcagaauaagcaucuauuggacaauaguaaaaccgggagacauacuuuugauuaacagcacagggaaucuaauugcuccuagggguuacuucaaaauacgaagugggaaaagcucaauaaugagaucagaugcacccauuggcaaaugcaauucugaaugcaucacuccaaauggaagcauucccaaugacaaaccauuccaaaauguaaacaggaucacauacggggccugucccagauauguuaagcaaaacacucugaaauuggcaacagggaugcgaaauguaccagagaaacaaacuagaggcauauuuggcgcaaucgcggguuucauagaaaaugguugggagggaaugguggaugguugguacgguuucaggcaucaaaauucugagggaagaggacaagcagcagaucucaaaagcacucaagcagcaaucgaucaaaucaaugggaagcugaauagauugaucgggaaaaccaacgagaaauuccaucagauugaaaaagaauucucagaagucgaagggagaauucaggaccuugagaaauauguugaggacacuaaaauagaucucuggucauacaacgcggagcuucuuguugcccuggagaaccaacauacaauugaucuaacugacucagaaaugaacaaacuguuugaaaaaacaaagaagcaacugagggaaaaugcugaggauaugggcaaugguuguuucaaaauauaccacaaaugugacaaugccugcauaggaucaaucagaaauggaacuuaugaccacgauguauacagagaugaagcacuaaacaaccgguuucagaucaagggaguugagcugaagucaggguacaaagauuggauccuauggauuuccuuugccauaucauguuuuuugcuuuguguugcuuuguugggguucaucaugugggccugccaaaaaggcaacauuaggugcaacauuugcauuuga

SEQ ID NO: 40736 - RNA, 1701 nt, Artificial Sequence; identical to SEQ ID NO: 40165
  derived and/or modified CDS sequence (wt) from hemagglutinin__InfluenzaA__AFH74609

SEQ ID NO: 40737 - RNA, 1701 nt, Artificial Sequence; identical to SEQ ID NO: 40164
  derived and/or modified CDS sequence (wt) from hemagglutinin__InfluenzaA__AFH74620

SEQ ID NO: 40738 - RNA, 1701 nt, Artificial Sequence
  derived and/or modified CDS sequence (wt) from hemagglutinin__InfluenzaA__AFH74631
augaagacuaucauugcuuugagcuacauucuaugucugguuuucgcucaaaaacuuccuggaaaugacaacagcacggcaacgcugugccuugggcaccaugcaguaccaaacggaacgauagugaaaacaaucacgaaugaccaaauugaaguuacuaaugcuacugagcugguucagaguuccucaacaggugaaauaugcgacaguccucaucagauccuugauggaacaaacugcacacuaauagaugcucuauugggagacccucagugugauggcuuccaaaauaagaaaugggaccuuuuuguugaacgcagcaaagccuacagcaacuguuacccuuaugaugugccggauuaugccucccuuaggucacuaguugccucauccggcacacuggaguuuaacaaugaaagcuucaauuggacuggagucacucaaaacggaacaagcucugcuugcauaaggagaucuaaaaacaguuucuuuaguagauugaauugguugacccacuuaaacuucaaauacccagcauugaacgugacuaugccaaacaaugaacaauuugacaaauuguacauuugggggguucaucacccggguacggacaaagaccaaaucuuccuguaugcucaagcaucaggaagaaucacagucucuaccaaaagaagccaacaaacugcaaucccgaauaucggaucuagacccagaguaaggaauaucccuagcagaauaagcaucuauuggacaauaguaaaaccgggagacauacuuuugauuaacagcacagggaaucuaauugcuccuagggguuacuucaaaauacgaagugggaaaagcucaauaaugagaucagaugcacccauuggcaaaugcaauucugaaugcaucacuccaaauggaagcauucccaaugacaaaccauuccaaaauguaaacaggaucacauacggggccugucccagauauguuaagcaaaacacucugaaauuggcaacagggaugcgaaauguaccagagaaacaaacuagaggcauauuuggcgcaaucgcggguuucauagaaaaugguugggagggaaugguggaugguugguacgguuucaggcaucaaaauucugagggaagaggacaagcagcagaucucaaaagcacucaagcagcaaucgaucaaaucaaugggaagcugaauagauugaucgggaaaaccaacgagaaauuccaucagauugaaaaggaauucucagaagucgaagggagaauucaggaccuugagaaauauguugaggacacuaaaauagaucucuggucauacaacgcggagcuucuuguugcccuggagaaccaacauacaauugaucuaacugacucagaaaugaacaaacuguuugaaaaaacaaagaagcaacugagggaaaaugcugaggauaugggcaaugguuguuucaaaauauaccacaaaugugacaaugccugcauaggaucaaucagaaauggaacuuaugaccacgauguauacagagaugaagcacuaaacaaccgguuucagaucaagggaguugagcugaagucaggguacaaagauuggauccuauggauuuccuuugccauaucauguuuuuugcuuuguguugcuuuguugggguucaucaugugggccugccaaaaaggcaacauuaggugcaacauuugcauuuga

SEQ ID NO: 40739 - RNA, 1701 nt, Artificial Sequence; identical to SEQ ID NO: 40156
  derived and/or modified CDS sequence (wt) from hemagglutinin__InfluenzaA__AFH74642

SEQ ID NO: 40740 - RNA, 1701 nt, Artificial Sequence; identical to SEQ ID NO: 40156
  derived and/or modified CDS sequence (wt) from hemagglutinin__InfluenzaA__AFH74653

SEQ ID NO: 40741 - RNA, 1701 nt, Artificial Sequence; identical to SEQ ID NO: 40156
  derived and/or modified CDS sequence (wt) from hemagglutinin__InfluenzaA__AFH74664

SEQ ID NO: 40742 - RNA, 1701 nt, Artificial Sequence; identical to SEQ ID NO: 40156
  derived and/or modified CDS sequence (wt) from hemagglutinin__InfluenzaA__AFH74675

SEQ ID NO: 40743 - RNA, 1701 nt, Artificial Sequence; identical to SEQ ID NO: 40171
  derived and/or modified CDS sequence (wt) from hemagglutinin__InfluenzaA__AFH74686

SEQ ID NO: 40744 - RNA, 1701 nt, Artificial Sequence; identical to SEQ ID NO: 40171
  derived and/or modified CDS sequence (wt) from hemagglutinin__InfluenzaA__AFH74697

SEQ ID NO: 40745 - RNA, 1701 nt, Artificial Sequence; identical to SEQ ID NO: 40172
  derived and/or modified CDS sequence (wt) from hemagglutinin__InfluenzaA__AFH74708

SEQ ID NO: 40746 - RNA, 1701 nt, Artificial Sequence; identical to SEQ ID NO: 40173
  derived and/or modified CDS sequence (wt) from hemagglutinin__InfluenzaA__AFH74719

SEQ ID NO: 40747 - RNA, 1701 nt, Artificial Sequence
  derived and/or modified CDS sequence (wt) from hemagglutinin__InfluenzaA__AFH74730
augaagacuaucauugcuuugagcuacauucuaugucugguuuucgcucaaaaacuuccuggaaaugacaacagcacggcaacgcugugccuugggcaccaugcaguaccaaacggaacgauagugaaaacaaucacgaaugaccaaauugaaguuacuaaugcuacugagcugguucagaguuccucaacaggugaaauaugcgacaguccucaucagauccuugaugggaaaaacugcacacuaauagaugcucuauugggagacccucagugugauggcuuccaaaauaagaaaugggaccuuuuuguugaacgcagcaaagccuacagcaacuguuacccuuaugaugugccggauuaugccucccuuaggucacuaguugccucauccggcacacuggaguuuaacaaugaaagcuucaauuggacuggagucacucaaaacggaacaagcucugcuugcauaaggagaucuaaaaacaguuucuuuaguagauugaauugguugacccacuuaaacuucaaauacccagcauugaacgugacuaugccaaacaaugaacaauuugacaaauuguacauuugggggguucaccacccgggcacggacaaagaccaaaucuuccuguaugcucaagcaucaggaagaaucacagucucuaccaaaagaagccaacaaacugcaaucccgaauaucggaucuagacccagaguaaggaauaucccuagcagaauaagcaucuauuggacaauaguaaaaccgggagacauacuuuugauuaacagcacagggaaucuaauugcuccuagggguuacuucaaaauacgaagugggaaaagcucaauaaugagaucagaugcacccauuggcaaaugcaauucugaaugcaucacuccaaauggaagcauucccaaugacaaaccauuccaaaauguaaacaggaucacauacggggccugucccagauauguuaagcaaaacacucugaaauuggcaacagggaugcgaaauguaccagagaaacaaacuagaggcauauuuggcgcaaucgcggguuucauagaaaaugguugggaaggaaugguggaugguugguacgguuucaggcaucaaaauucugagggaagaggacaagcagcagaucucaaaagcacucaagcagcaaucgaucaaaucaaugggaagcugaauagauugaucgggaaaaccaacgagaaauuccaucagauugaaaaggaauucucagaagucgaagggagaauucaggaccuugagaaauauguugaggacacuaaaauagaucucuggucauacaacgcggagcuucuuguugcccuggagaaccaacauacaauugaucuaacugacucagaaaugaacaaacuguuugaaaaaacaaagaagcaacugagggaaaaugcugaggauaugggcaaugguuguuucaaaauauaccacaaaugugacaaugccugcauaggaucaaucagaaauggaacuuaugaccacgauguauacagagaugaagcacuaaacaaccgguuucagaucaagggaguugagcugaagucaggguacaaagauuggauccuauggauuuccuuugccauaucauguuuuuugcuuuguguugcuuuguugggguucaucaugugggccugccaaaaaggcaacauuaggugcaacauuugcauuuga

SEQ ID NO: 40748 - RNA, 1701 nt, Artificial Sequence
  derived and/or modified CDS sequence (wt) from hemagglutinin__InfluenzaA__AFH74741
augaagacuaucauugcuuugagcuacauucuaugucugguuuucgcucaaaaacuuccuggaaaugacaacagcacggcaacgcugugccuugggcaccaugcaguaccaaacggaacgauagugaaaacaaucacgaaugaccaaauugaaguuacuaaugcuacugagcugguucagaauuccucaacaggugaaauaugcgacaguccucaucagauccuugauggaaaaaacugcacacuaauagaugcucuauugggagacccucagugugauggcuuccaaaauaagaaaugggaccuuuuuguugaacgcagcaaagccuacagcaacuguuacccuuaugaugugccggauuaugccucccuuaggucacuaguugccucauccggcacacuggaguuuaacaaugaaagcuucaauuggacuggagucacucaaaacggaacaagcucugcuugcauaaggagaucuaaaaacaguuucuuuaguagauugaauugguugacccacuuaaacuucaaauacccagcauugaacgugacuaugccaaacaaugaacaauuugacaaauuguacauuugggggguucaccacccggguacggacaaagaccaaaucuuccuguaugcucaagcaucaggaagaaucacagucucuaccaaaagaagccaacaaacugcaaucccgaauaucggaucuagacccagaguaaggaauaucccuagcaggauaagcaucuauuggacaauaguaaaaccgggagacauacuuuugauuaacagcacagggaaucuaauugcuccuagggguuacuucaaaauacgaagugggaaaagcucaauaaugagaucagaugcacccauuggcaaaugcaauucugaaugcaucacuccaaauggaagcauucccaaugacaaaccauuccaaaauguaaacaggaucacauacggggccugucccagauauguuaagcaaaacacucugaaauuggcaacagggaugcgaaauguaccagagaaacaaacuagaggcauauuuggcgcaaucgcggguuucauagaaaaugguugggagggaaugguggaugguugguacgguuucaggcaucaaaauucugagggaagaggacaagcagcagaucucaaaagcacucaagcagcaaucgaucaaaucaaugggaagcugaauagauugaucgggaaaaccaacgagaaauuccaucagauugaaaaggaauucucagaagucgaagggagaauucaggaccuugagaaauauguugaggacacuaaaauagaucucuggucauacaacgcggagcuucuuguugcccuggagaaccaacauacaauugaucuaacugacucagaaaugaacaaacuguuugaaaaaacaaagaagcaacugagggaaaaugcugaggauaugggcaaugguuguuucaaaauauaccacaaaugugacaaugccugcauaggaucaaucagaaauggaacuuaugaccacgauguauacagagaugaagcacuaaacaaccgguuucagaucaagggaguugagcugaagucaggguacaaagauuggauccuauggauuuccuuugccauaucauguuuuuugcuuuguguugcuuuguugggguucaucaugugggccugccaaaaaggcaacauuaggugcaacauuugcauuuga

SEQ ID NO: 40749 - RNA, 1701 nt, Artificial Sequence; identical to SEQ ID NO: 40176
  derived and/or modified CDS sequence (wt) from hemagglutinin__InfluenzaA__AFH74752

SEQ ID NO: 40750 - RNA, 1701 nt, Artificial Sequence; identical to SEQ ID NO: 40176
  derived and/or modified CDS sequence (wt) from hemagglutinin__InfluenzaA__AFH74763

SEQ ID NO: 40751 - RNA, 1701 nt, Artificial Sequence; identical to SEQ ID NO: 40176
  derived and/or modified CDS sequence (wt) from hemagglutinin__InfluenzaA__AFH74774

SEQ ID NO: 40752 - RNA, 1701 nt, Artificial Sequence; identical to SEQ ID NO: 40158
  derived and/or modified CDS sequence (wt) from hemagglutinin__InfluenzaA__AFH74785

SEQ ID NO: 40753 - RNA, 1701 nt, Artificial Sequence; identical to SEQ ID NO: 40159
  derived and/or modified CDS sequence (wt) from hemagglutinin__InfluenzaA__AFH74796

SEQ ID NO: 40754 - RNA, 1701 nt, Artificial Sequence; identical to SEQ ID NO: 40181
  derived and/or modified CDS sequence (wt) from hemagglutinin__InfluenzaA__AFH74807

SEQ ID NO: 40755 - RNA, 1701 nt, Artificial Sequence; identical to SEQ ID NO: 40181
  derived and/or modified CDS sequence (wt) from hemagglutinin__InfluenzaA__AFH74818

SEQ ID NO: 40756 - RNA, 1701 nt, Artificial Sequence; identical to SEQ ID NO: 40181
  derived and/or modified CDS sequence (wt) from hemagglutinin__InfluenzaA__AFH74829

SEQ ID NO: 40757 - RNA, 1701 nt, Artificial Sequence; identical to SEQ ID NO: 40181
  derived and/or modified CDS sequence (wt) from hemagglutinin__InfluenzaA__AFH74840

SEQ ID NO: 40758 - RNA, 1701 nt, Artificial Sequence
  derived and/or modified CDS sequence (wt) from hemagglutinin__InfluenzaA__AFH74851
augaagacuaucauugcuuugagcuacauucuaugucugguuuucgcucaaaaacuuccuggaaaugacaacagcacggcaacgcugugccuugggcaccaugcaguaccaaacggaacgauagugaaaacaaucacgaaugaccaaauugaaguuacuaaugcuacugagcugguucagaguuccucaacaggugaaauaugcgacaguccucaucagauccuugauggaaaaaacugcacacuaauagaugcucuauugggagacccucagugugauggcuuccaaaauaagaaaugggaccuuuuuguugaacgcagcaaagccuacggcaacuguuacccuuaugaugugccggauuaugccucccuuaggucacuaguugccucauccggaacacuggaguuuaacaaugaaagcuucaauuggacuggagucacucaaaacggaacaagcucugcuugcauaaggagaucuaaaaacaguuucuuuaguagauugaauugguugacccacuuaaacuucaaauacccagcauugaacgugacuaugccaaacaaugaacaauuugacaaauuguacauuugggggguucaccacccggguacggacaaagaccaaaucuuccuguaugcucaagcaucaggaagaaucacagucucuaccaaaagaagccaacaaacugcaaucccgaauaucggaucuagacccagaguaaggaauaucccuagcagaauaagcaucuauuggacaauaguaaaaccgggagacauacuuuugauuaacagcacagggaaucuaauugcuccuagggguuacuucaaaauacgaagugggaaaagcucaauaaugagaucagaugcacccauuggcaaaugcaauucugaaugcaucacuccaaauggaagcauucccaaugacaaaccauuccaaaauguaaacaggaucacauacggggccugucccagauauguuaagcaaaacacucugagauuggcaacagggaugcgaaauguaccagagaaacaaacuagaggcauauuuggcgcaaucgcggguuucauagaaaaugguugggagggaaugguggaugguugguacgguuucaggcaucaaaauucugagggaagaggacaagcagcagaucucaaaagcacucaagcagcaaucgaucaaaucaaugggaagcugaauagauugaucgggaaaaccaacgagaaauuccaucagauugaaaaagaauucucagaagucgaagggagaauucaggaccuugagaaauauguugaggacacuaaaauagaucucuggucauacaacgcggagcuucuuguugcccuggagaaccaacauacaauugaucuaacugacucagaaaugaacaaacuguuugaaaaaacaaagaagcaacugagggaaaaugcugaggauaugggcaaugguuguuucaaaauauaccacaaaugugacaaugccugcauaggaucaaucagaaauggaacuuaugaccacgauguauacagagaugaagcacuaaacaaccgguuucagaucaagggaguugagcugaagucaggguacaaagauuggauccuauggauuuccuuugccauaucauguuuuuugcuuuguguugcuuuguugggguucaucaugugggccugccaaaaaggcaacauuaggugcaacauuugcauuuga

SEQ ID NO: 40759 - RNA, 1701 nt, Artificial Sequence; identical to SEQ ID NO: 40184
  derived and/or modified CDS sequence (wt) from hemagglutinin__InfluenzaA__AFH74862

SEQ ID NO: 40760 - RNA, 1701 nt, Artificial Sequence; identical to SEQ ID NO: 40184
  derived and/or modified CDS sequence (wt) from hemagglutinin__InfluenzaA__AFH74873

SEQ ID NO: 40761 - RNA, 1701 nt, Artificial Sequence; identical to SEQ ID NO: 40159
  derived and/or modified CDS sequence (wt) from hemagglutinin__InfluenzaA__AFH74884

SEQ ID NO: 40762 - RNA, 1701 nt, Artificial Sequence; identical to SEQ ID NO: 35625
  derived and/or modified CDS sequence (wt) from hemagglutinin__InfluenzaA__AFH74895

SEQ ID NO: 40763 - RNA, 1701 nt, Artificial Sequence; identical to SEQ ID NO: 40188
  derived and/or modified CDS sequence (wt) from hemagglutinin__InfluenzaA__AFH74906

SEQ ID NO: 40764 - RNA, 1701 nt, Artificial Sequence; identical to SEQ ID NO: 35611
  derived and/or modified CDS sequence (wt) from hemagglutinin__InfluenzaA__AFH74917

SEQ ID NO: 40765 - RNA, 1701 nt, Artificial Sequence; identical to SEQ ID NO: 40191
  derived and/or modified CDS sequence (wt) from hemagglutinin__InfluenzaA__AFH74928

SEQ ID NO: 40766 - RNA, 1701 nt, Artificial Sequence; identical to SEQ ID NO: 40191
  derived and/or modified CDS sequence (wt) from hemagglutinin__InfluenzaA__AFH74939

SEQ ID NO: 40767 - RNA, 1701 nt, Artificial Sequence
  derived and/or modified CDS sequence (wt) from hemagglutinin__InfluenzaA__AFH74950
augaagacuaucauugcuuugagcuacauucuaugucugguuuucgcucaaaaacuuccuggaaaugacaacagcacggcaacgcugugccuugggcaccaugcaguaccaaacggaacgauagugaaaacaaucacgaaugaccaaauugaaguuacuaaugcuacugagcugguucagaguuccucaacaggugaaauaugcgacaguccucaucagauccuugauggaaaaaacugcacacuaauagaugcucuauugggagacccucagugugauggcuuccaaaauaagaaaugggaccuuuuuguugaacgcagcaaagccuacggcaacuguuacccuuaugaugugccggauuaugccucccuuaggucacuaguugccucauccggaacacuggaguuuaacaaugaaagcuucaauuggacuggagucacucaaaacggaacaagcucugcuugcauaaggagaucuaaaaacaguuucuuuaguagauugaauugguugacccacuuaaacuucaaauacccagcauugaacgugacuaugccaaacaaugaacaauuugacaaauuguacauuugggggguucaccacccggguacggacaaagaccaaaucuuccuguaugcucaagcaucaggaagaaucacagucucuaccaaaagaagccaacaaacugcaaucccgaauaucggaucuagacccagaguaaggaauaucccuagcagaauaagcaucuauuggacaauaguaaaaccgggagacauacuuuugauuaacagcacagggaaucuaauugcuccuagggguuacuucaaaauacgaagugggaaaagcucaauaaugagaucagaugcacccauuggcaaaugcaauucugaaugcaucacuccaaauggaagcauucccaaugacaaaccauuccaaaauguaaacaggaucacauacggggccugucccagauauguuaagcaaaacacucugaaauuggcaacagggaugcgaaauguaccagagaaacaaacuagaggcauauuuggcgcaaucgcggguuucauagaaaaugguugggagggaaugguggaugguugguacgguuucaggcaucaaaauucugagggaagaggacaagcagcagaucucaaaagcacucaagcagcaaucgaucaaaucaaugggaagcugaauagauugaucgggaaaaccaacgagaaauuccaucagauugaaaaagaauucucagaagucgaagggagaauucaggaccuugagaaauauguugaggacacuaaaauagaucucuggucauacaacgcggagcuucuuguugcccuggagaaccaacauacaauugaucuaacugacucagaaaugaacaaacuguuugaaaaaacaaagaagcaacugagggaaaaugcugaggauaugggcaaugguuguuucaaaauauaccacaaaugugacaaugccugcauaggaucaaucagaaauggaacuuaugaccacgauguauacagagaugaagcacuaaacaaccgguuucagaucaagggaguugagcugaagucaggguacaaagauuggauccuauggauuuccuuugccauaucauguuuuuugcuuuguguugcuuuguugggguucaucaugugggccugccaaaaaggcaacauuaggugcaacauuugcauuuga

SEQ ID NO: 40768 - RNA, 1701 nt, Artificial Sequence; identical to SEQ ID NO: 40184
  derived and/or modified CDS sequence (wt) from hemagglutinin__InfluenzaA__AFH74961

SEQ ID NO: 40769 - RNA, 1701 nt, Artificial Sequence; identical to SEQ ID NO: 40159
  derived and/or modified CDS sequence (wt) from hemagglutinin__InfluenzaA__AFH75388

SEQ ID NO: 40770 - RNA, 1701 nt, Artificial Sequence
  derived and/or modified CDS sequence (wt) from hemagglutinin__InfluenzaA__AFH97140
augaaggcaauacuaguaguucugcuauauauauuugcaaccgcaaaugcagacacauuauguauagguuaucaugcgaacaauucaacagacacuguagacacaguacuagaaaagaauguaacaguaacacacucuguuaaccuucuagaagacaagcauaacgggaaacuaugcaaacuaagagggguagccccauugcauuuggguaaauguaacauugcuggcuggauccugggaaauccagagugugaaucacucuccacagcaagcucaugguccuacauuguggaaacaucuaguucagacaauggaacguguuacccaggagauuucaucgauuaugaggagcuaagagagcaauugagcucagugucaucauuugaaagguuugagauauuccccaagacaaguucauggcccaaucaugacucgaacaaagguguaacggcagcauguccucaugcuggagcaaaaagcuucuacaaaaauuuaauauggcuaguuaaaaaagggaauucauacccaaagcucagcaaauccuacauuaaugauaaagggaaagaaguccucgugcuauggggcauucaccauccaucuacuagugcugaccaacaaagucucuaucagaaugcagaugcauauguuuuuguggggacaucaagauacagcaagaaguucaagccggaaauagcaauaagacccaaagugagggaucaagaagggagaaugaacuauuacuggacacuaguagagccgggagacaaaauaacauucgaagcaacuggaaaucuagugguaccgagauaugcauucgcaauggaaagaaaugcuggaucugguauuaucauuucagauacaccaguccacgauugcaauacaacuugucagacacccaagggugcuauaaacaccagccuuccauuucagaauauacauccgaucacaauuggaaaauguccaaaauauguaaaaagcacaaaauugagacuggccacaggauugaggaaugucccgucuauucaaucuagaggccuauuuggggccauugccgguuucauugaagggggguggacagggaugguagauggaugguacgguuaucaccaucaaaaugagcaggggucaggauaugcagccgaccugaagagcacacagaaugccauugacgagauuacuaacaaaguaaauucuguuauugaaaagaugaauacacaguucacagcaguagguaaagaguucaaccaccuggaaaaaagaauagagaauuuaaauaaaaagguugaugaugguuuccuggacauuuggacuuacaaugccgaacuguugguucuauuggaaaaugaaagaacuuuggacuaccacgauucaaaugugaagaacuuauaugaaaagguaagaagccaguuaaaaaacaaugccaaggaaauuggaaacggcugcuuugaauuuuaccacaaaugcgauaacacgugcauggaaagugucaaaaaugggacuuaugacuacccaaaauacucagaggaagcaaaauuaaacagagaagaaauagaugggguaaagcuggaaucaacaaggauuuaccagauuuuggcgaucuauucaacugucgccaguucauugguucugguagucucccugggggcaaucaguuucuggaugugcucuaaugggucucuacaguguagaauauguauuuaa

SEQ ID NO: 40771 - RNA, 1701 nt, Artificial Sequence
  derived and/or modified CDS sequence (wt) from hemagglutinin__InfluenzaA__AFJ05142
augaagacuaucauugcuuugagcuacauucuaugucugguuuucgcucaaaaaauuccuggaaaugacaacagcacggcaacgcugugccuugggcaccaugcaguaccaaacggaacgauagugaaaacaaucacgaaugaccaaauugaaguuacuaaugcuacugagcugguucagaguuccucaacaggugaaauaugcgacaguccucaucagauccuugauggagaaaacugcacacuaauagaugcucuauugggagacccucagugugauggcuuccaaaauaagaagugggaccuuuuuguugaacgaagcaaagccuacagcaacuguuacccuuaugaugugccggauuaugccucccuucggucacuaguugccucauccggcacacuggaguuuaacaaugaaugcuucaauuggacuggagucacucaaaacggaacaagcucugcuugcauaaggagaucuaauaguaguuucuuuaguagauugaauugguugacccacuuaaacuucaaauacccagcauugaacgugacuaugccaaacaaugaacaauuugacaaauuguacauuugggggguucaccacccggguacggacaaggaccaaauauuccuguaugcucaaucaucaggaagaaucacaguaucuaccaaaagaagccaacaagcuguaaucccgaauaucggaucuagacccagaauaaggaauaucccuagcagaauaagcaucuauuggacaauaguaaaaccgggagacauacuuuugauuaacagcacagggaaucuaauugcuccuagggguuacuucaaaauacgaagugggaaaagcucaauaaugagaucagaugcacccauuggcaaaugcaauucuggaugcaucacuccaaauggaagcauucccaaugacaaaccauuccaaaauguaaacaggaucacauacggggccugucccagauauguuaagcaaagcacucugaaauuggcaacaggaaugcgaaauguaccagagaaacaaacuagaggcauauuuggcgcaauagcggguuucauagaaaaugguugggagggaaugguggaugguugguacgguuucaggcaucaaaauucugagggaagaggacaagcagcagaucucaaaagcacucaagcagcaaucgaucaaaucaaugggaagcugaaucgauugaucgggaaaaccaacgagaaauuccaucagauugaaaaagaauucucagaagucgaagggagaauucaggaccuugagaaauauguugaggacacuaaaauagaucucuggucauacaacgcggagcuucuuguugcccuggagaaccaacauacaauugaucuaacugacucagaaaugaacaaacuguuugaaaaaacaaagaagcaacugagggaaaaugcugaggauaugggcaaugguuguuucaaaauauaccacaaaugugacaaugccugcauaggaucaaucagaaauggaacuuauaaccacgauguauacagagaugaagcauuaaacaaccgguuccagaucaagggaguugagcugaagucaggguacaaagauuggauccuauggauuuccuuugccauaucauguuuuuugcuuuguguugcuuuguugggguucaucaugugggccugccaaaagggcaacauuaggugcaacauuugcauuuga

SEQ ID NO: 40772 - RNA, 1701 nt, Artificial Sequence
  derived and/or modified CDS sequence (wt) from hemagglutinin__InfluenzaA__AFJ05144
augaagacuaucauugcuuugagcuacauucuaugucugguuuucgcucaaaaacuuccuggaaaugacaacagcacggcaacgcugugccuugggcaccaugcaguaccaaacggaacgauagugaaaacaaucacgaaugaccaaauugaaguuacuaaugcuacugagcugguucagaguuccucaacaggugaaauaugcgacaguccucaucagauccuugauggagaaaacugcacacuaauagaugcucuauugggagacccucagugugauggcuuccaaaauaagaagugggaccuuuuuguugaacgaagcaaagccuacagcaacuguuacccuuaugaugugccggauuaugccucccuuaggucacuaguugccucauccggcacacuggaguuuaacaaugaaagcuucaauuggacuggagucacucaaaacggaacaagcucugcuugcauaaggagaucuaauaguaguuucuuuaguagauugaauugguugacccacuuaaacuucaaauacccagcauugaacguaacuaugccaaacaaugaacaauuugacaaauuauacauuugggggguucaccacccggguacggacaaggaccaaaucuuccuguaugcucaaucaucaggaagaaucacaguaucuaccaaaagaagccaacaagcuguaaucccgaauaucggaucuagacccagaguaaggaauaucccuagcagaauaagcaucuauuggacaauaguaaaaccgggagacauacuuuugauuaacagcacagggaaucuaauugcuccuagggguuacuucaaaauacgaagugggaaaagcucaauaaugagaucagaugcacccauuggcaaaugcaauucugaaugcaucacuccaaaugggagcauucccaaugacaaaccauuccaaaauguaaacaggaucacauacggggccugucccagauauguuaagcaaagcacucugaaauuggcaacaggaaugcgaaauguaccagagaaacaaacuagaggcauauuuggcgcaauagcggguuucauagaaaaugguugggagggaaugguggaugguugguacgguuucaggcaucaaaauucugaggggagaggacaagcagcagaucucaaaagcacucaagcagcaaucgaucaaaucaaugggaagcugaaucgauugaucgggaaaaccaacgagaaauuccaucagauugaaaaagaauucucagaagucgaagggagaauucaggaccucgagaaauauguggaggacacuaaaauagaucucuggucauacaacgcggagcuucuuguugcccuggagaaccaacauacaauugaucuaacugacucagaaaugaacaaacuguuugaaaaaacaaagaagcaacugagggaaaaugcugaggauaugggcaaugguuguuucaaaauauaccacaaaugugacaaugccugcauaggaucaaucagaaauggaacuuauaaccacgauguauacagagaugaagcauuaaacaaccgguuccagaucaagggaguugagcugaagucaggguacaaagauuggauccuauggauuuccuuugccauaucauguuuuuugcuuuguguugcuuuguugggguucaucaugugggccugccaaaagggcaacauuaggugcaacauuugcauuuga

SEQ ID NO: 40773 - RNA, 1701 nt, Artificial Sequence
  derived and/or modified CDS sequence (wt) from hemagglutinin__InfluenzaA__AFJ11706
augaagacuaucauugcuuugagcuacauucuaugucugguuuucgcucaaaaacuuccuggaaaugacaacagcacggcaacgcugugccuugggcaccaugcaguaccaaacggaacgauagugaaaacaaucacgaaugaccaaauugaaguuacuaaugcuacugagcugguccagaguuccucaacaggugaaauaugcgacaguccucaucagauccuugauggagaaaacugcacacuaauagaugcucuauugggagacccucagugugauggcuuccaaaauaagaaaugggaccuuuuuguugaacgaagcaaagccuacagcaacuguuacccuuaugaugugccagauuaugccucccuuaggucacuaguugccucauccggcacacuggaguuuaacaaugaaagcuucaauuggacuggagucacucaaaacggcacaagcucugcuugcauaaggagcucuaauaauaguuucuuuaguagauugaauugguugacccacuuaaacuucaaauacccagcauugaacgugacuaugccaaacaaugaacaauuugacaaauuguacauuugggggguucaccacccggguacggacaaggaccaaaucuuccuguaugcucaagcaucaggaagaaucacaguaucuaccaaaagaagccaacaagcuguaaucccgaauaucggaucuagacccagaguaaggaauaucccuagcagaauaagcaucuauuggacaauaguaaaaccgggagacauacuuuugauuaacagcacagggaaucuaauugcuccuagggguuacuucaaaauacgaagugggaaaagcucaauaaugagaucagaugcacccauuggcaaaugcaauucugaaugcaucacuccaaauggaagcauucccaaugacaaaccauuccaaaauguaaacaggaucacauacggggccugucccagauauguuaagcaaagcacucugaaauuggcaacaggaaugcgaaauguaccagagaaacaaacuagaggcauauuuggcgcaauagcggguuucauagaaaaugguugggagggaaugguggaugguugguacgguuucaggcaucaaaauucugagggaagaggacaagcagcagaucucaaaagcacucaagcagcaaucgaucaaaucaaugggaagcugaauagauugaucgggaaaaccaacgagaaauuccaucaaauugaaaaagaauucucagaagucgaagggagaauucaggaccuugagaaauauguugaggacaccaaaauagaucucuggucauacaacgcggagcuucuuguugcccuggagaaccaacauacaauugaucuaacugacucagaaaugaacaaacuguuugaaaaaacaaagaagcaacugagggaaaaugcugaggauaugggcaaugguuguuucacaauauaccacaaaugugacaaugccugcauaggaucaaucagaaauggaacuuaugaccacaauguauacagagaugaagcauuaaacaaccgguuccagaucaagggaguugagcugaagucaggguacaaagauuggauccuauggauuuccuuugccauaucauguuuuuugcuuuguguugcuuuguugggguucaucaugugggccugccaaaaaggcaacauuaggugcaacauuugcauuuga

SEQ ID NO: 40774 - RNA, 1701 nt, Artificial Sequence; identical to SEQ ID NO: 40362
  derived and/or modified CDS sequence (wt) from hemagglutinin__InfluenzaA__AFJ11728

SEQ ID NO: 40775 - RNA, 1701 nt, Artificial Sequence
  derived and/or modified CDS sequence (wt) from hemagglutinin__InfluenzaA__AFJ19842
augaagaccaucauugcuuugagcuacauucuaugucugguuuucgcucaaaaacuuccuggaaaugacaacagcacggcaacgcugugccuugggcaccaugcaguaccaaacggaacgauagugaaaacaaucacgaaugaccaaauugaaguuacuaaugcuacugagcugguucagaguuccucagcaggugaaauaugcgacaguccucaucauauccuugauggagaaaacugcacacuaauagaugcucuauugggagacccucagugugauggcuuccaaaauaagaaaugggaccuuuuuguugaacgaagcagagccuacagcaacuguuacccuuaugaugugccggauuaugccucccuuaggucacuaguugccucauccggcacacuggaguuuaacaaugaaagcuucaauuggacuggagucacucaaaacggaacaagcucugcuugcauaaggaggucuaauaauaguuucuuuaguagauugaauugguugacccacuuaaacuucaaauacccagcauugaacgugacuaugccaaacaaugaacaauuugacaaauuguacauuugggggguucaccacccggguacggacaaggaccaaaucuuccuguaugcucaagcaucaggaagaaucacaguaucuaccaaaagaagccaacaagcuguaaucccgaauaucggaucuagacccagaguaaggaauaucccuagcagaauaagcaucuauuggacaauaguaaaaccgggagacauacuuuugauuaacagcacagggaaucuaauugcuccuagggguuacuucaaaauacgaagugggaaaagcucaauaaugagaucagaugcacccauuggcaaaugcaauucugaaugcaucacuccaaauggaagcauucccaaugacaaaccauuccaaaauguaaacaggaucacauacggggccugucccagauauguuaagcaaagcacucugaaauuggcaacaggaaugcgaaauguaccagagaaacaaacuagaggcauauuuggcgcaauagcggguuucauagaaaaugguugggagggaaugauggaugguugguacgguuucaggcaucaaaauucugagggaagaggacaagcagcagaucucaaaagcacucaagcagcaaucgaucaaaucaauggaaagcugaauagauugaucgggaaaaccaacgagaaauuccaucagauugaaaaagaauucucagaagucgaagggagaauucaggaccuugagaaauauguugaggacacuaaaauagaucucuggucauacaacgcggagcuucuuguugcccuggagaaccaacauacaauugaucuaacugacucagaaaugaacaaacuguuugaaaaaacaaagaagcaacugagggaaaaugcugaggauaugggcaaugguuguuucaaaauauaccacaaaugugacaaugccugcauaggaucaaucagaaauggaacuuaugaccacgauguauacagagaugaagcauuaaacaaccgguuccagaucaagggaauugagcugaagucaggguacaaagauuggauccuauggauuuccuuugccauaucauguuuuuugcuuuguguugcuuuguugggguucaucaugugggccugccaaaaaggcaacauuaggugcaacauuugcauuuga

SEQ ID NO: 40776 - RNA, 1701 nt, Artificial Sequence
  derived and/or modified CDS sequence (wt) from hemagglutinin__InfluenzaA__AFJ20171
augaagacuaucauugcuuugagcuacauucuaugucugguuucugcucaaaaacuuccuggaaaugacaacagcacggcaacgcugugccuugggcaccaugcagugccaaacggaacgauagugaaaacaaucacgaaugaccaaauugaaguuacuaaugcuacugagcuaguucagaguuccucaacaggugaaauaugcaacaguccucaucagauccuugauggagaaaacugcacacuaauagaugcucuauugggagacccucagugugauggcuuccaaaacaagaaaugggaccuuuuuguugaacgaagcaaagcccacagcaacuguuacccuuaugaugugccggauuaugccucccuuaggucacuaguugccucauccggcacacuggaguuuaacaaugaaagcuucaauuggacuggagucacucaaaacggaacaagcucugcuugcauaaggagaucuaauaauaguuucuuuaguagauugaauugguugacccacuuaaacuucaaauacccagcauugaacgugacuaugccaaacaaugaacaauuugacaaauuguacauuugggggguucaccacccggguacggacaaggaucaaaucuuccuguaugcucaagcaucaggaagaaucacaguaucuaccaaaagaagccaacaagcuguaauuccgaauaucggaucuagacccagaguaaggaauaucccuagcagaguaagcaucuauuggacaauaguaaaaccgggagacauacuuuugauuaacagcacagggaaucuaauugcuccuagggguuacuucaaaauacgaagugggaaaagcucaauaaugagaucagaugcacccauuggcaaaugcaauucugcaugcaucacuccaaauggaagcauucccaaugacaaaccauuccaaaauguaaacaggaucacauacggggccugucccagauauguuaagcaaaacacucugaaauuggcaacaggaaugagaaauguaccagagaaacaaacuagaggcauauuuggcgcaauagcagguuucauagaaaaugguugggagggaaugguggaugguugguacgguuucaggcaucaaaauucugagggaaggggacaggcagcagaucucaaaagcacucaagcagcaaucgaucaaaucaaugggaagcugaauagauugaucgggaaaaccaacgagaaauuccaucagauugaaaaagaauucucagaagucgaagggagaauucaggaccuugagaaauauguugaggacacuaaaauagaucucuggucauacaacgcggagcuucuuguugcccuggagaaccaacacacaauugaucuaacugacucagaaaugaacaaacuguuugaaaaaacaaagaagcaacugagggaaaaugcugaggauaugggcaaugguuguuucaaaauauaccacaaaugugacaaugccugcauaggaucaaucagaaauggaacuuaugaccacgauguguacagagaugaagcauuaaacaaccgauuccagaucaagggaguugagcugaagucaggguacaaagauuggauccuauggauuuccuuugccauaucauguuuuuugcuuuguguugcuuuguugggguucaucaugugggccugccaaaaaggcaacauuaggugcaacauuugcauuuga

SEQ ID NO: 40777 - RNA, 1701 nt, Artificial Sequence
  derived and/or modified CDS sequence (wt) from hemagglutinin__InfluenzaA__AFJ20182
augaagacuaucauugcuuugagcuacauucuaugucugguuuucgcucaaaaacuuccuggaaaugacaacagcacggcaacgcugugccuugggcaccaugcagugccaaacggaacgauagugaaaacaaucacgaaugaccaaauugaaguuacuaaugcuacugagcugguucagaguuccucaacaggugaaauaugcaacaguccucaucagauccuugauggagaaaacugcacacuaauagaugcucuauugggagacccucagugugauggcuuccaaaacaagaaaugggaccuuuuuguugaacgaagcaaagcccacagcaacuguuacccuuaugaugugccggauuaugccucccuuaggucacuaguugccucauccggcacacuggaguuuaacaaugaaagcuucaauuggacuggagucacgcaaaacggaacaagcucugcuugcauaaggagaucuaauaauaguuucuuuaguagauugaauugguugacccacuuaaacuucaaauacccagcauugaacgugacuaugccaaacaaugaacaauuugacaaauuguacauuugggggguucaccacccggguacggacaaggaccaaaucuuccuguaugcucaagcaucaggaagaaucacaguaucuaccaaaagaagccaacaagcuguaauuccgaauaucggaucuagacccagaguaaggaauaucccuagcagaguaagcaucuauuggacaauaguaaaaccgggagacauacuuuugauuaacagcacagggaaucuaauugcuccuagggguuacuucaaaauacgaagugggaaaagcucaauaaugagaucagaugcacccauuggcaaaugcaauucugcaugcaucacuccaaauggaagcauucccaaugacaaaccauuccaaaauguaaacaggaucacauacggggccugucccagauauguuaagcaaaacacucugaaauuggcaacaggaaugagaaauguaccagagaaacaaacuagaggcauauuuggcgcaauagcggguuucauagaaaaugguugggaaggaaugguggaugguugguacgguuucaggcaucaaaauucugagggaaggggacaagcagcagaucucaaaagcacucaagcagcaaucgaucaaaucaaugggaagcugaauagauugaucgggaaaaccaacgagaaauuccaucagauugaaaaagaauucucagaagucgaagggagaauucaggaccuugagaaauauguugaggacacuaaaauagaucucuggucauacaacgcggagcuucuuguugcccuggagaaccaacacacaauugaucuaacugacucagaaaugaacaaacuguuugaaaaaacaaagaaacaacugagggaaaaugcugaggauaugggcaaugguuguuucaaaauauaccacaaaugugacaaugccugcauaggaucaaucagaaauggaacuuaugaccacgauguguacagagaugaagcauuaaacaaccgauuccagaucaagggaguugagcugaagucaggguacaaagauuggauccuauggauuuccuuugccauaucauguuuuuugcuuuguguugcuuuguugggguucaucaugugggccugccaaaaaggcaacauuaggugcaacauuugcauuuga

SEQ ID NO: 40778 - RNA, 1701 nt, Artificial Sequence
  derived and/or modified CDS sequence (wt) from hemagglutinin__InfluenzaA__AFJ74386
augaaagcaaaacuacuaguccuguugugugcauuuacagcuacauaugcagacacaauauguauaggcuaccaugcgaacaacucaaccgacacuguugacacaguacuugagaagaacgugacagugacacacucugucaaccuacuugaggacagucacaacggaaaacuaugccgacuaaaaggaacagccccacuacaauuggguaauugcagcguugccggauggaucuuaggaaacccagaaugcgaaucacuguuuucuaaggaaucaugguccuacauugcagaaacaccaaacccugagaauggaacauguuacccaggguauuucgccgacuaugaggaacugagggagcaauugagcucaguaucaucauucgagagauucgaaauauuccccaaggaaagcucauggcccaaccacaccguaaccaaaggagugacggcaucaugcucccauaaugggaaaagcaguuuuuacaaaaauuugcuauggcugacggaaaagaauggcuuguacccaaaucugagcaaguccuauguaaacaacaaggagaaagaaguccuuguacuaugggguguucaucacccgucuaacauaggggaccaaagggccaucuaucauacagaaaaugcuuaugucucugugaugucuucacauuauagcagaagauucaccccagaaauagcaaaaagacccaaaguaagagaucaagaagggagaauuaacuacuacuggacucugcuggaacccggggacacaauaauauuugaggcaaauggaaaucuaauagcgccaugguacgcuuucgcacugaguagaggcuuugggucaggaaucaucaccucaaacgcaucaaugggugaaugugacgcuaagugucaaacaccccaaggagcuauaaacaguagucuuccuuuccagaauguacacccagucacaauaggagagugucccaaguaugucaggaguacaaaauuaaggaugguuacaggacuaagaaacaucccauccauucaaucuagagguuuguuuggagccauugccgguuucauugaagggggguggacuggaaugauagauggaugguaugguuaucaucaucagaaugaacaaggaucuggcuaugcugcagaccaaaaaagcacacaaaaugccauugaugggauuacaaacaaggugaauucuguaaucgagaaaaugaacacucaauucacagcuguaggcaaagaauucaacaaauuagagagaaggauggaaaacuuaaauaagaaaguugaugauggauuucuggacauuuggacauauaaugcagaguuguugguucuccuggaaaaugaaaggacuuuggauuuucaugacucaaaugugaagaaucuguaugagaaaguaaaaaaccaauugaagaauaaugccaaagaaaucgggaacggguguuuugaauucuaucacaaguguaacaaugaaugcauggaaagugugaaaaauggaacuuaugacuauccaaaauauuccggagaaucaaaguuaaacagggaaaaaauugauggagugaaauuggaaucaaugggagucuaucagauucuggcgaucuacucaacugucgccaguucacuggugcuuuuggucucccugggggcaaucaguuucuggauguguucuaaugggucuuugcaguguagaauaugcaucuga

SEQ ID NO: 40779 - RNA, 1701 nt, Artificial Sequence
  derived and/or modified CDS sequence (wt) from hemagglutinin__InfluenzaA__AFJ74407
augaagacuaucauugcuuugagcuacauuuuaugucugguuuucgcucaaaaacuucccggaaaugacaacagcacggcaacgcugugccugggacaccaugcagugccaaacggaacgcuagugaaaacaaucacgaaugaccaaauugaggugacuaaugcuacugagcugguucagaguuccucaacagguagaauaugcgacaguccucaccgaauccuugauggaaaaaacugcacacugauagaugcccuauugggagacccucauugugauggcuuccaaaauaaggaaugggaccuuuuuguugaacgcagcaaagcuuacagcaacuguuacccuuaugaugugccggauuaugccucccuuaggucacuaguugccucauccggcacccuggaguuuaccaaugaaggcuucaauuggacuggagucgcucaggauggaacaagcuaugcuugcaaaaggggaucuguuaaaaguuucuuuaguagauugaauugguugcacaaauuagaauacaaauauccagcacugaacgugacuaugccaaacaaugacaaauuugacaaauuguacauuugggggguucaccacccgaguacggacagugaccaaaccagccuauauguucaagcaucagggagagucacagucucuaccaaaagaagccaacaaacuguaaucccgaauaucgggucuagacccuggguaaggggugucuccagcagaauaagcaucuauuggacaauaguaaaaccgggagacauacuuuugauuaacagcacagggaaucuaauugcuccucgggguuacuucaaaauacgaagugggaaaagcucaauaaugaggucagaugcacccauuggcaacugcaguucugaaugcaucacuccaaauggaagcauucccaaugacaaaccuuuucaaaauguaaacaggaucacauauggggccugucccagauauguuaagcaaaacacucugaaauuggcaacagggaugcggaauguaccagagaaacaaacuagaggcauauucggcgcaaucgcagguuucauagaaaaugguugggagggaaugguagacgguugguacgguuucaggcaucaaaauucugagggcacaggacaagcagcagaucuuaaaagcacucaagcagcaaucaaccaaaucaacgggaaacugaauagguuaaucgagaaaacgaacgagaaauuccaucaaaucgaaaaagaauucucagaaguagaagggagaauucaggaccucgagaaauauguugaagacacuaaaauagaucucuggucuuacaacgcggagcuucuuguugcccuggagaaccaacauacaauugaucuaacugacucagaaaugaacaaacuguuugaaagaacaaggaagcaacugagggaaaaugcugaggacaugggcaaugguugcuucaaaauauaccacaaaugugacaaugccugcauagggucaaucagaaauggaacuuaugaccaugauguauacagagacgaagcauuaaacaaccgauuccagaucaaagguguugagcugaagucaggauacaaagauuggauccuauggauuuccuuugccauaucaugcuuuuugcuuuguguuguuuugcugggguucaucaugugggccugccaaaaaggcaacauuaggugcaacauuugcauuuga

SEQ ID NO: 40780 - RNA, 1701 nt, Artificial Sequence
  derived and/or modified CDS sequence (wt) from hemagglutinin__InfluenzaA__AFJ74418
augaagacuaucauugcuuugagcuacauuuuaugucugguuuucgcucaaaaacuucccggaaaugacaacagcacggcaacgcugugccugggacaccaugcagugccaaacggaacgcuagugaaaacaaucacgaaugaccaaauugaagugacuaaugcuacugagcugguucagaguuccucaacagguagaauaugcgacaguccucaccaaauccuugauggagaaaacugcacacuaauagaugcucuauugggagacccucauugugauggcuuccaaaauaaggaaugggaccuuuuuguugaacgcagcaaagccuacagcaacuguuacccuuaugaugugccggauuaugccucccuuaggucacuaguugccucauccggcacacuggaguuuaacaaugaaagcuucaauuggacuggagucgcucagaauggaacaagcucugcuugcaaaaggagaucuauuaaaaguuucuuuaguagauugaauugguugcaccaauuaaaauacaaauauccagcacugaacgugacuaugccaaacaaugaaaaauuugacaaauuguacauuugggggguucaccacccgaguacggacagugaccaaaucagccuguaugcucaagcaucagggagagucacagucucuaccaaaagaagccaacaaacuguaaucccgaauaucggaucuagacccuggguaaggggugucuccagcagaauaagcaucuauuggacaauaguaaaaccgggagacauacuuuugauuaacagcacagggaaucuaauugcuccucgggguuacuucaaaauacgaagugggaaaagcucaauaaugaggucagaugcacccauuggcaaaugcaauucugaaugcaucacuccaaauggaagcauucccaaugacaaaccauuucaaaauguaaacaggaucacauauggggccugucccagauauguuaagcaaaacacucugaaauuggcaacagggaugcggaauguaccagagaaacaaacuagaggcauauucggcgcaaucgcggguuucauagaaaaugguugggagggaaugguggacgguugguacgguuucaggcaucaaaauucugagggcacaggacaagcagcagaucuuaaaagcacucaagcagcaaucaaccaaaucaacgggaaacugaauagguuaaucgagaaaacgaacgagaaauuccaucaaauugaaaaagaauucucagaaguagaagggagaauucaggaccucgagaaauauguugaggacacuaaaauagaucucuggucguacaacgcggagcuucuuguugcccuggagaaccaacauacaauugaucuaacugacucagaaaugaacaaacuguuugaaagaacaaagaaacaacugagggaaaaugcugaggauaugggcaaugguuguuucaaaauauaccacaaaugugacaaugccugcauagggucaaucagaaauggaacuuaugaccaugauguauacagagacgaagcauuaaacaaccgguuccagaucaaagguguugagcugaagucaggauacaaagauuggauccuauggauuuccuuugccauaucauguuuuuugcuuuguguuguuuugcugggguucaucaugugggccugccaaaaaggcaacauuaggugcaacauuugcauuuga

SEQ ID NO: 40781 - RNA, 1701 nt, Artificial Sequence
  derived and/or modified CDS sequence (wt) from hemagglutinin__InfluenzaA__AFJ74437
augaagacuaucauugcuuugagcuacauuuuauguaagguuuucgcucaaaaacuucccggaaaugacaacagcacggcaacgcugugccugggacaccaugcagugccaaacggaacgcuagugaaaacaaucacgaaugaccaaauugaagugacuaaugcuacugagcugguucagaguuccucaacagguagaauaugcgacaguccucaccaaauccuugauggagaaaacugcacacuaauagaugcucuauugggagacccucauugugauggcuuccaaaauaaggaaugggaccuuuuuguugaacgcagcaaagccuacagcaacuguuacccuuaugaugugccggauuaugccucccuuaggucacuaguugccucauccggcacacuggaguuuaacaaugaaagcuucaacuggacuggagucgcucagaauggaacaagcucugcuugcaaaaggagaucuauuaaaaguuucuuuaguagauugaauugguugcaccaauuaaaauacaaauauccagcacugaacgugacuaugccaaacaaugaaaaauuugacaaauuguacauuugggggguucaccacccgaguacggacagugaccaaaucagccuguaugcucaagcaucagggagagucacagucucuaccaaaagaagccaacaaacuguaaucccgaauaucggaucuagacccuggguaaggggugucuccagcagaauaagcaucuauuggacaauaguaaaaccgggagacauacuuuugauuaacagcacagggaaucuaauugcuccucgggguuacuucaaaauacgaagugggaaaagcucaauaaugaggucagaugcacccauuggcaaaugcaauucugaaugcaucacuccaaauggaagcauucccaaugacaaaccauuucaaaauguaaacaggaucacauauggggccugucccagauauguuaagcaaaacacucugaaauuggcaacagggaugcggaauguaccagagaaacaaacuagaggcauauucggcgcaaucgcggguuucauagaaaaugguugggagggaaugguggacgguugguacgguuucaggcaucaaaauucugagggcacaggacaagcagcagaucuuaaaagcacucaagcagcaaucaaccaaaucaacgggaaacugaauagguuaaucgagaaaacgaacgagaaauuccaucaaauugaaaaagaauucucagaaguagaagggagaauucaggaccucgagaaauauguugaggacacuaaaauagaucucuggucguacaacgcggagcuucuuguugcccuggagaaccaacauacaauugaucuaacugacucagaaaugaacaaacuguuugaaagaacaaagaagcagcugagggaaaaugcugaggauaugggcaaugguuguuucaaaauauaccacaaaugugacaaugccugcauagggucaaucagaaauggaacuuaugaccaugauguauacagagacgaagcauuaaacaaccgguuccagaucaaagguguugagcugaagucaggauacaaagauuggauccuauggauuuccuuugccauaucauguuuuuugcuuuguguuguuuugcugggguucaucaugugggccugccaaaaaggcaacauuaggugcaacauuugcauuuga

SEQ ID NO: 40782 - RNA, 1701 nt, Artificial Sequence
  derived and/or modified CDS sequence (wt) from hemagglutinin__InfluenzaA__AFJ74448
augaagacuaucauugcuuugagcuacauuuuaugucugguuuucgcucaaaaacuucccggaaaugacaacagcacggcaacgcugugccugggacaccaugcagugccaaacggaacgcuagugaaaacaaucacgaaugaccaaauugaagugacuaaugcuacugagcugguucagaguuccucaacagguagaauaugcgacaguccucaccaaauccuugauggagaaaacugcacacuaauagaugcucuauugggaggcccucauugugauggcuuccaaaauaaggaaugggaccuuuuuguugaacgcagcaaagccuacagcaacuguuacccuuaugauguaccggauuaugccucccuuaggucacuaguugccucauccggcacacuggaguuuaacaaugaaagcuucaauuggacuggagucgcucagaauggaacaagcucugcuugcaaaaggagaucuaauaaaaguuucuuuaguagauugaauugguugcaccaauuaaaauacaaauauccagcacugaacgugacuaugccaaacaaugaaaaauuugacaaauuguacauuugggggguucaccacccgaguacggacagugaccaaaucagccuauaugcucaagcaucagggagagucacagucucuaccaaaagaagccaacaaacuguaaucccgaauaucggaucuagacccuggguaaggggugucuccagcagaauaagcaucuauuggacaauaguaaaaccgggagacauacuuuugauuaacagcacagggaaucuaauugcuccucgggguuacuucaaaauacgaagugggaaaagcucaauaaugaggucagaugcacccauuggcaaaugcaauucugaaugcaucacuccaaauggaagcauucccaaugacaaaccauuucaaaauguaaacaggaucacauauggggccugucccagauaugucaagcaaaacacucugaaauuggcaacagggaugcggaauguaccagagaaacaaacuagaggcauauucggcgcaaucgcggguuucauagaaaaugguugggagggaaugguggacgguugguacgguuucaggcaucaaaauucugagggcacaggacaagcagcagaucuuaaaagcacucaagcagcaaucaaccaaaucaacgggaaacugaauagguuaaucgagaaaacgaacgagaaauuccaucaaauugaaaaagaauucucagaaguagaagggagaauucaggaccucgagaaauauguugaggacacuaaaauagaucucuggucguacaacgcggagcuucuuguugcccuggagaaccaacauacaauugaucuaacugacucagaaaugaacaaacuguuugaaagaacaaaaaagcaacugagggaaaaugcugaggauaugggcaaugguuguuucaaaauauaccacaaaugugacaaugccugcauagggucaaucagaaauggaacuuaugaccaugauguauacagagacgaagcauuaaacaaccgguuccagaucaaagguguugagcugaagucaggauacaaagauuggauccuauggauuuccuuugccauaucauguuuuuugcuuuguguuguuuugcugggguucaucaugugggccugccaaaaaggcaacauuaggugcaacauuugcauuuga

SEQ ID NO: 40783 - RNA, 1701 nt, Artificial Sequence
  derived and/or modified CDS sequence (wt) from hemagglutinin__InfluenzaA__AFJ74459
auggaagcaaaacuacuaguccuguugugugcauuuacagcuacauaugcagacacaauauguauaggcuaccaugcgaacaacucaacugacacuguugacacaguacuugagaagaacgugacagugacacacucugucaaccuacuugaggacagucacaacggaaaacuaugccgacuaaaaggaacagccccacuacaauuggguaauugcagcauugccggauggaucuuaggaaauccagaaugcgaaucacuguuuucuaaggaaucaugguccuacauugcagaaacaccaaacccugaaaauggaacauguuacccaggguauuucgccgacuaugaggaacugagggagcaauugagcucaguaucaucauucgagagauuugaaauauuccccaaggaaagcucauggcccaaccacaccguaaccaaaggagugacggcaucaugcucccauaaugggaaaagcagcuuuuacaaaaauuugcuauggcugacggagaagaauggcuuguacccaaaucugagcaaguccuauguaaacaacaaggaaaaagaaguccuugugcuaugggguguucaucacccgucuaacauaggggaccaaagggccaucuaucauacagaaaaugcuuaugucucuguagugucuucacauuauagcagaagauucaccccagaaauagcaaaaagacccaaaguaagaaaucaagaagggagaauuaacuacuacuggacucugcuggaacccggggacacaauaauauuugaggcaaauggaaaucuaauagcgccaugguacgcuuucgcauugaguagagguuuugggucaggaaucaucaccucaaacgcaucaaugggugaaugugacgcuaagugucaaacaccccaaggagcuauaaacaguagucuuccuuuccagaauguacacccagucacaauaggggaguguccaaaguaugucaggaguacaaaauuaaggaugguuacaggacuaaggaacaucccauccauucaauccagagguuuguuuggagccauugccgguuucauugaaggaggguggacuggaaugauagauggaugguaugguuaucaucaucagaaugaacaaggaucuggcuaugcugcggaccaaaaaagcacacaaaaugccauuaaugggauuacaaacaaggugaauucuauaaucgagaaaaugaacacucaauucacagcuguaggcaaagaauucaacaaauuagaaagaaggauggagaacuuaaauaagaaaguugaugauggauuucuggacauuuggacauacaaugcagaauuguugguucuccuggaaaaugaaaggacuuuggauuuucaugacucaaaugugaagaaccuguaugagaaaguaaaaaaccaacugaagaauaaugccaaagaaauaggaaacggguguuuugaauucuaucacaaguguaacaaugaaugcauggaaagugugaaaaauggaacuuaugacuauccaaaauauuccaaagaaucaaaguuaaacagggaaaaaauugauggagugaaauuggaaucaaugggagucuaucagauucuggcgaucuacucaacugucgccaguucacuggugcuuuuggucucccugggggcaaucagcuucuggauguguucuaaugggucuuugcaguguagaauaugcaucuga

SEQ ID NO: 40784 - RNA, 1701 nt, Artificial Sequence
  derived and/or modified CDS sequence (wt) from hemagglutinin__InfluenzaA__AFJ74470
augaagacuaucauugcuuuaagcuacauuuuaugucugguuuucgcucaaaaacuucccggaaaugacaacagcacggcaacgcugugccugggacaccaugcagugccaaacggaacgcuagugaaaacaaucacgaaugaccaaauugaagugacuaaugcuacugagcugguucagaguuccucaacagguagaauaugcgacaguccucaccgaauccuugauggaaaaaacugcacacugauagaugcucuauugggagacccucauugugauggcuuccaaaauaaggaaugggaccuuuuuguugaacgcagcaaagcuuacagcaacuguuacccuuaugaugugccggauuaugccucccuuaggucacuaguugccucauccggcacccuggaguuuaacaaugaaagcuucaauuggacuggagucgcucagaauggaacaagcuaugcuugcaaaaggagaucuguuaaaaguuucuuuaguagauugaauugguugcacaaauuagaauacaaauauccagcacugaacgugacuaugccaaacaaugacaaauuugacaaauuguacauuugggggguucaccacccgaguacggacagugaccaaaucagccuauaugcucaaacaucagggagagucacagucucuaccaaaagaagccaacaaacuguaaucccgaauaucggaucaagacccuggguaagggguguuuccagcagaauaagcaucuauuggacaauaguaaagccgggagacauacuuuugauuaacagcacagggaaucuaauugcuccucgggguuacuucaaaauacgaagugggaaaagcucaauaaugaggucagaugcacccauuggcaacugcaguucugaaugcaucacuccaaauggaagcauucccaaugacaaaccauuucaaaauguaaacaggaucacauauggggccugucccagauauguuaagcaaaacacucugaaacuggcaacagggaugcggaauguaccagagaaacaaacuagaggcauauucggcgcaaucgcagguuucauagaaaaugguugggagggaaugguagacgguugguacgguuucaggcaucaaaauucugagggcacaggacaagcagcagaucuuaaaagcacucaagcagcaaucaaccaaaucaacgggaaacugaauagguugaucgagaaaacgaacgagaaauuccaucaaaucgaaaaagaauucucagaaguagaagggagaauucaggaccucgagaaauauguugaagacacuaaaauagaucucuggucguacaacgcggagcuucuuguugcccuggagaaccaacauacaauugaucuaacugacucagaaaugaacaaacuguuugaaagaacaaggaagcaacugagggaaaaugcugaggacaugggcaaugguugcuucaaaauauaccacaaaugugacaaugccugcauagggucaaucagaaauggaacuuauaaccaugauguauacagagacgaagcauuaaacaaccgguuccagaucaaagguguugagcugaagucaggauacaaagauuggauccuauggauuuccuuugccauaucauguuuuuugcuuuguguuguuuugcugggguucaucaugugggccugccaaaaaggcaacauuaggugcaacauuugcauuuga

SEQ ID NO: 40785 - RNA, 1701 nt, Artificial Sequence
  derived and/or modified CDS sequence (wt) from hemagglutinin__InfluenzaA__AFJ74492
augaagacuaucauugcuuugagcuacauuuuaugucugguuuucgcucaaaaacuucccggaaaugacaacagcacggcaacgcugugccuggggcaccaugcaguaccaaacggaacgcuagugaaaacaaucacgaaugaccaaauugaagugacuaaugcuacugagcugguucagaguuccucaacagguagaauaugcgacaguccucaccaaauccuugauggagaaaacugcacacuaauagaugcucuauugggagacccucauugugauggcuuccaaaauaaggaaugggaccuuuuuguugaacgcagcaaagccuacagcaacuguuacccuuaugaugugccggauuaugccucccuuaggucacuaguugccucauccggcacacuggaguuuaacaaugaaagcuucaauuggacuggagucgcucagaauggaacaagcucugcuugcaaaaggagaucuaauaaaaguuucuuuaguagauugaauugguugcaccaauuaaaauacaaauauccagcacugaacgugacuaugccaaacaauaaaaaauuugacaaauuguacauuugggggguucaccacccgaguacggacagugaccaaaucagccuauaugcucaagcaucagggagagucacagucucuaccaaaagaagccaacaaacuguaaucccgaauaucggaucuagacccuggguaaggggugucuccagcauaauaagcaucuauuggacaauaguaaaaccgggagacauacuuuugauuaacagcacagggaaucuaauugcuccucgggguuacuucaaaauacgaaaugggaaaagcucaauaaugagaucagaugcacccauuggcaaaugcaauucugaaugcaucacuccaaauggaagcauucccaaugacaaaccauuucaaaauguaaacaggaucacauauggggccugucccagauauguuaagcaaaacacucugaaauuggcaacagggaugcggaauguuccagagaaacaaacuagaggcauauucggcgcaaucgcggguuucauagaaaaugguugggagggaaugguggacgguugguacgguuucaggcaucaaaauucugagggcacaggacaagcagcagaucuuaaaagcacucaagcagcaaucaaccaaaucaacgggaaacugaauagguuaaucgggaaaacgaacgagaaauuccaucaaauugaaaaagaauucucagaaguagaagggagaauucaggaccucgagaaauauguugaggacacuaaaauagaucucuggucguacaacgcggagcuucuuguugcccuggagaaccaacauacaauugaucuaacugacucagaaaugaacaaacuguuugaaagaacaaagaagcaacugagggaaaaugcugaggauaugggcaaugguuguuucaaaauauaccacaaaugugacaaugccugcauagggucaaucagaaauggaacuuaugaccaugauguauacagagacgaagcauuaaacaaccgguucaagaucaaagguguugagcugaagucaggauacaaagauuggauccuauggauuuccuuugccauaucauguuuuuugcuuuguguuguuuugcugggguucaucaugugggccugccaaaaaggcaacauuaggugcaacauuugcauuuga

SEQ ID NO: 40786 - RNA, 1701 nt, Artificial Sequence
  derived and/or modified CDS sequence (wt) from hemagglutinin__InfluenzaA__AFJ74525
augaagacuaucauugcuuugagcuacauuuuaugucugguuuucgcucaaaaacuucccggaaaugacaacagcacggcaacgcugugccugggacaccaugcagugccaaacggaacgcuagugaaaacaaucacgaaugaccaaauugaagugacuaaugcuacugagcugguucagaguuccucaacagguagaauaugcgacaguccucaccgaauccuugauggagaaaacugcacacugauagaugcucuauugggagacccucauugugauggcuuccaaaauaaggaaugggaccuuuuuguugaacgcagcaaagccuacagcaacuguuacccuuaugaugugccggauuaugccucccuuaggucacuaguugccucauccggcacccuggaguuuaacaaugaaagcuucaauuggacuggagucgcucaggauggaacaagcucugcuugcaaaaggagaucuauuaaaaguuucuuuaguagauugaauugguugcaccaauuaaaauacaaauauccagcacugaacgugacuaugccaaacaaugacaaauuugacaaauuguacauuugggggguucaccacccgaguacggacagugaccaaaccagccuauaugcucaagcaucagggagagucacagucucuaccaaaagaagccaacaaacuguaaucccgaauaucggaucuagacccuggguaaggggugucuccagcauaauaagcaucuauuggacaauaguaaaaccgggagacauacuuuugauuaacagcacagggaaucuaauugcuccucgggguuacuucaaaauacgaagugggaaaagcucaauaaugaggucagaugcacccauuggcaaaugcaauucugaaugcaucacuccaaauggaagcauucccaaugacaaaccauuucaaaauguaaacaggaucacauaugggaccugucccagauauguuaagcaaaacacucugaaauuggcaacagggaugcggaauguaccagagaaacaaacuagaggcauauucggcgcaaucgcggguuucauagaaaaugguugggagggaaugguggacgguugguacgguuucaggcaucaaaauucugagggcacaggacaagcagcagaucuuaaaagcacucaagcagcaaucaaccaaaucaacgggaaacugaauagguuaaucgagaaaacgaacgagaaauuccaucaaauugaaaaagaauucucagaaguagaagggagaauucaggaccucgagaaauauguugaggacacuaaaauagaucucuggucguacaacgcggagcuucuuguugcccuggagaaccaacauacaauugaucuaacugacucagaaaugaacaaacuguuugaaagaacaaggaagcaacugagggaaaaugcugaggauaugggcaaugguuguuucaaaauauaccacaaaugugacaaugccugcauagggucaaucagaaauggaacuuaugaccaugauguauacagagacgaagcauuaaacaaccgguuccagaucaaagguguugagcugaagucaggauacaaagauuggauccuauggauuuccuuugccauaucauguuuuuugcuuuguguuguuuugcugggguucaucaugugggccugccaaaaaggcaacauuaggugcaacauuugcauuuga

SEQ ID NO: 40787 - RNA, 1701 nt, Artificial Sequence
  derived and/or modified CDS sequence (wt) from hemagglutinin__InfluenzaA__AFJ74535
augaagacuaucauugcuuugagcuacauuuuaugucugguuuucgcucaaaaacuucccggaaaugacaacagcacggcaacgcugugccuggggcaccaugcaguaccaaacggaacgcuagugaaaacaaucacgaaugaccaaauugaagugacuaaugcuacugagcugguucagaguuccucaacagguagaauaugcgacaguccucaccaaauccuugauggagaaaacugcacacuaauagaugcucuauugggagacccucauugugauggcuuccaaaauaaggaaugggaccuuuuuguugaacgcagcaaagccuacagcaacuguuacccuuaugaugugccggauuaugccucccuuaggucacuaguugccucauccggcacacuggaguuuaacaaugaaagcuucaauuggacuggagucgcucagaauggaacaagcucugcuugcaaaaggagaucuaauaaaaguuucuuuaguagauugaauugguugcaccaauuaaaauacaaauauccagcacugaacgugacuaugccaaacaauaaaaaauuugacaaauuguacauuugggggguucaccacccgaguacggacagugaccaaaucagccuauaugcucaagcaucagggagagucacagucucuaccaaaagaagccaacaaacuguaaucccgaauaucggaucuagacccuggguaaggggugucuccagcauaauaagcaucuauuggacaauaguaaaaccgggagacauacuuuugauuaacagcacagggaaucuaauugcuccucgggguuacuucaaaauacgaaaugggaaaagcucaauaaugagaucagaugcacccauuggcaaaugcaauucugaaugcaucacuccaaauggaagcauucccaaugacaaaccauuucaaaauguaaacaggaucacauauggggccugucccagauauguuaagcaaaacacucugaaauuggcaacagggaugcggaauguaccagagaaacaaacuagaggcauauucggcgcaaucgcggguuucauagaaaaugguugggagggaaugguggacgguugguacgguuucaggcaucaaaauucugagggcacaggacaagcagcagaucuuaaaagcacucaagcagcaaucaaccaaaucaacgggaaacugaauagguuaaucgggaaaacgaacgagaaauuccaucaaauugaaaaagaauucucagaaguagaagggagaauucaggaccucgagaaauauguugaggacacuaaaauagaucucuggucguacaacgcggagcuucuuguugcccuggagaaccaacauacaauugaucuaacugacucagaaaugaacaaacuguuugaaagaacaaagaagcaacugagggaaaaugcugaggauaugggcaaugguuguuucaaaauauaccacaaaugugacaaugccugcauagggucaaucagaaauggaacuuaugaccaugauguauacagagacgaagcauuaaacaaccgguucaagaucaaagguguugagcugaagucaggauacaaagauuggauccuauggauuuccuuugccauaucauguuuuuugcuuuguguuguuuugcugggguucaucaugugggccugccaaaaaggcaacauuaggugcaacauuugcauuuga

SEQ ID NO: 40788 - RNA, 1701 nt, Artificial Sequence
  derived and/or modified CDS sequence (wt) from hemagglutinin__InfluenzaA__AFJ74560
augaagacuaucauugcuuugagcuacauuuuaugucugguuuucgcucaaaaacuucccggaaaugacaacagcacggcaacgcugugccuggggcaccaugcagugccaaacggaacgcuagugaaaacaaucacgaaugaucaaauugaagugacuaaugcuacugagcugguucagaguuccucaacagguagaauaugcgacaguccucaccaaauccuugauggagaaaacuguacacuaauagaugcucuauugggagacccucauugugauggcuuccaaaauaaggaaugggaccuuuuuguugaacgcagcaaagccuacagcaacuguuacccuuaugaugugccggauuaugucucccuuaggucacuaguugccucaucaggcacgcuggaguuuaacaaugaaagcuucaauuggacuggagucgcucagaauggaacaagcucugcuugcaaaaggagaucugauaaaaguuucuuuaguagauugaauugguugcaccaauuaaaauacaaauauccagcacugaacgugacuaugccaaacaaugaaaaauuugacaaauuguacauuugggggguucaccacccggguacagacagugaccaaaucagccuauaugcucaaacaucagggagagucacagucucuaccaaaagaagccaacaaacuguaaucccgaauaucggaucuggacccuggguaaggggugucuccagcagaauaagcaucuauuggacaauaguaaaaccgggagacauacuuuugauuaacagcacagggaaucuaauugcuccucgggguuauuucaaaauacgaagugggaaaagcucaauaaugaggucagaugcacccauuggcaaaugcaauucugaaugcaucacuccaaauggaagcauucccaaugacaaaccauuucaaaauguaaacaggaucacauaugggcccugucccagauauguuaagcaaaacacucugaaauuggcaacagggaugcggaaugugccagagaaacaaacuagaggcauauucggugcaaucgcgggcuucauagaaaaugguugggagggaaugauggacgguugguacgguuucaggcaucaaaauucugagggcacagggcaagcagcagaucuuaaaagcacucaagcagcaaucaaccaaaucaacgggaaacugaauagguuagucgagaaaacgaacgagaaauuccaucaaauugaaaaagaauucucagaaguagaagggagaauucaggaccucgagaaauauguugaggacacuaaaauagaucucuggucguacaaugcggagcuucuuguugcccuggagaaccaacauacaauugaucuaacugacucagaaaugaacaaacuguuugaaagaacaaagaagcaacugagggaaaaugcugaggauaugggcaaugguuguuucaaaauauaccacaaaugugacaaugccugcauagggucaaucagaaauggaacuuaugaccaugauguauacagagacgaagcauugaacaaccgguuccagaucaaagguguugagcugaagucaggauacaaagauuggauccuauggauuuccuuugccauaucauguuuuuugcuuuguauuguuuugcugggguucaucaugugggccugccaaaaaggcaacauuaggugcaacauuugcauuuga

SEQ ID NO: 40789 - RNA, 1701 nt, Artificial Sequence
  derived and/or modified CDS sequence (wt) from hemagglutinin__InfluenzaA__AFJ74634
augaagacuaucauugcuuugagcuacauucuaugucugguuuucgcccaaaaacuucccggaaaugacaacagcacggcaacgcugugccuugggcaccaugcaguaccaaacggaacgauagugaaaacaaucacgaaugaccaaauugaaguuacuaaugcuacugagcugguucagaguuccucaacagguggaauaugcgacaguccucaucagauccuugauggagaaaacugcacacuaauagaugcucuauugggagacccucagugugauggcuuccaaaauaagaaaugggaccuuuuuguugaacgcagcaaagccuacagcaacuguuacccuuaugaugugccggauuaugccucccuuaggucacuaguugccucauccggcacacuggaguuuaacaaugaaagcuucaauuggacuggagucacucagaauggaacaagcucugcuugcaaaaggagaucuaauaaaaguuucuuuaguagauugaauugguugacccaauuaaaauacaaauacccagcauugaacgugacuaugccaaacaaugaaaaauuugacaaauuguacauuugggggguucaccacccggguacggacagugaccaaaucagccuauaugcucaagcaucaggaagaaucacagucucuaccaaaagaagccaacaaacuguaaucccgaauaucggaucuagacccaggguaagggaugucuccagcagaauaagcaucuauuggacaauaguaaaaccgggagacauacuuuugauuaacagcacagggaaucuaauugcuccucgggguuacuucaaaauacgaagugggaaaagcucaauaaugagaucagaugcacccauuggcaaaugcaauucugaaugcaucacuccaaauggaagcauucccaaugacaaaccauuucaaaauguaaacaggaucacauauggggccugucccagauauguuaagcaaaacacucugaaauuggcaacagggaugcgaaauguaccagagaaacaaacuagaggcauauuuggcgcaaucgcggguuucauagaaaaugguugggagggaaugguggacgguugguacgguuucaggcaucaaaauucugagggcacaggacaagcagcagaucucaaaagcacucaagcagcaaucaaccaaaucaaugggaaacugaauagguuaaucgggaaaacaaacgagaaauuccaucagauugaaaaagaauucucagaaguagaagggagaauucaggaccucgagaaauauguugaggacacuaaaauagaucucuggucauacaacgcggagcuucuuguugcccuggagaaccaacauacaauugaucuaacugacucagaaaugaacaaacuguuugaaagaacaaagaagcaacugagggaaaaugcugaggauaugggcaaugguuguuucaaaauauaccacaaaugugacaaugccugcauagggucaaucagaaauggaacuuaugaccaugauguauacagagaugaagcauuaaacaaccgguuccagaucaaagguguugagcugaagucaggauacaaagauuggauccuauggauuuccuuugccauaucauguuuuuugcuuuguguugcuuuguugggguucaucaugugggccugccaaaaaggcaacauuaggugcaacauuugcauuuga

SEQ ID NO: 40790 - RNA, 1698 nt, Artificial Sequence
  derived and/or modified CDS sequence (wt) from hemagglutinin__InfluenzaA__AFJ74653
augaaaguaaaacuacugguccuguuaugcacauuuacagcuacauaugcagacacaauauguauaggcuaccaugccaacaacucaaccgacacuguugacacaguacuugagaagaaugugacagugacacacucugucaaccugcuugaggacagucacaauggaaaacuaugucuauuaaaaggaauagccccacuacaauuggguaauugcagcguugccggguggauauuaggaaacccagaaugcgaauuacugauuuccaaggaaucaugguccuacauuguagaaaaaccaaauccugagaauggaacauguuacccaggguauuucgcugacuaugaggaacugagggagcaauugaguucaguaucuucauuugagagguucgaaauauuccccaaagaaagcucauggcccaaccacaccguaaccggaguaucagcaucaugcucccauaaugggaaaagcaguuuuuacaaaaauuugcuauggcugacggggaagaaugguuuguacccaaacuugagcaaguccuaugcaaacaacaaagagaaagaaguccuuguacuaugggguguucaucacccuccuaacauaggugaccaaagggcccucuaucauacagacaaugcuuaugucucuguagugucuucacauuauagcagaaaauucaccccagaaauagccaaaagacccaaaguaagagaucaagaaggaagaaucaacuacuacuggacucugcuugaacccggggauacaauaauauuugaggcaaauggaaaucuaauagcgccaagauaugcuuucgcacugaguagaggcuuuggaucaggaaucaucaacucaaaugcaccaauggaugaaugugaugcgaagugccaaacaccucagggagcuauaaacagcagucuuccuuuccagaauguacacccagucacaauaggagaauguccaaaguaugucaggagugcaaaauuaaggaugguuacaggacuaaggaacaucccauccauccaauccagagguuuguuuggagccauugccgguuucauugaagggggguggacuggaaugguagaugguugguaugguuaucaucaucagaaugagcaaggaucuggcuaugcugcagaucaaaaaagcacacaaaaugccauuaaugggauuacaaacaaggugaauucuguaauugagaaaaugaacacucaauucacagcugugggcaaagaauucaacaaauuggaaagaaggauggaaaacuuaaauaaaaaaguugaugauggguuuauagacauuuggacauauaaugcagaauuguugguucuacuggaaaaugaaaggacuuuggauuuccaugacuccaaugugaagaaucuguaugagaaaguaaaaagccaauuaaagaauaaugccaaagaaauaggaaauggguguuuugaauucuaucacaaguguaacgaugaaugcauggagaguguaaaaaauggaacuuaugacuauccaaaauauuccgaagaaucaaaauuaaacagggagaaaauugauggagugaaauuggaaucaaugggagucuaucagauucuggcgaucuacucaacagucgccaguucucugguucuuuuggucucccugggggcaaucagcuucuggauguguuccaaugggucuuugcaguguagaauaugcaucuaa

SEQ ID NO: 40791 - RNA, 1698 nt, Artificial Sequence
  derived and/or modified CDS sequence (wt) from hemagglutinin__InfluenzaA__AFJ74673
augaaaguaaaacuacugguccuguuaugcacauuuacagcuacauaugcagacacaauauguauaggcuaccaugccaacaacucaaccgacacuguugacacaguacuugagaagaaugugacagugacacacucugucaaccugcuugaggacagucacaauggaaaacuaugucuauuaaaaggaauagccccacuacaauuggguaauugcagcguugccggguggauauuaggaaacccagaaugcgaauuacugauuuccaaggaaucaugguccuacauuguagaaaaaccaaauccugagaauggaacauguuacccaggguauuucgcugacuaugaggaacugagggagcaauugaguucaguaucuucauuugagagguucgaaauauuccccaaagaaagcucauggcccaaccacaccguaaccggaguaucagcaucaugcucccauaaugggaaaagcaguuuuuacaaaaauuugcuauggcugacggggaagaaugguuuguacccaaacuugagaaaguccuaugcaaacaacaaagagaaagaaguccuuguacuaugggguguucaucacccuccuaacauaggugaccaaagggcccucuaucauacagacaaugcuuaugucucuguagugucuucacauuauagcagaaaauucaccccagaaauagccaaaagacccaaaguaagagaucaagaaggaagaaucaacuacuacuggacucugcuugaacccggggauacaauaauauuugaggcaaauggaaaucuaauagcgccaagauaugcuuucgcacugaguagaggcuuuggaucaggaaucaucaacucaaaugcaccaauggaugaaugugaugcgaagugccaaacaccucagggagcuauaaacagcagucuuccuuuccagaauguacacccagucacaauaggagaauguccaaaguaugucaggagugcaaaauuaaggaugguuacaggacuaaggaacaucccauccauccaauccagagguuuguuuggagccauugccgguuucauugaagggggguggacuggaaugguagaugguugguaugguuaucaucaucagaaugagcaaggaucuggcuaugcugcagaucaaaaaagcacacaaaaugccauuaaugggauuacaaacaaggugaauucuguaauugagaaaaugaacacucaauucacagcugugggcaaagaauucaacaaauuggaaagaaggauggaaaacuuaaauaaaaaaguugaugauggguuuauagacauuuggacauauaaugcagaauuguugguucuacuggaaaaugaaaggacuuuggauuuccaugacuccaaugugaagaaucuguaugagaaaguaaaaagccaauuaaagaauaaugccaaagaaauaggaaauggguguuuugaauucuaucacaaguguaacgaugaaugcauggagaguguaaaaaauggaacuuaugacuauccaaaauauuccgaagaaucaaaauuaaacagggagaaaauugauggagugaaauuggaaucaaugggagucuaucagauucuggcgaucuacucaacagucgccaguucucugguucuuuuggucucccugggggcaaucagcuucuggauguguuccaaugggucuuugcaguguagaauaugcaucuaa

SEQ ID NO: 40792 - RNA, 1701 nt, Artificial Sequence
  derived and/or modified CDS sequence (wt) from hemagglutinin__InfluenzaA__AFJ74674
augaagacuaucauugcuuugagcuacauuuuaugucugguguucgcucaaaaacuucccggaaaugacaacagcacggcaacgcugugccuugggcaccaugcaguaccaaacggaacgcuagugaaaacaaucacgaaugaccaaauugaagugacuaaugcuacugagcugguucagaguuccucaacagguggaauaugugacaguccucaucagauccuugauggagaaaacugcacacuaauagaugcucuauugggagacccucauugugauggcuuccaaaauaagaaaugggaccuuuuuguugaacgcagcaaagccuacagcaacuguuacccuuaugaugugccggauuaugccucccuuaggucacuaguugccucauccggcacacuggaguuuaacaaugaaagcuucaauuggacuggagucgcucagaauggaacaagcucugcuugcaaaaggagaucuaauaaaaguuucuuuaguagauugaauugguugcaccaauuaaaauacaaauacccagcauugaacgugacuaugccaaacaaugaaaaauuugacaaauuauacauuugggggguucaccacccggguacggacagugaccaaaucagccuauaugcucaagcgucagggagaaucacagucucuaccaaaagaagccaacaaacuguaaucccgaauaucggaucuagacccaggguaagggaugucuccagcagaauaagcaucuauuggacaauaguaaaaccgggagacauacuuuugauuaacagcacagggaaucuaauugcuccucgggguuacuucaaaauacgaagugggagaagcucaauaaugagaucagaugcacccauuggcaaaugcaauucugaaugcaucacuccaaauggaagcauucccaaugacaaaccauuucaaaauguaaacaggaucacauauggggccugucccagauauguuaagcaaaacacucugaaauuggcaacagggaugcggaauguaccagagaaacaaccuagaggcauauucggcgcaaucgcggguuucauagaaaaugguugggagggaaugguggacgguugguacgguuucaggcaucaaaauucugagggcacaggacaagcagcagaucuuaaaagcacucaagcagcaaucaaccaaaucaaugggaaauugaauagguuaaucgggaaaacaaacgagaaauuccaucagauugaaaaagaauucucagaaguagaagggagaauucaggaccucgagaaauauguugaggacacuaaaauagaucucuggucauacaacgcggagcuucuuguugcccuggagaaccaacauacaauugaucuaacugacucagaaaugaacaaacuguuugaaagaacaaagaagcaacugagggaaaaugcugaggauaugggcaaugguuguuucaaaauauaccacaaaugugacaaugccugcauagggucaaucagaaauggaacuuaugaccaugauguauacagagaugaagcauuaaacaaccgguuccagaucaaagguguugagcugaagucaggauacaaagauuggauccuauggauuuccuuugccauaucauguuuuuugcuuuguguugcuuugcugggguucaucaugugggccugccaaaaaggcaacauuaggugcaacauuugcauuuga

SEQ ID NO: 40793 - RNA, 1698 nt, Artificial Sequence; identical to SEQ ID NO: 40790
  derived and/or modified CDS sequence (wt) from hemagglutinin__InfluenzaA__AFJ74694

SEQ ID NO: 40794 - RNA, 1701 nt, Artificial Sequence
  derived and/or modified CDS sequence (wt) from hemagglutinin__InfluenzaA__AFJ74695
augaagacuaucauugcuuugagcuacauuuuaugucugguuuucgcucaaaaacuucccggaaaugacaacagcacggcaacgcugugccuggggcaccaugcagugccaaacggaacgcuagugaaaacaaucacgaaugaccaaauugaagugacuaaugcuacugagcugguucagaauuccucaacagguagaauaugcgacaguccucaccaaauccuugauggagaaaacugcacacuaauagaugcucuauugggagacccucauugugauggcuuccaaaauaaggaaugggaccuuuuuguugaacgcagcaaagccuacagcaacuguuacccuuaugaugugccggauuaugucucccuuaggucacuaguugccucaucaggcacgcuggaguucaacaaugaaagcuucaauuggacuggagucgcucaggauggaacaagcucugcuuguaaaaggagaucugauaaaaguuucuuuaguagauugaauugguugcaccaauuaaaauacaaauauccagcacugaacgugacuaugccaaacaaugaaaaauuugacaaauuguacauuugggggguucaccacccggguacagacagugaccaaaucagccuauaugcucgagcaucagggagagucacagucucuaccaaaagaagccaacaaacuguaaucccgaauauuggaucuagacccuggguaaggggugucuccagcaaaauaagcaucuauuggacaauaguaaaaccgggagacauacuuuugauuaacagcacagggaaucuaauugcuccucgggguuacuucaaaauacgaagugggaaaagcucaauaaugaggucagaugcacccauuggcaaaugcaauucugaaugcaucacuccaaaugggagcauucccaaugacaaaccauuucaaaauguaaacaggaucacauaugggcccugucccagauauguuaagcaaaacacucugaaauuggcaacagggaugcggaaugugccagagaaacaaacuagaggcauauucggugcaaucgcgggcuucauagaaaaugguugggagggaaugguggacgguugguacgguuucaggcaucaaaauucugagggcacagggcaagcagcagaucuuaaaagcacucaagcagcaaucaaccaaaucaacgggaaacugaauagguuaaucgagaaaacgaacgagaaauuccaucaaauugaaaaagaauucucagaaguagaagggagaauucaggaccucgagaaauauguugaggacacuaaaauagaucucuggucguacaaugcggagcuucuuguugcccuggagaaccaacauacaauugaucuaacugacucagaaaugaacaaacuguuugaaagaacaaagaagcaacugagggaaaaugcugaggauaugggcaaugguuguuucaaaauauaccacaaaugugacaaugccugcauagggucaaucagaaauggaacuuaugaccaugauguauacagagacgaagcauugaacaaccgguuccagaucaaagguguugagcugaagucaggauacaaagauuggauccuauggauuuccuuugccauaucauguuuuuugcuuuguauuguuuugcugggguucaucaugugggccugccaaaaaggcaacauuaggugcaacauuugcauuuga

SEQ ID NO: 40795 - RNA, 1701 nt, Artificial Sequence
  derived and/or modified CDS sequence (wt) from hemagglutinin__InfluenzaA__AFJ74727
augaagacuaucauugcuuugagcuacauucuaugucugguuuucgcucaaaaacuucccggaaaugacaacagcacggcaacgcugugccuugggcaccaugcaguaccaaacggaacgauagugaaaacaaucacgaaugaccaaauugaaguuacuaaugcuacugagcugguucagaguuccucaacagguggaauaugcgacaguccucaucagauccuugauggagaaaacugcacacuaauagaugcucuauugggagacccucagugugauggcuuccaaaauaagaaaugggaccuuuuuguugaacgcagcaaagccuacagcaacuguuacccuuaugaugugccggauuaugccucccuuaggucacuaguugccucauccggcacacuggaguuuaacaaugaaagcuucaauuggacuggagucacucagaauggaacaagcucugcuugcaaaaggagaucuaauaaaaguuucuuuaguagauugaauugguugacccaauuaaaauacaaauacccagcauugaacgugacuaugccaaacaaugaaaaauuugacaaauuguacauuugggggguucaccacccggguacggacagugaccaaaucagccuauaugcucaagcaucaggaagaaucacagucucuaccaaaagaagccaacaaacuguaaucccgaauaucggaucuagacccaggguaagggauaucuccagcagaauaagcaucuauuggacaauaguaaaaccgggagacauacuuuugauuaacagcacagggaaucuaauugcuccucgggguuacuucaaaauacgaagugggaaaagcucaauaaugagaucagaugcacccauuggcaaaugcaauucugaaugcaucacuccaaauggaagcauucccaaugacaaaccauuucaaaauguaaacaggaucacauauggggccugucccagauauguuaagcaaaacacucugaaauuggcaacagggaugcgaaauguaccagagaaacaaacuagaggcauauuuggcgcaaucgcggguuucauagaaaaugguugggagggaaugguggacgguugguacgguuucaggcaucaaaauucugagggcacaggacaagcagcagaucucaaaagcacucaagcagcaaucaaccaaaucaaugggaaacugaauagguuaaucgggaaaacaaacgagaaauuccaucagauugaaaaagaauucucagaaguagaagggagaauucaggaccucgagaaauauguugaggacacuaaaauagaucucuggucauacaacgcggagcuucuuguugcccuggagaaccaacauacaauugaucuaacugacucagaaaugaacaaacuguuugaaagaacaaagaagcaacugagggaaaaugcugaggauaugggcaaugguuguuucaaaauauaccacaaaugugacaaugccugcauagggucaaucagaaguggaacuuaugaccaugauguauacagagaugaagcauuaaacaaccgguuccagaucaaagguguugagcugaagucaggauacaaagauuggauccuauggauuuccuuugccauaucauguuuuuugcuuuguguugcuuuguugggguucaucaugugggccugccaaaaaggcaacauuaggugcaacauuugcauuuga

SEQ ID NO: 40796 - RNA, 1698 nt, Artificial Sequence; identical to SEQ ID NO: 40790
  derived and/or modified CDS sequence (wt) from hemagglutinin__InfluenzaA__AFJ74743

SEQ ID NO: 40797 - RNA, 1701 nt, Artificial Sequence
  derived and/or modified CDS sequence (wt) from hemagglutinin__InfluenzaA__AFJ74744
augaagacuaucauugcuuugagcuacauucuaugucugguuuucgcucaaaaacuucccggaaaugacaacagcacggcaacgcugugccuugggcaccaugcaguaccaaacggaacgauagugaaaacaaucacgaaugaccaaauugaaguuacuaaugcuacugagcugguucagaguuccucaacagguggaauaugcgacaguccucaucagauccuugauggagaaaacugcacacuaauagaugcucuauugggagacccucagugugauggcuuccaaaauaagaaaugggaccuuuuuguugaacgcagcaaagccuacagcaacuguuacccuuaugaugugccggauuacgccucccuuaggucacuaguugccucauccggcacacuggaguuuaacaaugaaagcuucaauuggacuggagucacucagaauggaacaagcucugcuugcaaaaggagaucuaauaaaaguuucuuuaguagauugaauugguugacccaauuaaaauacaaauacccagcauugaacgugacuaugccaaacaaugaaaaauuugacaaauuguacauuugggggguucaccacccggguacggacagugaccaaaucagccuauaugcucaagcaucaggaagaaucacagucucuaccaaaagaagccaacaaacuguaaucccgaauaucggaucuagacccaggguaagggaugucuccagcagaauaagcaucuauuggacaauaguaaaaccgggagacauacuuuugauuaacagcacagggaaucuaauugcuccucgggguuacuucaaaauacgaagugggaaaagcucaauaaugagaucagaugcacccauuggcaaaugcaauucugaaugcaucacuccaaauggaagcauucccaaugacaaaccauuucaaaauguaaacaggaucacauauggggccugucccagauauguuaagcaaaacacucugaaauuggcaacagggaugcgaaauguaccagagaaacaaacuagaggcauauuuggcgcaaucgcggguuucauagaaaaugguugggagggaaugguggacgguugguacgguuucaggcaucaaaauucugagggcacaggacaagcagcagaucucaaaagcacucaagcagcaaucaaccaaaucaaugggaaacugaauagguuaaucgggaaaacaaacgagaaauuccaucagauugaaaaagaauucucagaaguagaagggagaauucaggaccucgagaaauauguugaggacacuaaaauagaucucuggucauacaacgcggagcuucuuguugcccuggagaaccaacauacaauugaucuaacugacucagaaaugaacaaacuguuugaaagaacaaagaagcaacugagggaaaaugcugaggauaugggcaaugguuguuucaaaauauaccacaaaugugacaaugccugcauagggucaaucagaaauggaacuuaugaccaugauguauacagagaugaagcauuaaacaaccgguuccagaucaaagguguugagcugaagucaggauacaaagauuggauccuauggauuuccuuugccauaucauguuuuuugcuuuguguugcuuuguugggguucaucaugugggccugccaaaaaggcaacauuaggugcaacauuugcauuuga

SEQ ID NO: 40798 - RNA, 1698 nt, Artificial Sequence
  derived and/or modified CDS sequence (wt) from hemagglutinin__InfluenzaA__AFJ74760
augaaaguaaaacuacugguccuguuaugcacauuuacagcuacauaugcagacacaauauguauaggcuaccaugccaacaacucaaccgacacuguugacacaguacuugagaagaaugugacagugacacacucugucaaccugcuugaggacagucacaauggaaaacuaugucuauuaaaaggaauagccccacuacaauuggguaauugcagcguugccggguggauauuaggaaacccagaaugcgaauuacugauuuccaaggaaucaugguccuacauuguagaaaaaccaaauccugagaauggaacauguuacccaggguauuucgcugacuaugaggaacugagggagcaauugaguucaguaucuucauuugagagguucgaaauauuccccaaagaaagcucauggcccaaccacaccguaaccggaguaucagcaucaugcucccauaaugggaaaagcaguuuuuacaaaaauuugcuauggcugacggggaagaaugguuuguacccaaacuugagcaaguccuaugcaaacaacaaagagaaagaaguccuuguacuaugggguguucaucacccuccuaacauaggugaccaaagggcccucuaucauacagacaaugcuuaugucucuguagugucuucacauuauagcagaaaauucaccccagaaauagccaaaagacccaaaguaagagaucaagaaggaagaaucaacuacuacuggacucugcuugaacccggggauacaauaauauuugaggcaaauggaaaucuaauagcgccaagauaugcuuucgcacugaguagaggcuuuggaucaggaaucaucaacucaaaugcaccaauggaugaaugugaugcgaagugccaaacaccucagggagcuauaaacagcagucuuccuuuccagaauguacacccagucacaauaggagaauguccaaaguaugucaggagugcaaaauuaaggaugguuacaggacuaaggaacaucccauccauccaauccagagguuuguuuggagccauugccgguuucauugaagggggguggacuggaaugguagaugguugguaugguuaucaucaucagaaugagcaaggaucuggcuaugcugcagaucaaaaaagcacacaaaaugccauuaaugggauuacaaacaaggugaauucuguaauugagaaaaugaacacucaauucacagcugugggcaaagaauucaacaaauuggaaagaaggauggaaaacuuaaauaaaaaaguugaugauggguuuauagacauuuggacauauaaugcagaauuguugguucuacuggaaaaugaaaggacuuuggauuuccaugacuccaaugugaagaaucuguaugagaaaguaaaaagccaauuaaagaauaaugccaaagaaauaggaaauggguguuuugaauucuaucacaagugcaacgaugaaugcauggagaguguaaaaaauggaaccuaugacuauccaaaauauuccgaagaaucaaaauuaaacagggagaaaauugauggagugaaauuggaaucaaugggagucuaucagauucuggcgaucuacucaacagucgccaguucucugguucuuuuggucucccugggggcaaucagcuucuggauguguuccaaugggucuuugcaguguagaauaugcaucuaa

SEQ ID NO: 40799 - RNA, 1701 nt, Artificial Sequence
  derived and/or modified CDS sequence (wt) from hemagglutinin__InfluenzaA__AFJ74761
augaagacuaucauugcuuugagcuacauucuaugucugguuuucgcucaaaaacuucccggaaaugacaacagcacggcaacgcugugccuugggcaccaugcaguaccaaacggaacgauagugaaaacaaucacgaaugaccaaauugaaguuacuaaugcuacugagcugguucagaguuccucaacagguggaauaugcgacaguccucaucagauccuugauggagaaaacugcacacuaauagaugcucuauugggagacccucagugugauggcuuccaaaauaagaaaugggaccuuuuuguugaacgcagcaaagccuacagcaacuguuacccuuaugaugugccggauuaugccucccuuaggucacuaguugccucauccggcacacuggaguuuaacaaugaaagcuucaauuggacuggagucacucagaauggaacaagcucugcuugcaaaaggagaucuaauaaaaguuucuuuaguagauugaauugguugacccaauuaaaauacaaauacccagcauugaacgugacuaugccaaacaaugaaaaauuugacaaauuguacauuugggggguucaccacccggguacggacagugaccaaaucagccuauaugcucaagcaucaggaagaaucacagucucuaccaaaagaagccaacaaacuguaaucccgaauaucggaucuagacccaggguaagggauaucuccagcagaauaagcaucuauuggacaauaguaaaaccgggagacauacuuuugauuaacagcacagggaaucuaauugcuccucgggguuacuucaaaauacggagugggaaaagcucaauaaugagaucagaugcacccauuggcaaaugcaauucugaaugcaucacuccaaauggaagcauucccaaugacaaaccauuucaaaauguaaacaggaucacauauggggccugucccagauauguuaagcaaaacacucugaaauuggcaacagggaugcgaaauguaccagagaaacaaacuagaggcauauuuggcgcaaucgcggguuucauagaaaaugguugggagggaaugguggacgguugguacgguuucaggcaucaaaauucugagggcacaggacaagcagcagaucucaaaagcacucaagcagcaaucaaccaaaucaaugggaaacugaauagguuaaucgggaaaacaaacgagaaauuccaucagauugaaaaagaauucucagaaguagaagggagaauucaggaccucgagaaauauguugaggacacuaaaauagaucucuggucauacaacgcggagcuucuuguugcccuggagaaccaacauacaauugaucuaacugacucagaaaugaacaaacuguuugaaagaacaaagaagcaacugagggaaaaugcugaggauaugggcaaugguuguuucaaaauauaccacaaaugugacaaugccugcauagggucaaucagaaauggaacuuaugaccaugauguauacagagaugaagcauuaaacaaccgguuccagaucaaagguguugagcugaagucaggauacaaagauuggauccuauggauuuccuuugccauaucauguuuuuugcuuuguguugcuuuguugggguucaucaugugggccugccaaaaaggcaacauuaggugcaacauuugcauuuga

SEQ ID NO: 40800 - RNA, 1698 nt, Artificial Sequence; identical to SEQ ID NO: 40790
  derived and/or modified CDS sequence (wt) from hemagglutinin__InfluenzaA__AFJ74779

SEQ ID NO: 40801 - RNA, 1701 nt, Artificial Sequence
  derived and/or modified CDS sequence (wt) from hemagglutinin__InfluenzaA__AFJ74780
augaagacuaucauugcuuugagcuacauucuaugucugguuuucgcucaaaaacuucccggaaaugacaacagcacggcaacgcugugccuugggcaccaugcaguaccaaacggaacgauagugaaaacaaucacgaaugaccaaauugaaguuacuaaugcuacugagcugguucagaguuccucaacagguggaauaugcgacaguccucaucagauccuugauggagaaaacugcacacuaauagaugcucuauugggagacccucagugugauggcuuccaaaauaagaaaugggaccuuuuuguugaacgcagcaaagccuacagcaacuguuacccuuacgaugugccggauuaugccucccuuaggucacuaguugccucauccggcacacuggaguuuaacaaugaaagcuucaauuggacuggagucacucagaauggaacaagcucugcuugcaaaaggagaucuaauaaaaguuucuuuaguagauugaauugguugacccaauuaaaauacaaauacccagcauugaacgugacuaugccaaacaaugaaaaauuugacaaauuguacauuugggggguucaccacccggguacggacagugaccaaaucagccuauaugcucaagcaucaggaagaaucacagucucuaccaaaagaagccaacaaacuguaaucccgaauaucggaucuagacccaggguaagggaugucuccagcagaauaagcaucuauuggacaauaguaaaaccgggagacauacuuuugauuaacagcacagggaaucuaauugcuccucgggguuacuucaaaauacgaagugggaaaagcucaauaaugagaucagaugcacccauuggcaaaugcaauucugaaugcaucacuccaaauggaagcauucccaaugacaaaccauuucaaaauguaaacaggaucacauauggggccugucccagauauguuaagcaaaacacucugaaauuggcaacagggaugcgaaauguaccagagaaacaaacuagaggcauauuuggcgcaaucgcggguuucauagaaaaugguugggagggaaugguggacgguugguacgguuucaggcaccaaaauucugagggcacaggacaagcagcagaucucaaaagcacucaagcagcaaucaaccaaaucaaugggaaacugaauagguuaaucgggaaaacaaacgagaaauuccaucagauugaaaaagaauucucagaaguagaagggagaauucaggaccucgagaaauauguugaggacacuaaaauagaucucuggucauacaacgcggagcuucuuguugcccuggagaaccaacauacaauugaucuaacugacucagaaaugaacaaacuguuugaaagaacaaagaagcaacugagggaaaaugcugaggauaugggcaaugguuguuucaaaauauaccacaaaugugacaaugccugcauagggucaaucagaaauggaacuuaugaccaugauguauacagagaugaagcauuaaacaaccgguuccagaucaaagguguugagcugaagucaggauacaaagauuggauccuauggauuuccuuugccauaucauguuuuuugcuuuguguugcuuuguugggguucaucaugugggccugccaaaaaggcaacauuaggugcaacauuugcauuuga

SEQ ID NO: 40802 - RNA, 1701 nt, Artificial Sequence
  derived and/or modified CDS sequence (wt) from hemagglutinin__InfluenzaA__AFJ74804
augaagacuaucauugcuuugagcuacauucuaugucugguuuucgcucaaaaacuucccggaaaugacaacagcacggcaacgcugugccuugggcaccaugcaguaccaaacggaacgauagugaaaacaaucacgaaugaccaaauugaaguuacuaaugcuacugagcugguucagaguuccucaacagguggaauaugcgacaguccucaucagauccuugauggagaaaacugcacacuaauagaugcucuauugggagacccucagugugauggcuuccaaaauaggaaaugggaccuuuuuguugaacgcagcaaagccuacagcaacuguuacccuuaugaugugccggauuaugccucccuuaggucacuaguugccucauccggcacacuggaguuuaacaaugaaagcuucgauuggacuggagucacucagaauggaacaagcucugcuugcaaaaggagaucuaauaaaaguuucuuuaguagauugaauugguugacccacuuaaaauacaaauacccagcauugaacgugacuaugccaaacaaugaaaaauuugacaaauuguacauuugggggguucaccacccggguacggacagugaccaaaucagccuauaugcucaagcaucaggaagaaucacagucucuaccaaaagaagccaacaaacuguaaucccgaauaucggaucuagacccaggguaagggaugucuccagccgaauaagcaucuauuggacaauaguaaaaccgggagacauacuuuugauuaacagcacagggaaucuaauagcuccucgggguuacuucaaaauacgaagugggaaaagcucaauaaugagaucagaugcacccauuggcaaaugcaauucugaaugcaucacuccaaauggaagcauucccaaugacaaaccauuucaaaauguaaacaggaucacauauggggccugucccagauauguuaagcaaaacacucugaaauuggcaacagggaugcgaaauguaccagagaaacaaacuagaggcauauuuggcgcaaucgcggguuucauagaaaaugguugggagggaaugguggacgguugguacgguuucaggcaucaaaauucugagggcacaggacaagcagcagaucucaaaagcacucaagcagcaaucaaccaaaucaaugggaaacugaauagguuaaucgggaaaacaaacgagaaauuccaucagauugaaaaagaauucucggaaguagaagggagaauucaggaccucgagaaauauguugaggacacuaaaauagaucucuggucauacaacgcggagcuucuuguugcccuggagaaccaacauacaauugaucuaacugacucagaaaugaacaaacuguuugaaagaacaaagaagcaacugagggaaaaugcugaggauaugggcaaugguuguuucaaaauauaccacaaaugugacaaugccugcauagggucaaucagaaauggaacuuaugaccaugauguguacagagaugaagcauuaaacaaccgguuccagaucaaagguguugagcugaagucaggauacaaagauuggauccuauggauuuccuuugccauaucauguuuuuugcuuuguguugcuuuguugggguucaucaugugggccugccaaaaaggcaacauuaggugcaacauuugcauuuga

SEQ ID NO: 40803 - RNA, 1701 nt, Artificial Sequence
  derived and/or modified CDS sequence (wt) from hemagglutinin__InfluenzaA__AFJ74819
augaagacuaucauugcuuugagcuacauucuaugucugguuuucgcucaaaaacuucccggaaaugacaacagcacggcaacgcugugccuugggcaccaugcaguaccaaacggaacgauagugaaaacaaucacgaaugaccaaauugaaguuacuaaugcuacugagcugguucagaguuccucaacagguggaauaugcgacaguccucaucagauccuugauggagaaaacugcacacuaauagaugcucuauugggagacccucagugugauggcuuccaaaauaagaaaugggaccuuuuuguugaacgcagcaaagccuacagcaacuguuacccuuaugaugugccggauuaugccucccuuaggucacuaguugccucauccggcacacuggaguuuaacaaugaaagcuucgauuggacuggagucacucagaauggaacaagcucugcuugcaaaaggagaucuaauaaaaguuucuuuaguagauugaauugguugacccacuuaaaauacaaauacccagcauugaacgugacuaugccaaacaaugaaaaauuugacaaauuguacauuugggggguucaccacccggguacggacagugaccaaaucaaccuauaugcucaagcaucaggaagaaucacagucucuaccaaaagaagccaacaaacuguaaucccgaauaucggaucuagacccaggguaagggaugucuccagccgaauaagcaucuauuggacaauaguaaaaccgggagacauacuuuugauuaacagcacagggaaucuaauagcuccucgggguuacuucaaaauacgaagugggaaaagcucaauaaugagaucagaugcacccauuggcaaaugcaauucugaaugcaucacuccaaauggaagcauucccaaugacaaaccauuucaaaauguaaacaggaucacauauggggccugucccagauauguuaagcaaaacacucugaaauuggcaacagggaugcgaaauguaccagagaaacaaacuagaggcauauuuggcgcaaucgcggguuucauagaaaaugguugggagggaaugguggacgguugguacgguuucaggcaucaaaauucugagggcacaggacaagcagcagaucucaaaagcacucaagcagcaaucaaccaaaucaaugggaaacugaauagguuaaucgggaaaacaaacgagaaauuccaucagauugaaaaagaauucucggaaguagaagggagaauucaggaccucgagaaauauguugaggacacuaaaauagaucucuggucauacaacgcggagcuucuuguugcccuggagaaccaacauacaauugaucuaacugacucagaaaugaacaaacuguuugaaagaacaaagaagcaacugagggaaaaugcugaggauaugggcaaugguuguuucaaaauauaccacaaaugugacaaugccugcauagggucaaucagaaauggaacuuaugaccaugauguguacagagaugaagcauuaaacaaccgguuccagaucaaagguguugagcugaagucaggauacaaagauuggauccuauggauuuccuuugccauaucauguuuuuugcuuuguguugcuuuguugggguucaucaugugggccugccaaaaaggcaacauuaggugcaacauuugcauuuga

SEQ ID NO: 40804 - RNA, 1701 nt, Artificial Sequence
  derived and/or modified CDS sequence (wt) from hemagglutinin__InfluenzaA__AFJ74842
augaagacuaucauugcuuugagcuacauccuaugucugguuuucgcucaaaaacuucccggaaaugacaacagcacggcaacgcugugccuugggcaucaugcaguaccaaacggaacgauagugaaaacaauaacgaaugaccaaauugaaguuacuaaugcuacugagcugguucagaguuccucaacagguggaauaugcgacaguccucaucagauccuugauggagaaaacugcacacuaauagaugcucuauugggagacccucagugugauggcuuccaaaauaagaaaugggaccuuuuuguugaacgcagcaaagccuacagcaacuguuacccuuaugaugugccggauuaugccucccuuaggucacuaguugccucauccggcacacuggaguuuaacaaugaaagcuucgauuggacuggagucacucagaauggaacaagcucuucuugcaaaaggagaucuaauaacaguuucuuuaguagauugaauugguugacccacuuaaaauacaaauacccagcauugaacgugacuaugccaaacaaugaaaaauuugacaaauuguacauuugggggguucaccacccggguacggacagugaccaaaucagccuauaugcucaagcaucaggaagaaucacagucucuaccaaaagaagccaacaaacuguaaucccgaauaucggaucuagacccaggguaagggaugucuccagccggauaagcaucuauuggacaauaguaaaaccgggagacauacuucugauuaacagcacagggaaucuaauagcuccucgggguuacuucaaaauacgaagugggaaaagcucaauaaugagaucagaugcacccauuggcaaaugcaauucugaaugcaucacuccaaauggaagcauucccaaugacaaaccauuucaaaauguaaacaggaucacauauggggccugucccagauauguuaagcaaaacacucugaaauuggcaacagggaugcgaaaugugccagagaaacaaacuagaggcauauuuggcgcaaucgcggguuucauagaaaaugguugggagggaaugguggacgguugguacgguuucaggcaucaaaauucugagggcacaggacaagcagcagaucucaaaagcacucaagcagcaaucaaccaaaucaaugggaaacugaauagguuaauagggaaaacaaacgagaaauuccaucagauugaaaaagaauucucggaaguagaagggagaauucaggaccucgagaaauauguugaggacacuaaaauagaucucuggucauacaacgcggagcuucuuguugcccuggagaaccaacauacaauugaucuaacugacucagaaaugaacaaacuguuugaaagaacaaagaagcaacugagggaaaaugcugaggauaugggcaaugguuguuucaaaauauaccacaaaugugacaaugccugcauagggucaaucagaaauggaacuuaugaccaugauguguacagagaugaagcauuaaacaaccgguuccagaucaaagguguugagcugaagucaggauacaaagauuggauccuauggauuuccuuugccauaucauguuuuuugcuuuguguugcuuuguugggguucaucaugugggccugccaaaaaggcaacauuaggugcaacauuugcauuuga

SEQ ID NO: 40805 - RNA, 1698 nt, Artificial Sequence
  derived and/or modified CDS sequence (wt) from hemagglutinin__InfluenzaA__AFJ75036
augaaaguaaaacuacugguccuguuaugcacauuuacagcuacauaugcagacacaauauguauaggcuaucaugccaacaacucaaccgacacuguugacacaguacuugagaagaaugugacagugacacacucugucaaccugcuugaggacagucacaauggaaaauuaugucuauuaaaaggaauagccccacuacaauuggguaauugcagcguugccggauggaucuuaggaaacccagaaugcgaauuacugauuuccagggaaucaugguccuacauuguagaaaaaccaaauccugagaauggaacauguuacccagggcauuucgccgacuaugaggaacugagggagcaauugaguucaguaucuucauuugagagguucgaaauauuccccaaagaaaacucauggcccaaccacaccguaaccggaguaucagcaucaugcucccauaaugggaaaagcaguuuuuacaaaaauuugcuauggcugacggggaagaaugguuuguacccaaaccugagcaaguccuaugcaaacaacaaagagaaagaaguccuuguacuaugggguguucaucacccgccuaacauaggugaccaaagggcccucuaucauacagaaaaugcuuaugucucuguagugucuucacauuauagcagaaaauucaccccagaaauagccaaaagacccaaaguaagagaucaagaaggaagaaucaacuacuacuggacucugcuugaacccggggauacaauaauauuugaggcaaauggaaaucuaauagcgccaagauaugcuuucgcacugaguagaggcuuuggaucaggaaucaucaacucaaaugcaccaauggaugaaugugaugcgaagugccaaacaccucagggagcuauaaacagcagucuuccuuuccagaauguacacccagucacaauaggagaguguccaaaguaugucaggagugcaaaauuaaggaugguuacaggacuaaggaacaucccauccauucaauccagagguuuguuuggagccauugccgguuucauugaagggggguggacuggaaugguagaugguugguaugguuaucaucaucagaaugagcaaggaucuggcuaugcugcagaucaaaaaagcacacaaaaugccauuaaugggauuacaaacaaggugaauucuguaauugagaaaaugaacacucaauucacagcugugggcaaagaauucaacaaauuggaaagaaggauggaaaacuuaaauaaaaaaguugaugauggguuuauagacauuuggacauauaaugcagaauuguugguucuacuggaaaaugaaaggacuuuggauuuccaugacuccaaugugaagaaucuguaugagaaaguaaaaagccaauuaaagaauaaugccaaagaaauaggaaauggguguuuugaauucuaucacaaguguaacgaugaaugcauggagaguguaaaaaauggaacuuaugacuauccaaaauauuccgaagaaucaaaguuaaacagggagaaaauugauggagugaaauuggaaucaaugggagucuaucagauucuggcgaucuacucaacagucgccaguucucugguucuuuuggucucccugggggcaaucagcuucuggauguguuccaaugggucuuugcaguguagaauaugcaucuaa

SEQ ID NO: 40806 - RNA, 1701 nt, Artificial Sequence
  derived and/or modified CDS sequence (wt) from hemagglutinin__InfluenzaA__AFJ75047
augaagacuaucauugcuuugagcuacauucuaugucugguuuucgcucaaaaacuucccggaaaugacaacagcacggcaacgcugugccuugggcaccaugcaguaccaaacggaacgauagugaaaacaaucacgaaugaccaaauugaaguuacuaaugcuacugagcugguucagaguuccucaacagguggaauaugcgacaguccucaucagauccuugauggagaaaacugcacacuaauagaugcucuauugggagacccucagugugauggcuuccaaaauaagaaaugggaccuuuuuguugaacgcagcaaagccuacagcaacuguuacccuuaugaugugccggauuaugccucccuuaggucacuaguugccucauccggcacacuggaguuuaacaaugaaagcuucaauuggacuggagucacccaaaauggaacaagcucugcuugcaaaaggagaucuaauaacagcuucuuuaguagauugaauugguugacccacuuaaaauucaaauacccagcauugaacgugacuaugccaaacaaugaaaaauuugacaaauuguacauuugggggguucaccacccggguacggacaaugaccaaaucuuccuguaugcucaagcaucaggaagaaucacagucucuaccaaaagaagccaacaaacuguaaucccgaauaucggaucuagacccagaguaaggaauauccccagcagaauaagcaucuauuggacaauaguaaaaccgggagacauacuuuugauuaacagcacagggaaucuaauugcuccuagggguuacuucaaaauacgaagugggaaaagcucaauaaugagaucagaugcacccauuggcaaaugcaauucugaaugcaucacuccaaauggaagcauucccaaugacaaaccauuucaaaauguaaacaggaucacauauggggccugucccagauauguuaagcaaaacacucugaaauuggcaacagggaugcgaaauguaccagagaaacaaacuagaggcauauuuggcgcaaucgcggguuucauagaaaaugguugggaggggaugguggaugguugguacgguuucaggcaucaaaauucugagggaauaggacaagcagcagaucucaaaagcacucaagcagcaaucaaucaaaucaaugggaagcugaauagguugaucgggaaaaccaacgagaaauuccaucagauugaaaaagaauucucagaaguagaagggagaauucaggaccucgagaaauauguugaggacacuaaaauagaucucuggucauacaacgcggagcuucuuguugcccuggagaaccaacauacaauugaucuaacugacucagaaaugaacaaacuguuugaaagaacaaagaagcaacugagggaaaaugcugaggauaugggcaaugguuguuucaaaauauaucacaaaugugacaaugccugcauaggaucaaucagaaauggaacuuaugaccaugauguauacagagaugaagcauuaaacaaccgguuccagaucaaaggcguugagcugaagucaggauacaaagauuggauccuauggauuuccuuugccauaucauguuuuuugcuuuguguugcuuuguugggguucaucaugugggccugccaaaaaggcaacauuaggugcaacauuugcauuuga

SEQ ID NO: 40807 - RNA, 1698 nt, Artificial Sequence
  derived and/or modified CDS sequence (wt) from hemagglutinin__InfluenzaA__AFJ75058
augaaaguaaaacuacugguccuguuaugcacauuuacagcuacauaugcagacacaauauguauaggcuaccaugccaacaacucaaccgacacuguugacacaguacuugagaagaaugugacagugacacacucugucaaccugcuugaggacagucacaauggaaaauuaugucuauuaaaaggaauagccccacuacaauuggguaauugcagcguugccggauggaucuuaggaaacccagaaugcgaauuacugauuuccagggaaucaugguccuacauuguagaaaaaccaaauccugagaauggaacauguuacccagggcauuucgccgacuaugaggaacugagggagcaauugaguucaguaucuucauuugagagauucgaaauauuccccaaagaaagcucauggcccaaccacaccguaaccggaguaucagcaucaugcucccauaaugggaaaagcaguuuuuacaaaaauuugcuauggcugacggggaagaaugguuuguacccaaaccugagcaaguccuaugcaaacaacaaagagaaagaaguccuuguacuaugggguguucaucacccgccuaacauaggugaccaaagggcccucuaucauacagaaaaugcuuaugucucuguagugucuucacauuauagcagaaaauucaccccagaaauagccaaaagacccaaaguaagagaucaagaaggaagaaucaacuacuacuggacucugcuugaacccggggauacaauaauauuugaggcaaauggaaaucuaauagcgccaagauaugcuuucgcacugaguagaggcuuuggaucaggaaucaucaacucaaaugcaccaauggaugaaugugaugcgaagugccaaacaccucagggagcuauaaacagcagucuuccuuuccagaauguacacccagucacaauaggagaguguccaaaguaugucaggagugcaaaauuaaggaugguuacaggacuaaggaacaucccauccauucaauccagagguuuguuuggagccauugccgguuucauugaagggggguggacuggaaugguagaugguugguaugguuaucaucaccagaaugagcaaggaucuggcuaugcugcagaucaaaaaagcacacaaaaugccauuaaugggauuacaaacaaggugaauucuguaauugagaaaaugaacacucaauucacagcugugggcaaagaauucaacaaauuggaaagaaggauggaaaacuuaaauaaaaaaguugaugauggguuuauagacauuuggacauauaaugcagaauuguugguucuacuggaaaaugaaaggacuuuggauuuccaugacuccaaugugaagaaucuguaugagaaaguaaaaagccaauuaaagaauaaugccaaagaaauaggaaauggguguuuugaauucuaucacaaguguaacgaugaaugcauggagaguguaaaaaauggaacuuaugacuauccaaaauauuccgaagaaucaaaguuaaacagggagaaaauugauggagugaaauuggaaucaaugggagucuaucagauucuggcgaucuacucaacagucgccaguucucugguucuuuuggucucccugggggcaaucagcuucuggauguguuccaaugggucuuugcaguguagaauaugcaucuaa

SEQ ID NO: 40808 - RNA, 1698 nt, Artificial Sequence
  derived and/or modified CDS sequence (wt) from hemagglutinin__InfluenzaA__AFJ75069
augaaaguaaaacuacugguccuguuaugcacauuuacagcuacauaugcagacacaauauguauaggcuaccaugccaacaacucaaccgacacuguugacacaguacuugagaagaaugugacagugacacacucugucaaccugcuugaggacagucacaauggaaaauuaugucuauuaaaaggaauagccccacuacaauuggguaauugcagcguugccggauggaucuuaggaaacccagaaugcgaauuacugauuuccagggaaucaugguccuacauuguagaaaaaucaaauccugagaauggaacauguuacccagggcauuucgccgacuaugaggaacugagggagcaauugaguucaguaucuucauuugagagauucgaaauauuccccaaagaaagcucauggcccaaccacaccacaaccggaguaucagcaucaugcucccauaauggggaaagcaguuuuuacaaaaauuugcuauggcugacggggaagaaugguuuguacccaaaccugagcaaguccuaugcaaacaacaaagagaaagaaguccuuguacuaugggguguucaucacccgccuaacauaggugaccaaagggcucucuaucauacagaaaaugcuuaugucucuguagugucuucacauuauagcagaaaauucaccccagaaauagccaaaagacccaaaguaagagaucaagaaggaagaaucaacuacuacuggacucuacuugaacccggggauacaauaauauuugaggcaaauggaaaucuaauagcgccaagauaugcuuucgcacugaguagaggcuuuggaucaggaaucaucaacucaaaugcaccaauggaugaaugugaugcgaagugccaaacaccucagggagcuauaaacagcagucuuccuuuccagaauguacacccugucacaauaggagaguguccaaaguaugucaggagugcaaaauuaaggaugguuacaggacuaaggaacaucccauccauucaauccagagguuuguuuggagccauugccgguuucauugaagggggguggacuggaaugguagaugguugguaugguuaucaucaucagaaugagcaaggaucuggcuaugcugcagaucaaaaaagcacacaaaaugccauuaaugggauuacaaacaaggugaauucuguaauugagaaaaugaacacucaauucacagcugugggcaaagaauucaacaaauuggaaagaaggauggaaaacuuaaauaaaaaaguugaugauggguuuauagacauuuggacauauaaugcagaauuguugguucuacuggaaaaugaaaggacuuuggauuuccaugacuccaaugugaagaaucuguaugagaaaguaaaaagccaauuaaagaauaaugccaaagaaauaggaaauggguguuuugaauucuaucacaaguguaacgaugaaugcauggagaguguaaaaaauggaacuuaugacuauccaaaauauuccgaagaaucaaaguuaaacagggagaaaauugauggagugaaauuggaaucaaugggagucuaucagauucuggcgaucuacucaacagucgccaguucucugguucuuuuggucucccugggggcaaucagcuucuggauguguuccaaugggucuuugcaguguagaauaugcaucuaa

SEQ ID NO: 40809 - RNA, 1701 nt, Artificial Sequence
  derived and/or modified CDS sequence (wt) from hemagglutinin__InfluenzaA__AFJ75091
augaagacuaucauugcuuugagcuacauucuaugucugguuuucgcucaaaaacuucccggaaaugacaacagcacggcaacgcugugccuugggcaccaugcaguaccaaacggaacgauagugaaaacaaucacgaaugaccaaauugaaguuacuaaugcuacugagcugguucagaguuccucaacagguggaauaugcgacaguccucaucagauccuugauggagaaaacugcacacuaauagaugcucuauugggagacccucagugugauggcuuccaaaauaagaaaugggaccuuuuuguugaacgcagcaaagccuacagcaacuguuacccuuaugaugugccggauuaugccucccuuaggucacuaguugccucauccggcacacuggaguuuaacaaugaaagcuucaauuggacuggagucacucaaaacggaacaagcucugcuugcaaaaggagaucuaauaacaguuucuuuaguagauugaauugguugacccacuuaaaauucaaauacccagcauugaacgugacuaugccaaacaaugaaaaauuugacaaauuguacauuugggggguucaccacccggguacagacaaugaccaaaucuuccuguaugcucaagcaucaggaagaaucacagucucuaccaaaauaagucaacaaacuguaaucccgaauaucggaucuagacccagaguaaggaauauccccagcagaauaagcaucuauuggacaauaguaaaaccgggagacauacuuuugauuaacagcacagggaaucuaauugcuccuagggguuacuucaaaauacgaagugggaaaagcucaauaaugagaucagaugcacccauuggcaaaugcaauucugaaugcaucacuccaaauggaagcauucccaaugacaaaccauuucaaaauguaaacaggaucacauacggggccugucccagauauguuaagcaaaacacucugaaauuggcaacagggaugcgaaauguaccagagaaacaaacuagaggcauauuuggcgcaaucgcggguuucauagaaaaugguugggagggaaugguggaugguugguacgguuucaggcaccaaaauucugagggaauaggacaagcagcagaucucaaaagcacucaagcagcaaucgaucaaaucaaugggaagcugaauagguugaucgggaaaaccaaugagaaauuccaucagauugaaaaagaauucucagaaguagaagggagaauucaggaccucgagaaauauguugaggacacuaaaauagaucucuggucauacaacgcggaucuucuuguugcccuggagaaccaacauacaauugauuuaacugacucagaaaugaacaaacuguuugaaaaaacaaagaagcaacugagggaaaaugcugaggauaugggcaaugguuguuucaaaauauaccacaaaugugacaaugccugcauaggaucaaucagaaauggaacuuaugaccaugauguauacagagaugaagcauuaaacaaccgguuccagaucaagggcguugagcugaagucaggauacaaagauuggauccuauggauuuccuuugccauaucauguuuuuugcuuuguguugcuuuguugggguucaucaugugggccugccaaaaaggcaacauuaggugcaacauuugcauuuga

SEQ ID NO: 40810 - RNA, 1701 nt, Artificial Sequence
  derived and/or modified CDS sequence (wt) from hemagglutinin__InfluenzaA__AFJ75449
augaagacuaucauugcuuugagcuacauucuaugucugguuuucgcucaaaaacuuccuggaaaugacaacagcacggcaacgcugugccuugggcaccaugcaguaccaaacggaacgauagugaaaacaaucacgaaugaccaaauugaaguuacuaaugcuacugagcugguucagaguuccucaacaggugaaauaugcgacaguccucaucagauccuugauggagaaaacugcacacuaauagaugcucuauugggagacccucagugugauggcuuccaaaauaagaaaugggaccuuuuuguugaacgcagcaaagccuacagcaacuguuacccuuaugaugugccggauuaugccucccuuaggucacuaguugccucauccggcacacuggaguuuaacaaugaaagcuucaauuggacuggagucacucaaaacggaacaagcucugcuugcauaaggagaucuaauaacaguuucuuuaguagauugaauugguugacccacuuaaaauucaaauacccagcauugaacgugacuaugccaaacaaugaaaaauuugacaaauuguacauuugggggguucaccacccggguacggacaaugaccaaaucuuccuguaugcucaagcaucaggaaaaaucacagucucuaccaaaagaagccaacaaacuguaaucccgaauaucggaucuagacccagaguaaggaauaucccuagcagaauaagcaucuauuggacaauaguaaaaccgggagacauacuuuugauuaacagcacagggaaucuaauugcuccuagggguuacuucaaaauacgaagugggaaaagcucaauaaugagaucagaugcacccauuggcaaaugcaauucugaaugcaucacuccaaauggaagcauucccaaugacaaaccauuccaaaauguaaacaggaucacauacggggccugucccagauauguuaagcaaaacacucugaaauuggcaacagggaugcgaaauguaccagagaaacaaacuagaggcauauuuggcgcaaucgcggguuucauagaaaaugguugggaaggaaugguggaugguugguacgguuucaggcaucaaaauucugagggaacaggacaagcagcagaucucaaaagcacucaagcagcaaucgaucaaaucaaugggaagcugaauagguugaucgggaaaaccaacgagaaauuccaucagauugaaaaagaauucucagaagucgaagggagaauucaggaccuugagaaauauguugaggacaccaaaauagaucucuggucauacaacgcggagcuucuuguugcccuggagaaccaacauacaauugaucuaacugacucagaaaugaacaaacuguuugaaaaaacaaagaagcaacugagggaaaaugcugaggauaugggcaaugguuguuucaaaauauaccacaaaugugacaaugccugcauaggaucaaucagaaauggaacuuaugaccacgauguauacagagaugaagcauuaaacaaccgguuccagaucaagggcguugagcugaagucaggauacaaagauuggauccuauggauuuccuuugccauaucauguuuuuugcuuuguguugcuuuguugggguucaucaugugggccugccaaaaaggcaacauuaggugcaacauuugcauuuga

SEQ ID NO: 40811 - RNA, 1701 nt, Artificial Sequence
  derived and/or modified CDS sequence (wt) from hemagglutinin__InfluenzaA__AFJ75460
augaagacuaucauugcuuugagcuacauucuaugucugguuuucacucaaaaacuucccggaaaugacaacagcacggcaacgcugugccuugggcaccaugcaguaccaaacggaacgauagugaaaacaaucacgaaugaccaaauugaaguuacuaaugcuacugagcugguucagaguuccucaacaggugaaauaugcgacaguccucaucagauccuugauggagaaaacugcacacuaauagaugcucuauugggagacccucagugugauggcuuccaaaauaagaaaugggaccuuuuuguugaacgcagcaaagccuacagcaacuguuacccuuaugaugugccggauuaugccucccuuaggucacuaguugccucauccggcacacuggaguuuaacaaugaaagcuucaauuggacuggagucacucaaaacggaacaagcucugcuugcauaaggagaucuaauaacaguuucuuuaguagauugaauugguugacccacuuaaaauucaaauacccagcauugaacgugacuaugccaaacaaugaaaauuuugacaaauuguacauuugggggguucaccacccggguacggacaaugaccaaaucuuccuguaugcucaagcaucaggaagaaucacagucucuaccaaaagaagccaacaaacuguaaucccgaauaucggaucuagacccagaguaaggaauauccccagcagaauaagcaucuauuggacaauaguaaaaccgggagacauacuuuugauuaacagcacagggaaucuaauugcuccuagggguuacuucaaaauacgaaguggaaaaagcucaauaaugagaucagaugcacccauuggcaaaugcaauucugaaugcaucacuccaaauggaagcauucccaaugacaaaccauuccaaaauguaaacaggaucacauacggggccugucccagauauguuaagcaaaacacucugaaauuggcaacagggaugcgaaauguaccagagaaacaaacuagaggcauauuuggcgcaaucgcggguuucauagaaaaugguugggagggaaugguggaugguugguacgguuucaggcaucaaaauucugagggaauaggacaagcagcagaucucaaaagcacucaagcagcagucgaucaaaucaaugggaagcugaauagguugaucgggaaaaccaacgagaaauuccaucagauugaaaaagaauucucagaagucgaagggagaauucaggaccuugagaaauauguugaggacaccaaaauagaucucuggucauacaacgcagagcuucuuguugcccuggagaaccaacauacaauugaucuaacugacucagaaaugaacaaacuguuugaaaaaacaaagaagcaacugagggaaaaugcugaggauaugggcaaugguuguuucaaaauauaccacaaaugugacaaugccugcauaggaucaaucagaaauggaacuuaugaccacgauguauacagagaugaagcauuaaacaaccgauuccagaucaagggaguugagcugaagucaggauacaaagauuggauccuauggauuuccuuugccauaucauguuuuuugcuuuguguugcuuuguugggguucaucaugugggccugccaaaaaggcaacauuaggugcaacauuugcauuuga

SEQ ID NO: 40812 - RNA, 1698 nt, Artificial Sequence
  derived and/or modified CDS sequence (wt) from hemagglutinin__InfluenzaA__AFJ75517
augaaaguaaaacuacugguccuauuaugcacauuuacagcuacauaugcagacacaauauguaucggcuaccaugccaacaacucaaccgacacuguugacacaguacuugaaaagaaugugacagugacauacucugucaaccugcuugaggacaaccacaauggaaaacuaugucuauuaaaaggaauagccccauuacaauuggguaacugcagcguugccggguggaucuuaggaaacccagaaugcgaauuacugauuuccaaggagucaugguccuacauuguagaaagaccaaauccugagaauggaacauguuacccagggcauuucgccgacuaugaggaacugagggagcaauugaguucaguaucuucauuugagagguucgaaauauuccccaaagaaagcucauggcccaaccacaccguaaccggaguaucagcaucaugcucccauaacggggaaagcagcuuuuacaaaaauuugcuauggcugacgggaaagaaugguuuguacccaaaccugagcaaguccuaugcaaacaacaaagagaaagaaguccucguacuaugggguguucaucacccgccaaacauaggugaccaaaugacccucuaucauaaaaaaaaugcuuaugucucuguagugucuucacauuauagcagaaaauucaccccagaaauagccaaaagacccaaaguaagagaucaagaaggaagaaucaacuacuacuggacucugcuugaacccggggauacaauaauauuugaggcaaaugggaaucuaauagcaccaagauaugcuuucgcacugaauagaggcuuuggaucaggaaucaucaacucaaaugcaccaauggaugaaugugaugcgaagugccaaacaccucagggagcuauaaacagcagucuuccuuuccagaauguacacccagucacaauaggagaauguccaaaguaugucaggagugcaaaauuaaggaugguuacaggacuaaggaacaucccauccauucaauccagagguuuguuuggagccauugccgguuucauugaagggggguggacuggaaugguagaugguugguaugguuaucaucaccagaaugagcaaggaucuggcuaugcugcagaucaaaaaagcacacaaaaugccauuaaugggauuacaaacaaggugaacucuguaauugagaagaugaacacucaauucacagcugugggcaaagaauucaacaaauuggaaagaaggauggaaaacuuaaauaaaaaaguugaugacggguuuauagacguuuggacauauaaugcagaacuguugguucuacuggaaaaugaaaggacuuuggauuuccaugacuccaaugugaagaauuuguaugagaaaguaaaaacccaauuaaagaauaaugccaaagaaauaggaaauggguguuuugaauuuuaucacaaguguaacgaugaaugcauggagaguguaaaaaauggaacuuaugauuauccaaaauauuccgaagaaucaaaguuaagcagggagaaaauugauggagugaaauuggaaucaaugggagucuaucagauucuggcgaucuacucaacagucgccaguucucugguucuuuuggucucccugggggcaaucagcuucuggauguguuccaaugggucuuugcaguguagaauaugcaucuaa

SEQ ID NO: 40813 - RNA, 1698 nt, Artificial Sequence
  derived and/or modified CDS sequence (wt) from hemagglutinin__InfluenzaA__AFJ75560
augaaaguaaaacuacugguccuauuaugcacauuuacagcuacauaugcagacacaauauguaucggcuaccaugccaacaacucaaccgacacuguugacacaguacuugaaaagaaugugacagugacacacucugucaaccugcuugaggacaaccacaauggaaaacuaugucuauuaaaaggaauagccccauuacaauuggguaacugcagcguugccggguggaucuuaggaaacccagaaugcgaauuacugauuuccaaggagucaugguccuacauuguagaaagaccaaauccugagaauggaacauguuacccagggcauuucgccgacuaugaggaacugagggagcaauugaguucaguaucuucauuugagagguucgaaauauuccccaaagaaagcucauggcccaaccacaccguaaccggaguaucagcaucaugcucccauaacggggaaagcagcuuuuacaaaaauuugcuauggcugacgggaaagaaugguuuguacccaaaccugagcaaguccuaugcaaacaacaaagagaaagaaguccucguacuaugggguguucaucacccgccaaacauaggugaccaaaugacccucuaucauaaagaaaaugcuuaugucucuguagugucuucacauuauagcagaaaauucaccccagaaauagccaaaagacccaaaguaagagaucaagaaggaagaaucaacuacuacuggacucugcuugaacccggggauacaauaauauuugaggcaaaugggaaucuaauagcgccaagauaugcuuucgcacugaguagaggcuuuggaucaggaaucaucaacucaaaugcaccaauggaugaaugugaugcgaagugccaaacaccucagggagcuauaaacagcagucuuccuuuccagaauguacacccagucacaauaggagaauguccaaaguuugucaggagugcaaaauuaaggaugguuacaggacuaaggaacaucccauccauucaauccagagguuuguuuggagccauugccgguuucauugaagggggguggacuggaaugguagaugguugguaugguuaucaucaccagaaugagcaaggaucuggcuaugcugcagaucaaaaaagcacacaaaaugccauuaaugggauuacaaacaaggugaacucuguaauugagaagaugaacacucaauucacagcugugggcaaagaauucaacaaauuggaaagaaggauggaaaacuuaaauaaaaaaguugaugacggguuuauagacguuuggacauauaaugcagaacuguugguucuacuggaaaaugaaaggacuuuggauuuccaugacuccaauguaaagaauuuguaugagaaaguaaaaaaccaauuaaggaauaaugccaaagaaauaggaaauggguguuuugaauuuuaucacaaguguaacgaugaaugcauggagaguguaaaaaauggaacuuaugauuauccaaaauauuccgaagaaucaaaguuaagcagggagaaaauugauggagugaaauuggaaucaaugggagucuaucagauucuggcgaucuacucaacagucgccaguucucugguucuuuuggucucccugggggcaaucagcuucuggauguguuccaaugggucuuugcaguguagaauaugcaucuaa

SEQ ID NO: 40814 - RNA, 1698 nt, Artificial Sequence
  derived and/or modified CDS sequence (wt) from hemagglutinin__InfluenzaA__AFJ75571
augaaaguaaaacuacugguccuauuaugcacauuuacagcuacauaugcagacacaauauguaucggcuaccaugccaacaacucaaccgacacuguugacacaguacuugaaaagaaugugacagugacacauucugucaaccugcuugaggacaaccacaauggaaaacuaugucuauuaaaaggaauagccccauuacaauuggguaacugcagcguugccggguggaucuuaggaaacccagaaugcgaauuacugauuuccaaggagucaugguccuacauuguagaaagaccaaauccugagaauggaacauguuacccagggcauuucgccgacuaugaggaacugagggagcaauugaguucaguaucuucauuugagagguucgaaauauuccccaaagaaagcucauggcccaaccacaccguaaccggaguaucagcaucaugcucccauaacggggaaaacagcuuuuacaaaaauuugcuauggcugacgggaaagaaugguuuguacccaaaccugagcaaguccuaugcaaacaacaaagagaaagaaguccucguacuaugggguguucaccacccgccaaacauaggugaccaaaugacccucuaucauaaagaaaaugcuuaugucucuguagugucuucacauuauagcagaaaauucaccccagaaauagccaaaagacccaaaguaagagaucaagaaggaagaaucaacuacuacuggacucugcuugaacccggggauacaauaauauuugaggcaaaugggaaucuaauagcgccaagauaugcuuucgcacugaguagaggcuuuggaucaggaaucaucaacucaaaugcaccaauggaugaaugugaugcgaagugccaaacaccucagggagcuauaaacagcagucuuccuuuccagaauguacacccagucacaauaggagaauguccaaaguaugucaggagugcaaaauuaaggaugguuacaggacuaaggaacaucccauccauucaauccagagguuuguuuggagccauugccgguuucauugaagggggguggacuggaaugguagaugguugguaugguuaucaucaccagaaugagcaaggaucuggcuaugcugcagaucaaaaaagcacacaaaaugccauuaaugggauuacaaacaaggugaacucuguaauugagaagaugaacacucaauucacagcugugggcaaagaauucaacaaauuggaaagaaggauggaaaacuuaaauaaaaaaguugaugacggguuuauagacguuuggacauauaaugcagaacuguugguucuacuggaaaaugaaaggacuuuggauuuccaugacuccaaugugaagaauuuguaugagaaaguaaaaaaccaauuaaagaauaaugccaaagaaauaggaaauggguguuuugaauuuuaucacaaguguaacgaugaaugcauggagaguguaaaaaauggaacuuaugauuauccaaaauauuccgaagaaucaaaguuaagcagggagagaauugauggagugaaauuggaaucaaugggagucuaucagauucuggcgaucuacucaacagucgccaguucucugguucuuuuggucucccugggggcaaucagcuucuggauguguuccaaugggucuuugcaguguagaauaugcaucuaa

SEQ ID NO: 40815 - RNA, 1701 nt, Artificial Sequence
  derived and/or modified CDS sequence (wt) from hemagglutinin__InfluenzaA__AFJ75593
augaagacuaucauugcucugagcuacauucuaugucugguuuucgcucaaaaacuuccuggaaaugacagcagcacggcaacgcugugccuugggcaccaugcaguaccaaacggaacaauagugaaaacaaucacgaaugaccaaauugaaguuacuaaugcuacugagcugguucagaguuccucaacaggugaaauaugcaacaguccucaucagauccuugauggagaaaacugcacacuaauagaugcucuauugggagacccucagugugauggcuuccaaaauaagaaaugggaccuuuuuguugaacgcagcaaagccuacagcaacuguuacccuuaugaugugccggauuaugccucccuuaggucacuaguugccucauccggcacacuggaguuuaacaaugaaagcuucaauuggacuggagucacucaaaacggaacaagcucugcuugcauaaggagaucuaauaacaguuucuuuaguagauugaauugguugacccacuuaaaauucaaauauccagcauugaacgugacuaugccaaacaaugaaaaauuugacaaauuguacauuugggggguucaccacccggguacggacaaugaccaaaucuuccuguaugcucaagcaucaggaagaaucacagucucuaccaaaagaagccaacaaacuguaaucccgaauaucggaucuagacccagaguaaggaauauccccagcagaauaagcaucuauuggacaauaguaaaaccgggagacauacuuuugauuaacagcacagggaaucuaauugcuccuagggguuacuucaaaauacgaagugggaaaagcucaauaaugagaucagaugcacccauuggcaaaugcaauucugaaugcaucacuccaaauggaagcauucccaaugacaaaccauuccaaaauguaaacaggaucacauauggggccugucccagauauguuaagcaaaacacucugaaauuggcaacagggaugcgaaauguaccagaaaaacaaacuagaggcauauuuggcgcaaucgcggguuucauagaaaaugguugggagggaaugguggaugguugguacgguuucaggcaucaaaauucugagggaauaggacaagcagcagaucucaaaagcacucaagcagcaaucgaucaaaucaaugggaagcugaauagguugaucgggaaaaccaacgagaaauuccaucagauugaaaaagaauucucagaagucgaagggaggauucaggaccuugagaaauauguugaggacaccaaaguagaucucuggucauacaacgcggagcuucuuguugcccuggagaaucaacauacaauugaucuaacugacucagaaaugaacaaacuguuugaaaaaacaaagaagcaacugagggaaaaugcugaggauaugggcaaugguuguuucaaaauauaccacaaaugugacaaugccugcauaggaucaaucagaaauggaacuuaugaccacgauguauacagagaugaagcauuaaauaaccgguuccagaucaagggcguugagcugaagucaggauacaaagauuggauccuauggauuuccuuugccauaucauguuuuuugcuuuguguugcuuuguugggguucaucaugugggccugccaaaaaggcaacauuaggugcaacauuugcauuuga

SEQ ID NO: 40816 - RNA, 1698 nt, Artificial Sequence
  derived and/or modified CDS sequence (wt) from hemagglutinin__InfluenzaA__AFJ75615
augaaaguaaaacuacugguccuguuaugcacauuuacagcuacauaugcagacacaauauguguaggcuaccaugcuaacaacucgaccgacacuguugacacaguacuugaaaagaaugugacagugacacacucugucaaccugcuugagaacagucacaauggaaaacuaugucuauuaaaaggaauagccccacuacaauuggguaauugcagcguugccggguggaucuuaggaaacccagaaugcgaauuacugauuuccaaggagucaugguccuacauuguagaaaaaccaaauccugagaauggaacauguuacccagggcauuucgcugacuaugaggaacugagggagcaauugaguucaguaucuucauuugagagguucgaaauauuccccaaagaaagcucauggcccaaccacaccguaaccggagugucagcaucaugcucccauaauggggaaagcaguuuuuacagaaauuugcuauggcugacggggaagaaugguuuguacccaaaccugagcaaguccuaugcaaacaacaaagaaaaagaaguccuuguacuaugggguguucaucacccgccaaacauaggugaccaaaaggcccucuaucauacagaaaaugcuuauguuucuguggugucuucacauuauagcagaaaauucaccccagaaauagccaaaagacccaaaguaagagaucaagaaggaagaaucaacuacuacuggacucugcuugaacccggggauacaauaauauuugaggcaaauggaaaucuaauagcgccaagauaugcuuucgcacugaguagaggcuuuggaucaggaaucaucaacucaaaugcaccaauggauaaaugugaugcgaagugccaaacaccucagggagcuauaaacagcagucuuccuuuccagaacguacacccagucacuauaggagaguguccaaaguaugucaggagugcaaaauuaaggaugguuacaggacuaaggaacaucccauccauucaauccagagguuuguuuggagccauugccgguuucauugaagggggguggacuggaaugguagaugguugguaugguuaucaucaucagaaugagcaaggaucuggcuaugcugcagaucaaaaaagcacacaaaaugccauuaaugggauuacaaacaaggugaauucuguaauugagaaaaugaacacucaauucacagaagugggcaaagaauucaacaaauuggaaagaaggauggaaaacuugaauaaaaaaguugaugauggguuuauagacauuuggacauauaaugcagaacuguugguucuacuggaaaaugaaaggacuuuggauuuccaugacuccaaugugaagaaucuguaugagaaaguaaaaagccaguuaaagaauaaugcuaaagaaauaggaaauggguguuuugaauucuaucacaaguguaacgaugaaugcauggagaguguaaagaauggaacuuaugacuauccaaaauauuccgaagaaucaaaguuaaacagggagaaaauugauggagugaaauuggaaucaaugggagucuaucagauucuggcgaucuacucaacagucgccaguucucugguucuuuuggucucccugggggcaaucagcuucuggauguguuccaaugggucuuugcaguguagaauaugcaucuaa

SEQ ID NO: 40817 - RNA, 1701 nt, Artificial Sequence
  derived and/or modified CDS sequence (wt) from hemagglutinin__InfluenzaA__AFJ75630
augaagacuaucauugcuuugagcuacauucuaugucugguuuucgcucaaaaacuuccuggaaaugacaacagcacggcaacgcugugccuugggcaccaugcaguaccaaacggaacgauagugaaaacaaucacgaaugaccaaauugaaguuacuaaugcuacugagcugguucagaguuccucaacaggugaaauaugcaacaguccucaucagauccuugauggagaaaacugcacacuaauagaugcucuauugggagacccucagugugauggcuuccaaaauaagaaaugggaccuuuuuguugaacgcagcaaagccuacagcaacuguuacccuuaugaugugccggauuaugccucccuuaggucacuaguugccucauccggcacacuggaguuuaacaaugaaagcuucaauuggacuggagucacucaaaacggaacaagcucugcuugcauaaggagaucuaauaacaguuucuuuaguagauugaauugguugacccacuuaaaauucaaauacccagcauugaacgugacuaugccaaacaaugaacaauuugacaaauuguacauuugggggguucaccacccggguacggacaaugaccaaaucuuccuguaugcucaagcaucaggaagaaucacagucucuaccaaaagaagccaacaaacuguaaucccgaauaucggaucuagacccagaguaaggaauaucccuagcagaauaagcaucuauuggacaauaguaaaaccgggagacauacuuuugauuaacagcacagggaaucuaauugcuccuagggguuacuucaaaauacgaagugggaaaagcucaauaaugagaucagaugcacccauuggcaaaugcaauucugaaugcaucacuccaaauggaagcauucccaaugacaaaccauuccaaaauguaaacaggaucacauacggggccugucccagauauguuaagcaaaacacucugaaauuggcaacagggaugcgaaauguaccagagaaacaaacuagaggcauauuuggcgcaaucgcggguuucauagaaaaugguugggagggaaugguggaugguugguaugguuucaggcaucaaaauucugagggaagaggacaagcagcagaucucaaaagcacucaagcagcaaucgaucaaaucaaugggaagcugaauagauugaucgggaaaaccaacgagaaauuccaucaaauugaaaaagaauucucagaagucgaagggagaauucaggaccuugagaaauauguugaggacaccaaaauagaucucuggucauacaacgcggagcuucuuguugcccuggagaaccaacauacaauugaucuaacugacucagaaaugaacaaacuguuugaaaaaacaaagaagcaacugagggaaaaugcugaggauaugggcaaugguuguuucaaaauauaccacaaaugugacaaugccugcauaggaucaaucagaaauggaacuuaugaccacgauguauacagagaugaagcauuaaacaaccgguuccagaucaagggaguugagcugaagucaggguacaaagauuggauccuauggauuuccuuugccauaucauguuuuuugcuuuguguugcuuuguugggguucaucaugugggccugccaaaaaggcaacauuaggugcaacauuugcauuuga

SEQ ID NO: 40818 - RNA, 1701 nt, Artificial Sequence
  derived and/or modified CDS sequence (wt) from hemagglutinin__InfluenzaA__AFJ75641
augaagacuaucauugcuuugagcuacauucuaugucugguuuucgcucaaaaacuuccuggaaaugacaacagcacggcaacgcugugccuugggcaccaugcaguaccaaacggaacgauagugaaaacaaucacgaaugaccaaauugaaguuacuaaugcuacugagcugguucagaguuccucaacaggugaaauaugcaacaguccucaucagauccuugauggagaaaacugcacacuaauagaugcucuauugggagacccucagugugauggcuuccaaaauaagaaaugggaccuuuuuguugaacgcagcaaagccuacagcaacuguuacccuuaugaugugccggauuaugccucccuuaggucacuaguugccucauccggcacacuggaguuuaacaaugaaagcuucaauuggacuggagucacucaaaacggaacaagcucugcuugcauaaggagaucuaauaacaguuucuuuaguagauugaauugguugacccacuuaaaauucaaauacccagcauugaacgugacuaugccaaacaaugaacaauuugacaaauuguacauuugggggguucaccacccggguacggacaaugaccaaaucuuccuguaugcucaagcaucaggaagaaucacagucucuaccaaaagaagccaacaaacuguaaucccgaauaucggaucuagacccagaguaaggaauaucccuagcagaauaagcaucuauuggacaauaguaaaaccgggagacauacuuuugauuaacagcacagggaaucuaauugcuccuagggguuacuucaaaauacgaagugggaaaagcucaauaaugagaucagaugcacccauuggcaaaugcaauucugaaugcaucacuccaaauggaagcauucccaaugacaaaccauuccaaaauguaaacaggaucacauacggggccugucccagauauguuaagcaaaacacucugaaauuggcaacagggaugcgaaauguaccagagaaacaaacuagaggcauauuuggcgcaaucgcggguuucauagaaaaugguugggagggaaugguggaugguugguacgguuucaggcaucaaaauucugagggaagaggacaagcagcagaucucaaaagcacucaagcagcaaucgaucaaaucaaugggaagcugaauagauugaucggaaaaaccaacgagaaauuccaucagauugaaaaagaauucucagaagucgaagggagaauucaggaccuugagaaauauguugaggacaccaaaauagaucucuggucauacaacgcggagcuucuuguugcacuggagaaccaacauacaauugaucuaacugacucagaaaugaacaaacuguuugaaaaaacaaagaagcaacugagggaaaaugcugaggauaugggcaaugguuguuucaaaauauaccacaaaugugacaaugccugcauaggaucaaucagaaauggaacuuaugaccacgauguauacagagaugaagcauuaaacaaccgguuccagaucaagggaguugagcugaagucaggguacaaagauuggauccuauggauuuccuuugccauaucauguuuuuugcuuuguguugcuuuguugggguucaucaugugggccugccaaaaaggcaacauuaggugcaacauuugcauuuga

SEQ ID NO: 40819 - RNA, 1698 nt, Artificial Sequence
  derived and/or modified CDS sequence (wt) from hemagglutinin__InfluenzaA__AFJ75651
augaaaguaaaacuacugguccuguuaugcacauuuacagcuacauaugcagacacaauauguauaggcuaccaugcuaacaacucgaccgacacuguugacacaguacuugaaaagaaugugacagugacacacucugucaaccugcuugagaacagucacaauggaaaacuaugucuauuaaaaggaauagccccacuacaauuggguaacugcagcguugccggguggaucuuaggaaacccagaaugcgaauuacugauuuccaaggagucaugguccuacauuguagaaaaaccaaauccugagaauggaacauguuacccagggcauuucgcugacuaugaggaacugagggagcaauugaguucaguaucuucauuugagagguucgaaauauuccccaaagaaagcucauggcccaaccacaccguaaccggagugucagcaucaugcucccauaauggggaaagcaguuuuuacagaaauuugcuauggcugacggggaagaaugguuuguacccaaaccugagcaaguccuaugcaaacaacaaagaaaaagaaguccuuguacuaugggguguucaucacccgccaaacauaggugaccaaaaggcccucuaucguacagaaaaugcuuauguuucuguagugucuucacauuacagcagaaaauucaccccagaaauagccaaaagacccaaaguaagagaucaagaaggaagaaucaacuacuacuggacucugcuugaacccggggauacaauaauauuugaggcaaauggaaaucuaauagcgccaagauaugcuuucgcacugaguagaggcuuuggaucaggaaucaucaacucagaugcaccaauggauaaaugugaugcgaagugccaaacaccucagggagcuauaaacagcagucuuccuuuccagaacguacacccagucacaauaggagaguguccaaaguaugucaggagugcaaaauuaaggaugguuacaggacuaaggaacaucccauccauucaauccagagguuuguuuggagccauugccgguuucauugaagggggguggacuggaaugguagaugguugguaugguuaucaucaucagaaugagcaaggaucuggcuaugcugcagaucaaaaaagcacacaaaaugccauuaaugggauuacaaacaaggugaauucuguaauugagaaaaugaacacucaauucacagcagugggcaaagaauucaacaaauuggaaagaaggauggaaaacuugaauaaaaaaguugaugauggguuuauagacauuuggacauauaaugcagaacuguugguucuacuggaaaaugaaaggacuuuggauuuccaugacuccaaugugaagaaucuguaugagaaaguaaaaagccaguuaaagaauaaugcuaaagaaauaggaaauggguguuuugaauucuaucacaaguguaacgaugaaugcauggagaguguaaagaauggaacuuaugacuauccaaaauauuccgaagaaucaaaguuaaacagggagaaaauugauggagugaaauuggaaucgaugggagucuaucagauucuggcgaucuacucaacagucgccaguucucugguucuuuuggucucccugggggcaaucagcuucuggauguguuccaaugggucuuugcaauguagaauaugcaucuaa

SEQ ID NO: 40820 - RNA, 1701 nt, Artificial Sequence
  derived and/or modified CDS sequence (wt) from hemagglutinin__InfluenzaA__AFJ75662
augaagacuaucauugcuuugagcuacauucuauguuugguuuucgcucaaaaacuuccuggaaaugacaacagcacggcaacacugugccuugggcaccaugcaguaccaaacggaacgauagugaaaacaaucacgaaugaccaaauugaaguuacuaaugcuacugagcugguucagaguuccucaacaggugaaauaugcgacaguccucaucagauccuugauggagaaaacugcacacuaauagaugcucuauugggagacccucagugugauggcuuccaaaauaagaaaugggaccuuuuuguugaacgcagcaaagccuacagcaacuguuacccuuaugaugugccggauuaugccucccuuaggucacuaguugccucauccggcacacuggaguuuaacaaugaaagcuucaauuggacuggagucacucaaaacggaacaagcucugcuugcauaaggagaucuaacaacaguuucuuuaguagauugaauugguugacccacuuaaaauucaaauacccagcauugaacgugacuaugccaaacaaugaagaauuugacaaauuguacauuugggggguucaccacccggguacggacaaugaccaaaucuuccuguaugcucaagcaucaggaagaaucacagucucuaccaaaagaagccaacaaacuguaaucccgaauauuggaucuagacccagaguaaggaauaucccuagcagaauaagcaucuauuggacaauaguaaaaccgggagacauacuuuugauuaacagcacagggaaucuaauugcuccuagggguuacuucaaaauacgaaguggaaaaagcucaauaaugagaucagaugcacccauuggcaaaugcaauucugaaugcaucacuccaaauggaagcauucccaaugacaaaccauuccaaaauguaaacaggaucacauacggggccugucccagauauguuaagcaaaacacucugaaauuggcaacagggaugcgaaauguaccagagaaacaaacuagaggcauauuuggcgcaaucgcggguuucauagaaaaugguugggagggaaugguggaugguugguaugguuucaggcaucaaaauucugagggaacaggacaagcagcagaucucaaaagcacucaagcagcaaucgaucaaaucaaugggaagcugaauagguugauaggaaaaaccaacgagaaauuccaucagauugaaaaagaauucucagaagucgaagggagaauucaggaccuugagaaauauguugaggacaccaaaauagaucucuggucauacaacgcggagcuucuuguugcccuggagaaccaacauacaauugaucuaacugacucagaaaugaacaaacuguuugaaaaaacaaagaagcaacugagggaaaaugcugaggauaugggcaauggcuguuucaaaauauaccacaaaugugacaaugccugcauaggaucaaucagaaauggaacuuaugaccacgauguauacagagaugaagcauuaaacaaccgguuccagaucaagggcguugagcugaagucaggauacaaagauuggauccuauggauuuccuuugccauaucauguuuuuugcuuuguguugcuuuguugggguucaucaugugggccugccaaaaaggcaacauuaggugcaacauuugcauuuga

SEQ ID NO: 40821 - RNA, 1698 nt, Artificial Sequence
  derived and/or modified CDS sequence (wt) from hemagglutinin__InfluenzaA__AFJ75673
augaaaguaaaacuacugguccuauuaugcacauuuacagcuacauaugcagacacaauauguaucggcuaccaugccaacaacucaaccgacacuguugacacaguacuugaaaagaaugugacagugacauacucugucaaccugcuugaggacaaccacaauggaaaacuaugucuauuaaaaggaauagccccauuacaauuggguaacugcagcguugccggguggaucuuaggaaacccagaaugcgaauuacugauuuccaaggagucaugguccuacauuguagaaagaccaaauccugagaauggaacauguuacccagggcauuucgccgacuaugaggaacugagggagcaauugaguucaguaucuucauuugagagguucgaaauauuccccaaagaaagcucauggcccaaccacaccguaaccggaguaucagcaucaugcucccauaacggggaaagcagcuuuuacaaaaauuugcuauggcugacgggaaagaaugguuuguacccaaaccugagcaaguccuaugcaaacaacaaagagaaagaaguccucguacuaugggguguucaucacccgccaaacauagguaaccaaaugacccucuaucauaaagaaaaugcuuaugucucuguagugucuucacauuauagcagaaaauucaccccagaaauagccaaaagacccaaaguaagagaucaagaaggaagaaucaacuacuacuggacucugcuugaacccggggauacaauaauauuugaggcaaaugggaaucuaauagcaccaagauaugcuuucgcacugaauagaggcuuuggaucaggaaucaucaacucaaaugcaccaauggaugaaugugaugcgaagugccaaacaccucagggagcuauaaacagcagucuuccuuuccagaauguacacccagucacaauaggagaauguccaaaguaugucaggagugcaaaauuaaggaugguuacaggacuaaggaacaucccauccauucaauccagagguuuguuuggagccauugccgguuucauugaagggggguggacuggaaugguagaugguugguaugguuaucaucaccagaaugagcaaggaucuggcuaugcugcagaucaaaaaagcacacaaaaugccauuaaugggauuacaaacaaggugaacucuguaauugagaagaugaacacucaauucacagcugugggcaaagaauucaacaaauuggaaagaaggauggaaaacuuaaauaaaaaaguugaugacggguuuauagacguuuggacauauaaugcagaacuguugguucuacuggaaaaugaaaggacuuuggauuuccaugacuccaaugugaagaauuuguaugagaaaguaaaaacccaauuaaagaauaaugccaaagaaauaggaaauggguguuuugaauuuuaucacaaguguaacgaugaaugcauggagaguguaaaaaauggaacuuaugauuauccaaaauauuccgaagaaucaaaguuaagcagggagaaaauugauggagugaaauuggaaucaaugggagucuaucagauucuggcgaucuacucaacagucgccaguucucugguucuuuuggucucccugggggcaaucagcuucuggauguguuccaaugggucuuugcaguguagaauaugcaucuaa

SEQ ID NO: 40822 - RNA, 1701 nt, Artificial Sequence; identical to SEQ ID NO: 34681
  derived and/or modified CDS sequence (wt) from hemagglutinin__InfluenzaA__AFJ76119

SEQ ID NO: 40823 - RNA, 1701 nt, Artificial Sequence
  derived and/or modified CDS sequence (wt) from hemagglutinin__InfluenzaA__AFJ76131
augaaggcaauacuaguaguucugcuauauacauuugcaaccgcaaaugcagacacauuauguauagguuaucaugcgaacaauucaacagacacuguagacacaguacuagaaaagaauguaacaguaacacacucuguuaaccuucuagaagacaagcauaacgggaaacuaugcaaacuaagagggguagccccauugcauuuggguaaauguaacauugcuggcuggauccugggaaauccagagugugaaucacucuccacagcaagcucaugguccuacauuguggaaacaucuaguucagacaauggaacguguuacccaggagauuucaucgauuaugaggagcuaagagagcaauugagcucagugucaucauuugaaagguuugagauauuccccaagacaaguucauggcccaaucaugacucgaacaaagguguaacggcagcauguccucaugcuggagcaaaaagcuucuacaaaaauuuaauauggcuaguuaaaaaaggaaauucauacccaaagcucagcaaauccuacauuaaugauaaagggaaagaaguccucgugcuauggggcauucaccauccaucuacuagugcugaccaacaaagucucuaucagaaugcagaugcauauguuuuuguggggacaucaagauacagcaagaaguucaagccggaaauagcaauaagacccaaagugagggaacaagaagggagaaugaacuauuacuggacacuaguagagccgggagacaaaauaacauucgaagcaacuggaaaucuagugguaccgagauaugcauucgcaauggaaagaaaugcuggaucugguauuaucauuucagauacaccaguccacgauugcaauacaacuugucagacacccaagggugcuauaaacaccagccucccauuucagaauauacauccgaucacaauuggaaaauguccaaaauauguaaaaagcacaaaauugagacuggccacaggauugaggaaugucccgucuauucaaucuagaggccuauuuggggccauugccgguuucauugaagggggguggacagggaugguagauggaugguacgguuaucaccaucaaaaugagcaggggucaggauaugcagccgaccugaagagcacacagaaugccauugacgagauuacuaacaaaguaaauucuguuauugaaaagaugaauacacaguucacagcaguagguaaagaguucaaccaccuggaaaaaagaauagagaauuuaaauaaaaaaguugaugaugguuuccuggacauuuggacuuacaaugccgaacuguugguucuauuggaaaaugaaagaacuuuggacuaccacgauucaaaugugaagaacuuauaugaaaagguaagaagccaguuaaaaaacaaugccaaggaaauuggaaacggcugcuuugaauuuuaccacaaaugcgauaacacaugcauggaaagugucaaaaaugggacuuaugacuacccaaaauacucagaggaagcaaaauuaaacagagaagaaauagaugggguaaagcuggaaucaacaaggauuuaccagauuuuggcgaucuauucaacugucgccaguucauugguacugguagucucccugggggcaaucaguuucuggaugugcucuaaugggucucuacaguguagaauauguauuuaa

SEQ ID NO: 40824 - RNA, 1701 nt, Artificial Sequence
  derived and/or modified CDS sequence (wt) from hemagglutinin__InfluenzaA__AFJ76155
augaaggcaauacuaguaguucugcuauauacauuugcaaccgcaaaugcagacacauuauguauagguuaucaugcgaacaauucaacagacacuguagacacaguacuagaaaagaauguaacaguaacacacucuguuaaccuucuagaagacaagcauaacgggaaacuaugcaaacuaagagggauagccccauugcauuuggguaaauguaacauugcuggcuggauccugggaaauccagagugugaaucacucuccacagcaagcucaugguccuacauuguggaaacaucuaguucagacaauggaacguguuacccaggagauuucaucgauuaugaggagcuaagagagcaauugagcucagugucaucauuugaaagguuugagauauuccccaagacaaguucauggcccaaucaugacucgaacaaagguguaacggcagcauguccucaugcuggagcaaaaagcuucuacaaaaauuuaauauggcuaguuaaaaaaggaaauucauacccaaagcucagcaaauccuacauuaaugauaaagggaaagaaguccucgugcuauggggcauucaccauccaucuacuagugcugaccaacaaagucucuaucagaaugcagaugcauauguuuuuguggggacaucaagauacagcaagaaguucaagccggaaauagcaauaagacccaaagugagggaacaagaagggagaaugaacuauuacuggacacuaguagagccgggagacaaaauaacauucgaagcaacuggaaaucuagugguaccgagauaugcauucgcaauggaaagaaaagcuggaucugguauuaucauuucagauacaccaguccacgauugcaauacaacuugucagacacccaagggugcuauaaacaccagccucccauuucagaauauacauucgaucacaauuggaaaauguccaaaauauguaaaaagcacaaaauugagacuggccacaggauugaggaaugucccgucuauucaaucuagaggccuauuuggggccauugccgguuucauugaagggggguggacagggaugguagauggaugguacgguuaucaccaucaaaaugagcaggggucaggauaugcagccgaccugaagagcacacagaaugccauugacgagauuacuaacaaaguaaauucuguuauugaaaagaugaauacacaguucacagcaguagguaaagaguucaaccaccuggaaaaaagaauagagaauuuaaauaaaaaaguugaugaugguuuccuggacauuuggacuuacaaugccgaacuguugguucuauuggaaaaugaaagaacuuuggacuaccacgauucaaaugugaagaacuuauaugaaaagguaagaagccaguuaaaaaacaaugccaaggaaauuggaaacggcugcuuugaauuuuaccacaaaugcgauaacacgugcauggaaagugucaaaaaugggacuuaugacuacccaaaauacucagaggaagcaaaauuaaacagagaagaaauagaugggguaaagcuggaaucaacaaggauuuaccagauuuuggcgaucuauucaacugucgccaguucauugguacugguagucucccugggggcaaucaguuucuggaugugcucuaaugggucucuacaguguagaauauguauuuaa

SEQ ID NO: 40825 - RNA, 1698 nt, Artificial Sequence
  derived and/or modified CDS sequence (wt) from hemagglutinin__InfluenzaA__AFJ76186
augaaaguaaaacuacugguccuguuaugcacauuuacagcuacauaugcagacacaauauguauaggcuaccaugcuaacaacucgaccgacacuguugacacaguacuugaaaagaaugugacagugacacacucugucaaccugcuugagaacagucacaauggaaaacuaugucuauuaaaaggaauagccccacuacaauuggguaacugcagcguugccggguggaucuuaggaaacccagaaugcgaauuacugauuuccaaggagucaugguccuacauuguagaaaaaccaaauccugagaauggaacauguuacccagggcauuucgcugacuaugaggaacugagggagcaauugaguucaguaucuucauuugagagguucgaaauauuccccaaagaaagcucauggcccaaccacaccguaaccggagugucagcaucaugcucccauaauggggaaagcaguuuuuacagaaauuugcuauggcugacggggaagaaugguuuguacccaaaccugagcaaguccuaugcaaacaacaaagaaaaagaaguccuuguacuaugggguguucaucacccgccaaacauaggugaccaaaaggcccucuaucauacagaaaaugcuuauguuucuguagugucuucacauuauagcagaaaauucaccccagaaauaaccaaaagacccaaaguaagagaucaagaaggaagaaucaacuacuacuggacucugcuugaacccggggauacaauaauauuugaggcaaauggaaaucuaauagcgccaagauaugcuuucgcacugaguagaggcuuuggaucaggaaucaucaacucagaugcaccaauggauaaaugugaugcgaagugccaaacaccucagggagcuauaaacagcagucuuccuuuccagaacguacacccagucacaauaggagaguguccaaaguaugucaggagugcaaaauuaaggaugguuacaggacuaaggaacaucccauccauucaauccagagguuuguuuggagccauugccgguuucauugaagggggguggacuggaaugguagaugguugguaugguuaucaucaucagaaugagcaaggaucuggcuaugcugcagaucaaaaaagcacacaaaaugccauuaaugggauuacaaacaaggugaauucuguaauugagaaaaugaacacucaauucacagcagugggcaaagaauucaacaaauuggaaagaaggauggaaaacuugaauaaaaaaguugaugauggguuuauagacauuuggacauauaaugcagaacuguugguucuacuggaaaaugaaaggacuuuggauuuccaugacuccaaugugaagaaucuguaugagaaaguaaaaagccaguuaaagaauaaugcuaaagaaauaggaaauggguguuuugaauucuaucacaaguguaacgaugaaugcauggagaguguaaagaauggaacuuaugacuauccaaaauauuccgaagaaucaaaguuaaacagggagaaaauugauggagugaaauuggaaucaaugggagucuaucagauucuggcgaucuacucaacagucgccaguucucugguucuuuuggucucccugggggcaaucagcuucuggauguguuccaacgggucuuugcaauguagaauaugcaucuaa

SEQ ID NO: 40826 - RNA, 1701 nt, Artificial Sequence
  derived and/or modified CDS sequence (wt) from hemagglutinin__InfluenzaA__AFJ76203
augaaggcaauacuaguaguucugcuauauacauuugcaaccgcaaaugcagacacauuauguauagguuaucaugcgaacaauucaacagacacuguagacacaguacuagaaaagaauguaacaguaacacacucuguuaaccuucuagaagacaagcauaacgggaaacuaugcaaacuaagagggguagccccauugcauuuggguaaauguaacauugcuggcuggauccugggaaauccagagugugaaucacucuccacagcaagcucaugguccuacauuguggaaacaucuaguucagacaauggaacguguuacccaggagauuucaucgauuaugaggagcuaagagagcaauugagcucagugucaucauuugaaagguuugagauauuccccaagacaaguucauggcccaaucaugacucgaacaaagguguaacggcagcauguccucaugcuggagcaaaaagcuucuacaaaaauuuaauauggcuaguuaaaaaaggaaauucauacccaaagcucagcaaauccuacauuaaugauaaagggaaagaaguccucgugcuauggggcauucaccauccaucuacuagugcugaccaacaaagucucuaucagaaugcagaugcauauguuuuuguggggacaucaagauacagcaagaaguucaagccggaaauagcaauaagacccaaagugagggaucaagaagggagaaugaacuauuacuggacacuaguagagccgggagacaaaauaacauucgaagcaacuggaaaucuagugguaccgagauaugcauucgcaauggaaagaaaugcuggaucugguauuaucauuucagauacaccaguccacgauugcaauacaacuugucagacacccaagggugcuauaaacaccagccucccauuucagaauauacauccgaucacaauuggaaaauguccaaaauauguaaaaagcacaaaauugagacuggccacaggauugaggaaugucccgucuauucaaucuagaggccuauuuggggccauugccgguuucauugaagggggguggacagggaugguagauggaugguacgguuaucaccaucaaaaugagcaggggucaggauaugcagccgaccugaagagcacacagaaugccauugacgagauuacuaacaaaguaaauucuguuauugaaaagaugaauacacaguucacagcaguagguaaagaguucaaccaccuggaaaaaagaauagagaauuuaaauaaaaaaguugaugaugguuuccuggauauuuggacuuacaaugccgaacuguugguucuauuggaaaaugaaagaacuuuggacuaccacgauucaaaugugaagaacuuauaugaaaagguaagaagccaguuaaaaaacaaugccaaggaaauuggaaacggcugcuuugaauuuuaccacaaaugcgauaacacgugcauggaaagugucaaaaaugggacuuaugacuacccaaaauacucagaggaagcaaaauuaaacagagaagaaauagaugggguaaagcuggaaucaacaaggauuuaccagauuuuggcgaucuauucaacugucgccaguucauugguacugguagucucccugggggcaaucaguuucuggaugugcucuaaugggucucuacaguguagaauauguauuuaa

SEQ ID NO: 40827 - RNA, 1701 nt, Artificial Sequence
  derived and/or modified CDS sequence (wt) from hemagglutinin__InfluenzaA__AFJ76213
augaagacuaucauugcuuugagcuacauucuaugucugguuuucgcucaaaaacuucccggaaaugacaacagcacggcaacgcugugccuugggcaccaugcaguaccaaacggaacgauagugaaaacaaucacgaaugaccaaauugaaguuacuaaugcuacugagcugguucagaguuccucaacagguggaauaugcgacaguccucaucagauccuugauggagaaaacugcacacuaauagaugcucuauugggagacccucagugugauggcuuccaaaauaagaaaugggaccuuuuuguugaacgcagcaaagccuacagcaacuguuacccuuaugaugugccggauuaugccucccuuaggucacuaguugccucauccggcacacuggaguuuaacaaugaaagcuucgauuggacuggagucacucagaauggaacaagcucugcuugcaaaaggagaucuaacaaaaguuucuuuaguagauugaauugguugacccacucaaaauacaaauacccagcauugaacgugacuaugccaaacaaugaaaaauuugacaaauuguacaucugggggguucaccacccggguacggacagugaccaaaucagccuauaugcucaagcaucaggaagaaucacagucucuaccaaaagaagccaacaaacuguaaucccgaauaucggaucuagacccaggguaagggaugucuccagccgaauaagcaucuauuggacaauaguaaaaccgggagacauacuuuugauuaacagcacagggaaucuaauagcuccucgggguuacuucaaaauacgaagugggaaaagcucaauaaugagaucagaugcacccauuggcaaaugcaauucugaaugcaucacuccaaauggaagcauucccaaugacaaaccauuucaaaauguaaacaggaucacauauggggccugucccagauauguuaagcaaaacacucugaaauuggcaacagggaugcgaaauguaccagagaaacaaacuagaggcauauuuggcgcaaucgcggguuucauagaaaaugguugggagggaaugguggacgguugguacgguuucaggcaucaaaauucugagggcacaggacaagcagcagaucucaaaagcacucaagcagcaaucaaccaaaucaaugggaaacugaauagguuaaucgggaaaacaaacgagaaauuccaucagauugaaaaagaauucucggaaguagaagggagaauucaggaccucgagaaauauguugaggacacuaaaauagaucucuggucauacaacgcggagcuucuuguugcccuggagaaccaacauacaauugaucuaacugacucagaaaugaacaaacuguuugaaagaacaaagaagcaacugagggaaaaugcugaggauaugggcaaugguuguuucaaaauauaccacaaaugugacaaugccugcauagggucaaucagaaauggaacuuaugaccaugauguguacagagaugaagcauuaaacaaccgguuccagaucaaagguguugagcugaagucaggauacaaagauuggauccuauggauuuccuuugccauaucauguuuuuugcuuuguguugcuuuguugggguucaucaugugggccugccaaaaaggcaacauuaggugcaacauuugcauuuga

SEQ ID NO: 40828 - RNA, 1701 nt, Artificial Sequence
  derived and/or modified CDS sequence (wt) from hemagglutinin__InfluenzaA__AFJ77408
augaagacuaucauugcuuugagcuacauuuuaugucugauuuucgcucaaaaacuucccggaaaugacaacagcacagcaacgcugugccugggacaccaugcagugccaaacggaacgcuagugaaaacaaucacgaaugaucaaauugaagugacuaaugcuacugagcugguucagaguuccucaacagguagaauaugcaacaguccucaccgaauccuugauggagaaaacugcacacugauagaugcucuauugggagacccucauugugauggcuuccaaaauaaggaaugggaccuuuuuguugaacgcagcaaagcuuacagcaacuguuacccuuaugaugugccggauuaugccucccuuaggucacuaguugccucaucaggcacccuggaguuuaccaaggaaggcuucaauuggacuggagucgcucaggaugggaaaagcuauucuugcaaaaggggaucuguuaacaguuucuuuaguagauugaauugguugcacaaauuagaauacaaauauccagcacugaacgugacuaugccaaacaaugacaaauuugacaaauuguacauuugggggguucaccacccgagcacggacagugaccaaaccagccuauauguucaagcaucggggagagucacagucucuaccaaaagaagccaacaaacuguaaucccgaauaucgggucuagacccuggguaagggguaucuccaguagaauaagcaucuauuggacaauaguaaaaccgggagacauacuuuugauuaacagcacagggaaucuaauugcuccucgggguuacuucaaaauacgaaaugggaaaagcucaauaaugaggucagaugcacccauuggcaacugcaauucugaaugcaucacuccaaauggaagcauucccaaugacaaaccuuuucaaaauguaaacaggaucacauauggggccugucccagauauguuaagcaaaacacucugaaguuggcaacagggaugcggaaugugccagagaaacaaacuagaggcauauucggcgcaaucgcagguuucauagaaaaugguugggagggaaugguagacgguugguacgguuucaggcaucaaaauucugagggcacaggacaagcagcagaucuuaaaagcacucaagcagcaaucaaccaaaucaacgggaaacugaauagguuaaucgagaaaacgaacgaaaaauuccaucaaaucgaaaaagaauucucagaaguagaagggagaauucaggaccuugagaaauauguugaagacacuaaaauagaucucuggucuuacaacgcggagcuucuuguugcccuggagaaccaacauacaauugaucuaacugacucagaaaugaacaaacuguuugaaagaacaaggaagcaacugagggaaaaugcugaggacaugggcaaugguugcuucaaaauauaccacaaaugugacaaugccugcauagggucaaucagaaauggaacuuaugaccaugauguauacagagacgaagcauuaaacaaccgguuccagaucaaagguguugagcugaagucaggauacaaagauuggauccuauggauuuccuuugccauaucaugcuuuuugcuuuguguuguuuugcugggguucaucaugugggccugccaaaaaggcaacauuaggugcaacauuugcauuuga

SEQ ID NO: 40829 - RNA, 1701 nt, Artificial Sequence
  derived and/or modified CDS sequence (wt) from hemagglutinin__InfluenzaA__AFJ77430
augaagacuaucauugcuuugagcuacauuuuaugucugauuuucgcucaaaaacuucccggaaaugacaacagcacagcaacgcugugccugggacaccaugcagugccaaacggaacgcuagugaaaacaaucacgaaugaucaaauugaagugacuaaugcuacugagcugguucagaguuccucaacagguagaauaugcgacaguccucaccgaauccuugauggagaaaacugcacacugauagaugcucuauugggagacccuaauugugauggcuuccaaaauaaggaaugggaccuuuuuguugaacgcagcaaagcuuacagcaacuguuacccuuaugaugugccggauuaugccucccuuaggucacuaguugccucaucaggcacccuggaguuuaccaaggaaggcuucaauuggacuggagucgcucaggaugggaaaagcuauucuugcaaaaggggaucuguuaacaguuucuuuaguagauugaauugguugcacaaauuagaauacaaauauccagcacugaacgugacuaugccaaacaaugacaaauuugacaaauuguacauuugggggguucaccacccgagcacggacagugaccaaaucagccuauaugcucaagcaucggggagagucacagucucuaccaaaagaagccaacaaacuguaaucccgaauaucgggucuagacccuggguaagggguaucuccaguagaauaagcaucuauuggacaauaguaaaaccgggagacauacuuuugauuaacagcacagggaaucuaauugcuccucgggguuacuucaaaauacgaaaugggaaaagcucaauaaugaggucagaugcacccauuggcaacugcaauucugaaugcaucacuccaaauggaagcauucccaaugacaaaccuuuucaaaauguaaacaggaucacauauggggccugucccagauauguuaagcaaaacacucugaaguuggcaacagggaugcggaaugugccagagaaacaaacuagaggcauauucggcgcaaucgcagguuucauagaaaaugguugggagggaaugguagacgguugguaugguuucaggcaucaaaauucugagggcacaggacaagcagcagaucuuaaaagcacucaagcagcaaucaaccaaaucaacgggaaacugaauagguuaaucgagaaaacgaacgaaaaauuccaucaaaucgaaaaagaauucucagaaguagaagggagaauucaggaccuugagaaauauguugaagacacuaaaauagaucucuggucuuacaacgcggagcuucuuguugcccuggagaaccaacauacaauugaucuaacugacucagaaaugaacaaacuguuugaaagaacaaggaggcaacugagggaaaaugcugaggacaugggcaaugguugcuucaaaauauaccacaaaugugacaaugccugcauagggucaaucagaaauggaacuuaugaccaugauguauacagagacgaagcauuaaacaaccgguuccagaucaaagguguugagcugaagucaggauacaaagauuggauccuauggauuuccuuugccauaucaugcuuuuugcuuuguguuguuuugcugggguucaucaugugggccugccaaaaaggcaacauuaggugcaacauuugcauuuga

SEQ ID NO: 40830 - RNA, 1701 nt, Artificial Sequence
  derived and/or modified CDS sequence (wt) from hemagglutinin__InfluenzaA__AFJ77440
augaagacuaucauugcuuugagcuacauuuuaugucugguuuucgcucaaaaacuucccggaaaugacaacagcacggcaacgcugugccugggacaccaugcagugccaaacggaacgcuagugaaaacaaucacgaaugaccaaauugaggugacuaaugcuacugagcugguucagaguuccucaacagguagaauaugcgacaguccucaccgaauccuugauggaaaaaacugcacacugauagaugcucuauugggagacccucauugugauggcuuccaaaauaaggaaugggaccuuuuuguugaacgcagcaaagcuuacagcaacuguuacccuuaugaugugccggauuaugccucccuuaggucacuaguugccucauccggcacccuggaguuuaccagugaaggcuucaauuggacuggagucgcucaggauggaacaagcuaugcuugcaaaaggggaucuguuaaaaguuucuuuaguagauugaauugguugcacaaauuagaauacaaauauccagcacugaacgugacuaugccaaacaaugacaaauuugacaaauuguacauuugggggguucaccacccgaguacggacagugaccaaaccagccuauauguucaagcaucagggagagucacagucucuaccaaaagaagccaacaaacuguaaucccgaauaucgggucuagacccuggguaaggggugucuccagcagaauaagcaucuauuggacaauaguaaaaccgggagacauacuuuugauuaacagcacagggaaucuaauugcuccucgggguuacuucaaaauacgaagugggaaaagcucaauaaugaggucagaugcacccauuggcaacugcaauucugaaugcaucacuccaaauggaagcauucccaaugacaaaccuuuucaaaauguaaacaggaucacauauggggccugucccagauauguuaagcaaaacacucugaaauuggcaacagggaugcggaauguaccagagaaacaaacuagaggcauauucggcgcaaucgcagguuucauagaaaaugguugggagggaaugguagacgguugguacgguuucaggcaucaaaauucugagggcacaggacaagcagcagaucuuaaaagcacucaagcagcaaucaaccaaaucaacgggaaacugaauagguuaaucgagaaaacgaacgagaaauuccaucaaaucgaaaaagaauucucagaaguagaagggagaauucaggaccucgagaaauauguugaagacacuaaaauagaucucuggucuuacaacgcggagcuucuuguugcccuggagaaccaacauacaauugaucuaacugacucagaaaugaacaaacuguuugaaagaacaaggaagcaacugagggaaaaugcugaggacaugggcaaugguugcuucaaaauauaccacaaaugugacaaugccugcauagggucaaucagaaauggaacuuaugaccaugauguauacagagacgaagcauuaaacaaccgauuccagaucaaagguguugagcugaagucaggauacaaagauuggauccuauggauuuccuuugccauaucaugcuuuuugcuuuguguuguuuugcugggguucaucaugugggccugccaaaaaggcaacauuaggugcaacauuugcauuuga

SEQ ID NO: 40831 - RNA, 1701 nt, Artificial Sequence
  derived and/or modified CDS sequence (wt) from hemagglutinin__InfluenzaA__AFJ77451
augaagacuaucauugcuuugagcuacauuuuaugucugguuuucgcucaaaaacuucccggaaaugacaacagcacggcaacgcugugccugggacaccaugcagugccaaacggaacgcuagugaaaacaaucacgaaugaccaaauugaagugacuaaugcuacugagcugguucagaguuccucaacagguagaauaugcgacaguccucaccgaauccuugauggaaaaaacugcacacugauagaugcucuauugggagacccucauugugauggcuuccaaaauaaggaaugggaccuuuuuguugaacgcagcaaagcuuacagcaacuguuacccuuaugaugugccggauuaugccucccuuaggucacuaguugccucauccggcacccuggaguuuaacaaugaaagcuucaauuggacuggagucgcucagaauggaacaagcuaugcuugcaaaaggagaucuguuaaaaguuucuuuaguagauugaauugguugcacaaauuagaauacaaauauccagcacugaacgugacuaugccaaacaaugacaaauuugacaaauuguacauuugggggguucaccacccgaguacggacagugaccaaaccagccuauauguucaagcaucagggagagucacagucucuaccaaaagaagccaacaaacuguaaucccgaauaucggaucuagacccuggguaaggggugucuccagcagaauaagcaucuauuggacaauaguaaaaccgggagacauacuuuugauuaacagcacagggaaucuaauugcuccucgggguuacuucaaaauacgaaguggaaaaagcucaauaaugaggucagaugcacccauuggcaacugcaauucugaaugcaucacuccaaauggaagcauucccaaugacaaaccauuucaaaauguaaacaggaucacauauggggccugucccagauauguuaagcaaaacacucugaaauuggcaacagggaugcggaauguaccagagaaacaaacuagaggcauauucggcgcaaucgcagguuucauagaaaaugguugggagggaaugguagacgguugguacgguuucaggcaucaaaauucugagggcacaggacaagcagcagaucuuaaaagcacucaagcagcaaucaaccaaaucaacgggaaacugaauagguuaaucgagaaaacgaacgggaaauuccaucaaaucgaaaaagaauucucagaaguagaagggagaauucaggaccucgagaaauauguugaagacacuaaaauagaucucuggucguacaacgcggagcuucuuguugcccuggagaaccaacauacaauugaucuaacugacucagaaaugaacaaacuguuugaaagaacaaggaagcaacugagggaaaaugcugaggacaugggcaaugguugcuucaaaauauaccacaaaugugacaaugccugcauagggucaaucagaaauggaacuuaugaccaugauguauacagagacgaagcauuaaacaaccgguuccagaucaaagguguugagcugaagucaggauacaaagauuggauccuauggauuuccuuugccauaucauguuuuuugcuuuguguuguuuugcugggguucaucaugugggccugccaaaaaggcaacauuaggugcaacauuugcauuuga

SEQ ID NO: 40832 - RNA, 1701 nt, Artificial Sequence
  derived and/or modified CDS sequence (wt) from hemagglutinin__InfluenzaA__AFJ77462
augaagacuaucauugcuuugagcuacauuuuaugucugguuuucgcucaaaaacuucccggaaaugacaacagcacggcaacgcugugccugggacaccaugcagugccaaacggaacgcuagugaaaacaaucacgaaugaccaaauugaagugacuaaugcuacugagcugguucagaguuccucaacagguagaauaugcgacaguccucaccgaauccuugauggaaaaaacugcacacugauagaugcucuauugggagacccucauugugauggcuuccaaaauaaggaaugggaccuuuuuguugaacgcagcaaagcuuacagcaacuguuacccuuaugaugugccggauuaugccucccuuaggucacuaguugccucauccggcacccuggaguuuaccaaugaaggcuucaauuggacuggagucgcucaggauggaacaagcuaugcuugcaaaaggggaucuguuaaaaguuucuuuaguagauugaauugguugcacaaauuagaauacaaauauccagcacugaacgugacuaugccaaacaaugacaaauuugacaaauuguacauuugggggguucaccacccgaguacggacagugaccaaaccagccuauauguucaagcaucagggagagucacagucucuaccaaaagaagccaacaaacuguaaucccgaauaucgggucuagacccuggguaaggggugucuccagcagaauaagcaucuauuggacaauaguaaaaccgggagacauacuuuugauuaacagcacagggaaucuaauugcuccucgggguuacuucaaaauacgaagugggaaaagcucaauaaugaggucagaugcacccauuggcaacugcaauucugaaugcaucacuccaaauggaagcauucccaaugacaaaccuuuucaaaauguaaacaggaucacauauggggccugucccagauauguuaagcaaaacacucugaaauuggcaacagggaugcggaauguaccagagaaacaaacuagaggcauauucggcgcaaucgcagguuucauagaaaaugguugggagggaaugguagacgguugguacgguuucaggcaucaaaauucugagggcacaggacaagcagcagaucuuaaaagcacucaagcagcaaucaaccaaaucaacgggaaacugaauagguuaaucgagaaaacgaacgagaaauuccaucaaaucgaaaaagaauucucagaaguagaagggagaauucaggaccucgagaaauauguugaagacacuaaaauagaucucuggucuuacaacgcggagcuucuuguugcccuggagaaccaacauacaauugaucuaacugacucagaaaugaacaaacuguuugaaagaacaaggaagcaacugagggaaaaugcugaggacaugggcaaugguugcuucaaaauauaccacaaaugugacaaugccugcauagggucaaucagaaauggaacuuaugaccaugauguauacagagacgaagcauuaaacaaccgguuccagaucaaagguguugagcugaagucaggauacaaagauuggauccuauggauuuccuuugccauaucaugcuuuuugcuuuguguuguuuugcugggguucaucaugugggccugccaaaaaggcaacauuaggugcaacauuugcauuuga

SEQ ID NO: 40833 - RNA, 1701 nt, Artificial Sequence
  derived and/or modified CDS sequence (wt) from hemagglutinin__InfluenzaA__AFJ77473
augaagacuaucauugcuuugagcuacauuuuaugucagguuuucgcucaaaaacuucccggaaaugacaacagcacggcaacgcugugccugggacaccaugcagugccaaacggaacgcuagugaaaacaaucacgaaugaccaaauugaagugacuaaugcuacugagcugguucagaguuccucaacagguagaauaugcgacaguccucaccaaauccuugauggagaaaacugcacacuaauagaugcucuauugggagacccucauugugauggcuuccaaaauaaggaaugggaccuuuuuguugaacgcagcaaagccuacagcaacuguuacccuuaugaugugccggauuaugccucccuuaggucacuaguugccucauccggcacacuggaguuuaacaaugaaagcuucaacuggacuggagucgcucagaauggaacaagcucugcuugcaaaaggagaucuauuaaaaguuucuuuaguagauugaauugguugcaccaauuaaaauacaaauauccagcacugaacgugacuaugccaaacaaugaaaaauuugacaaauuguacauuugggggguucaccacccgaguacggacagugaccaaaucagccuguaugcucaagcaucagggagagucacagucucuaccaaaagaagccaacaaacuguaaucccgaauaucggaucuagacccuggguaaggggugucuccagcagaauaagcaucuauuggacaauaguaaaaccgggagacauacuuuugauuaacagcacagggaaucuaauugcuccucgggguuacuucaaaauacgaagugggaaaagcucaauaaugaggucagaugcacccauuggcaaaugcaauucugaaugcaucacuccaaauggaagcauucccaaugacaaaccauuucaaaauguaaacaggaucacauauggggccugucccagauauguuaagcaaaacacucugaaauuggcaacagggaugcggaauguaccagagaaacaaacuagaggcauauucggcgcaaucgcggguuucauagaaaaugguugggagggaaugguggacgguugguacgguuucaggcaucaaaauucugagggcacaggacaagcagcagaucuuaaaagcacucaagcagcaaucaaccaaaucaacgggaaacugaauagguuaaucgagaaaacgaacgagaaauuccaucaaauugaaaaagaauucucagaaguagaagggagaauucaggaccucgagaaauauguugaggacacuaaaauagaucucuggucguacaacgcggagcuucuuguugcccuggagaaccaacauacaauugaucuaacugacucagaaaugaacaaacuguuugaaagaacaaagaagcagcugagggaaaaugcugaggauaugggcaaugguuguuucaaaauauaccacaaaugugacaaugccugcauagggucaaucagaaauggaacuuaugaccaugauguauacagagacgaagcauuaaacaaccgguuccagaucaaagguguugagcugaagucaggauacaaagauuggauccuauggauuuccuuugccauaucauguuuuuugcuuuguguuguuuugcugggguucaucaugugggccugccaaaaaggcaacauuaggugcaacauuugcauuuga

SEQ ID NO: 40834 - RNA, 1701 nt, Artificial Sequence
  derived and/or modified CDS sequence (wt) from hemagglutinin__InfluenzaA__AFJ77484
augaagacuaucauugcuuugagcuacauuuuaugucugguuuucgcucaaaaacuucccggaaaugacaacagcacggcaacgcugugccugggacaccaugcagugccaaacggaacgcuagugaaaacaaucacgaaugaccaaauugaagugacuaaugcuacugagcugguucagaguuccucaacagguagaauaugcgacaguccucaccaaauccuugauggagaaaacugcacacuaauagaugcucuauugggagacccucauugugauggcuuccaaaauaaggaaugggaccuuuuuguugagcgcagcaaagccuacagcaacuguuacccuuaugaugugccggauuaugccucccuuaggucacuaguugccucauccggcacacuggaguuuaacaaugaaagcuucaauuggacuggagucgcucagaauggaacaagcucugcuugcaaaaggagaucuaauaaaaguuucuuuaguagauugaauugguugcaccaauuaaaauacaaauauccagcacugaacgugacuaugccaaacaaugaaaaauuugacaaauuguacauuugggggguucaccacccgaguacggacagugaccaaaucagccuauaugcucaagcaucagggagagucacagucucuaccaaaagaagccaacaaacuguaaucccgaauaucggaucuagacccuggguaaggggugucuccagcagaauaagcaucuauuggacaauaguaaaaccgggagacauacuuuugauuaacagcacagggaaucuaauugcuccucgggguuacuucaaaauacgaagugggaaaagcucaauaaugaggucagaugcacccauuggcaaaugcaauucugaaugcaucacuccaaauggaagcauucccaaugacaaaccauuucaaaauguaaacaggaucacauauggggccugucccagauauguuaagcaaaacacucugaaauuggcaacagggaugcggaauguaccagagaaacaaacuagaggcauauucggcgcaaucgcggguuucauagaaaaugguugggagggaaugguggacgguugguacgguuucaggcaucaaaauucugagggcacaggacaagcagcagaucuuaaaagcacucaagcagcaaucaaccaaaucaacgggaaacugaauagguuaaucgagaaaacgaacgagaaauuccaucaaauugaaaaagaauucucagaaguagaagggagaauucaggaccucgagaaauauguugaggacacuaaaauagaucucuggucguacaacgcggagcuucuuguugcccuggagaaccaacauacaauugaucuaacugacucagaaaugaacaaacuguuugaaagaacaaagaagcaacugagggaaaaugcugaggauaugggcaaugguuguuucaaaauauaccacaaaugugacaaugccugcauagggucaaucagaaauggaacuuaugaccaugauguauacagagaugaagcauuaaacaaccgguuccagaucaaagguguugagcugaagucaggauacaaagauuggauccuauggauuuccuuugccauaucauguuuuuugcuuuguguuguuuugcugggguucaucaugugggccugccaaaaaggcaacauuaggugcaacauuugcauuuga

SEQ ID NO: 40835 - RNA, 1701 nt, Artificial Sequence; identical to SEQ ID NO: 32200
  derived and/or modified CDS sequence (wt) from hemagglutinin__InfluenzaA__AFJ77495

SEQ ID NO: 40836 - RNA, 1701 nt, Artificial Sequence
  derived and/or modified CDS sequence (wt) from hemagglutinin__InfluenzaA__AFJ77506
augaagacuaucauugcuuugagcuacauuuuaugucugguuuucgcucaaaaacuucccggaaaugacaacagcacggcaacgcugugccugggacaccaugcagugccaaacggaacgcuagugaaaacaaucacgaaugaccaaauugaagugacuaaugcuacugagcugguucagaguuccucaacagguagaauaugcgacaguccccaccaaauccuugauggagaaaacugcacacuaauagaugcucuauugggagacccucauugugauggcuuccaaaauaaggaaugggaccuuuuuguugaacgcagcaaagccuacagcaacuguuacccuuaugaugugccggauuaugccucccuuaggucacuaguugccucauccggcacacuggaguuuaacaaugaaagcuucaauuggacuggagucgcucagaauggaacaagcucugcuugcaaaaggagaucuaauaaaaguuucuuuaguagauugaauugguugcaccaauuaaaauacaaauauccagcacugaacgugacuaugccaaacaaugaaaaauuugacaaauuguacauuugggggguucaccacccgaguacggacagugaccaaaucagccuauaugcucaagcaucagggagagucacagucucuaccaaaagaagccaacaaacuguaaucccgaauaucggaucuagacccuggguaaggggugucuccagcagaauaagcaucuauuggacaauaguaaaaccgggagacauacuuuugauuaacagcacagggaaucuaauugcuccucgggguuacuucaaaauacgaagugggaaaagcucaauaaugaggucagaugcacccauuggcaaaugcaauucugaaugcaucacuccaaauggaagcauucccaaugacaaaccauuucaaaauguaaacaggaucacauauggggccugucccagauauguuaagcaaaacacucugaaauuggcaacagggaugcggaauguaccagagaaacaaacuagaggcauauucggcgcaaucgcggguuucauagaaaaugguugggagggaaugguggacgguugguacgguuucaggcaucaaaauucugagggcacaggacaagcagcagaucuuaaaagcacucaagcagcaaucaaccaaaucaacgggaaacugaauagguuaaucgagaaaacgaacgagaaauuccaucaaauugaaaaagaauucucagaaguagaagggagaauucaggaccucgagaaauauguugaggacacuaaaauagaucucuggucguacaacgcggagcuucuuguugcccuggagaaccaacauacaauugaucuaacugacucagaaaugaacaaacuguuugaaagaacaaagaagcaacugagggaaaaugcugaggauaugggcaaugguuguuucaaaauauaccacaaaugugacaaugccugcauagggucaaucagaaauggaacuuaugaccaugauguauacagagacgaagcauuaaacaaccgguuccagaucaaagguguugagcugaagucaggauacaaagauuggauccuauggauuuccuuugccauaucauguuuuuugcuuuguguuguuuugcugggguucaucaugugggccugccaaaaaggcaacauuaggugcaacauuugcauuuga

SEQ ID NO: 40837 - RNA, 1701 nt, Artificial Sequence
  derived and/or modified CDS sequence (wt) from hemagglutinin__InfluenzaA__AFJ77517
augaagacuaucauugcuuugagcuacauucuaugucugguuuucgcucaaaaaauucccggaaaugacaacagcacggcaacgcugugccugggacaccaugcagugccaaacggaacgcuagugaaaacaaucacgaaugaccaaauugaagugacuaaugcuacugagcugguucagaguuccucaacagguagaauaugcgacaguccucaccgaauccuugauggagaaaacugcacacugauagaugcucuauugggagacccucauugugauggcuuccaaaauaaggaaugggaccuuuuuguugaacgcagcaaagccuacagcaacuguuacccuuaugaugugccggauuaugccucccuuaggucacuaguugccucauccggcacccuggaguuuaacaaugaaagcuucaauuggacuggagucgcucagaauggaacaagcaaugcuugcaaaaggagaucuaugaaaaguuucuuuaguagauugaauugguugcaccaauugaaauacaaauauccagcacugaacgugacuaugccaaacaaugauaaauuugacaaauuguacauuugggggguucaccacccgaguacggacagugaccaaaccagccuauaugcucaagcaucagggagagucacagucucuacccaaagaagccaacaaacuguaaucccgaauaucggaucuagacccuggguaaggggugucuccagcagaauaagcaucuauuggacaauaguaaaaccgggagacauacuuuugauuaacagcacagggaaucuaauugcuccucgggguuacuucaaaauacgaagugggaaaagcucaauaauaaggucagaugcacccauuggaaaaugcaauucugaaugcaucacuccaaauggaagcauucccaaugacaaaccauuucaaaauguaaacaggaucacauauggggccugucccagauauguuaagcaaaacacucugaaauuggcaacagggaugcggaauguaccagagaaacaaacuagaggcauauucggcgcaaucgcagguuucauagaaaaugguugggagggaaugguagacgguugguacgguuucaggcaucaaaauucugaaggcacaggacaagcagcagaucuuaaaagcacucaagcagcaaucaaccaaaucaacgggaaacugaauagguuaaucgagaaaacgaacgagaaauuccaucaaauugaaaaagaauucucagaaguagaagggagaauucaggaccucgagaaauauguugaggacacuaaaauagaucucuggucguacaacgcggagcuucuuguugcccuggagaaccaacauacaauugaucuaacugacucagaaaugaacaaacuguuugaaagaacaaggaagcaacugagggaaaaugcugaggauaugggcaaugguuguuucaaaauauaccacaaaugugacaaugccugcauagggucaaucagaaauggaacuuaugaccaugauguauacagagacgaagcauuaaacaaccgguuccagaucaaagguguugagcugaagucaggauacaaagauuggauccuauggauuuccuuugccaugucauguuuuuugcuuuguguuguuuugcugggguucaucaugugggccugccaaaaaggcaacauuaggugcaacauuugcauuuga

SEQ ID NO: 40838 - RNA, 1701 nt, Artificial Sequence
  derived and/or modified CDS sequence (wt) from hemagglutinin__InfluenzaA__AFJ77528
augaagacuaucauugcuuugagcuacauuuuaugucugguuuucgcccaaaaacuucccggaaaugacaacagcacggcaacgcugugccugggacaccaugcagugccaaacggaacgcuagugaaaacaaucacgaaugaccaaauugaagugacuaaugcuacugagcugguucagaguuccucaacagguagaauaugcgacaguccucaccaaauccuugauggaaaaaacugcacacugauagaugcucuauugggagacccucauugugauggcuuccaaaauaaggaaugggaccuuuuuguugaacgcagcacagcuuacagcaacuguuacccuuaugaugugccggauuaugccucccuuaggucacuaguugccucauccggcacccuggaguuuaccaaagaaggcuucaauuggacuggagucgcucaggauggaacaagcuaugcuugcaaaaggggaucuguuaaaaguuucuuuaguagauugaauugguugcacaaauuagaauacaaauauccagcacugaacgugacuaugccaaacaaugacaaauuugacaaauuguacauuugggggguucaccacccgaguacggacagugaccaaaccagccuauauguucaagcaucagggagagucacagucucuaccaaaagaagccaacaaacuguaaucccgaauaucgggucuagacccuggguaaggggugucuccagcagaauaagcaucuauuggacaauaguaaaaccgggagacauacuuuugauuaacagcacagggaaucuaauugcuccucgggguuacuucaaaauacgaagugggaaaagcucaauaaugaggucggaugcacccauugacaacugcaauucugaaugcaucacuccaaauggaagcauucccaaugacaaaccuuuucaaaauguaaacaggaucacauauggggccugucccagauauguuaagcaaaacacucugaaauuggcaacagggaugcggaauguaccagagaaacaaacuagaggcauauucggcgcaaucgcagguuucauagaaaaugguugggagggaaugguagacgguugguacgguuucaggcaucaaaauucugagggcacaggacaagcagcagaucuuaaaagcacucaagcagcaaucaaccaaaucaacgggaaacugaauagguuaaucgagaaaacgaacgagaaauuccaucaaaucgaaaaagaauucucagaaguagaagggagaauucaggaccucgagaaauauguugaagacacuaaaauagaucucuggucuuacaacgcggagcuucuuguugcccuggagaaccaacauacaauugaucuaacugacucagaaaugaacaaacuguuugaaagaacaagaaagcaacugagggaaaaugcugaggacaugggcaaugguugcuucaaaauauaccacaaaugugacaaugccugcauagggucaaucagaaauggaacuuaugaccaugauguauacagagacgaagcauuaaacaaccgguuccagaucaaagguguugaguugaagucaggauacaaagauuggauccuauggauuuccuuugccauaucaugcuuuuugcuuuguguuguuuugcugggguucaucaugugggccugccaaaaaggcaacauuaggugcaacauuugcauuuga

SEQ ID NO: 40839 - RNA, 1698 nt, Artificial Sequence
  derived and/or modified CDS sequence (wt) from hemagglutinin__InfluenzaA__AFJ77550
augaagacuaucauugcuuugagcuacauuuuaugucagguuuucgcucaaaaacuucccggaaaugacaacagcacggcaacgcugugccugggacaccaugcagugccaaacggaacgcuagugaaaacaaucacgaaugaccaaauugaagugacuaaugcuacugagcugguucagaguuccucaacggguagaauaugcgacaguccucaccaaauccuugauggagaaaacugcacacuaauagaugcucuauugggagacccucauugugauggcuuccaaaauaaggaaugggaccuuuuuguugaacgcagcaaagcauacagcaacuguuacccuuaugaugugccggauuaugccucccuuaggucacuaguugccucauccggcacacuggaguuuaacaaugaaagcuucaacuggacuggagucgcucagaauggaacaagcucugcuugcaaaaggagaucuauuaaaaguuucuuuaguagauugaauugguugcaccaauuaaaauacaaauauccagcacugaacgugacuaugccaaacaaugaaaaauuugacaaauuguacauuugggggguucaccacccgaguacggacagugaccaaaucagccuguaugcucaagcaucagggagagucacagucucuaccaaaagaagccaacaaacuguaaucccaaauaucggaucuagacccuggguaaggggugucuccagcagaauaagcaucuauuggacaauaguaaaaccgggagacauacuuuugauuaacagcacagggaaucuaauugcuccucgggguuacuucaaaauacgaagugggaaaagcucaauaaugaggucagaugcacccauuggcaaaugcaauucugaaugcaucacuccaaauggaagcauucccaaugacaaaccauuucaaaauguaaacaggaucacauauggggccugucccagauauguuaagcaaaacacucugaaauuggcaacagggaugcggaauguaccagagaaaacuagaggcauauucggcgcaaucgcggguuucauagaaaaugguugggagggaaugguggacgguugguacgguuucaggcaucaaaauucugagggcacaggacaagcagcagaucuuaaaagcacucaagcagcaaucaaccaaaucaacgggaaacugaauagguuaaucgagaaaacgaacgagaaauuccaucaaauugaaaaagaauucucagaaguagaagggagaauucaggaccucgagaaauauguugaggacacuaaaauagaucucuggucguacaacgcggagcuucuuguugcccuggagaaccaacauacaauugaucuaacugacucagaaaugaacaaacuguuugaaagaacaaagaagcagcugagggaaaaugcugaggauaugggcaaugguuguuucaaaauauaccacaaaugugacaaugccugcauagggucaaucagaaauggaacuuaugaccaugauguauacagagacgaagcauuaaacaaccgguuccagaucaaagguguugagcugaagucaggauacaaagauuggauccuauggauuuccuuugccauaucauguuuuuugcuuuguguuguuuugcugggguucaucaugugggccugccaaaaaggcaacauuaggugcagcauuugcauuuga

SEQ ID NO: 40840 - RNA, 1701 nt, Artificial Sequence
  derived and/or modified CDS sequence (wt) from hemagglutinin__InfluenzaA__AFJ77561
augaagacuaucauugcuuugagcuacauuuuaugucugguuuucgcucaaaaacuucccggaaaugacaacagcacggcaacgcugugccugggacaccaugcagugccaaacggaacgcuagugaaaacaaucacgaaugaccaaauugaagugacuaaugcuacugagcugguucagaguuccucaacagguagaauaugcgacaguccucaccgaauccuugauggaaaaaacugcacacugauagaugcucuauugggagacccucauugugauggcuuccaaaauaaggaaugggaccuuuuuguugaacgcagcaaagcuuacagcaacuguuacccuuaugaugugccggauuaugccucccuuaggucacuaguugccucauccggcacccuggaguuuaacaaugaaagcuucaauuggacuggagucgcucagaauggaacaagcuaugcuugcaaaaggagaucuguuaaaaguuucuuuaguagauugaauugguugcacaaauuagaauacaaauauccagcacugaacgugacuaugccaaacaaugacaaauuugacaaauuguacauuugggggguucaccacccgaguacggacagugaccaaaccagccuauaugcucaagcaucagggagagucacagucucuaccaaaagaagccaacaaacuguaaucccgaauaucggaucaagacccuggguaagggguguuuccagcagaauaagcaucuauuggacaauaguaaagccgggagacauacuuuugauuuacagcacagggaaucuaauugcuccucgggguuacuucaaaauacgaagugggaaaagcucaauaaugaggucagaugcacccauuggcaacugcaguucugaaugcaucacuccaaauggaagcauucccaaugacaaaccauuucaaaauguaaacaggaucacauauggggccugucccagauauguuaagcaaaacacucugaaacuggcaacagggaugcggaauguaccagagaaacaaacuagaggcauauucggcgcaaucgcagguuucauagaaaaugguugggagggaaugguagacgguugguacgguuucaggcaucaaaauucugagggcacaggacaagcagcagaucuuaaaagcacucaagcagcaaucaaccaaaucaacgggaaacugaauagguugaucgagaaaacgaacgagaaauuccaucaaaucgaaaaagaauucucagaaguagaagggagaauucaggaccucgagaaauauguugaagacacuaaaauagaucucuggucguacaacgcggagcuucuuguugcccuggagaaccaacauacaauugaucuaacugacucagaaaugaacaaacuguuugaaagaacaaggaagcaacugagggaaaaugcugaggacaugggcaaugguugcuucaaaauauaccacaaaugugacaaugccugcauagggucaaucagaaauggaacuuaugaccaugauguauacagagacgaagcauuaaacaaccgguuccagaucaaagguguugagcugaagucaggauacaaagauuggauccuauggauuuccuuugccauaucauguuuuuugcuuuguguuguuuugcugggguucaucaugugggccugccaaaaaggcaacauuaggugcaacauuugcauuuga

SEQ ID NO: 40841 - RNA, 1698 nt, Artificial Sequence
  derived and/or modified CDS sequence (wt) from hemagglutinin__InfluenzaA__AFJ77572
augaagacuaucauugcuuugagcuacauuuuaugucagguuuucgcucaaaaacuucccggaaaugacaacagcacggcaacgcugugccugggacaccaugcagugccaaacggaacgcuagugaaaacaaucacgaaugaccaaauugaagugacuaaugcuacugagcugguucagaguuccucaacggguagaauaugcgacaguccucaccaaauccuugauggagaaaacugcacacuaauagaugcucuauugggagacccucauugugauggcuuccaaaauaaggaaugggaccuuuuuguugaacgcagcaaagcauacagcaacuguuacccuuaugaugugccggauuaugccucccuuaggucacuaguugccucauccggcacacuggaguuuaacaaugaaagcuucaacuggacuggagucgcucagaauggaacaagcucugcuugcaaaaggagaucuauuaaaaguuucuuuaguagauugaauugguugcaccaauuaaaauacaaauauccagcacugaacgugacuaugccaaacaaugaaaaauuugacaaauuguacauuugggggguucaccacccgaguacggacagugaccaaaucagccuguaugcucaagcaucagggagagucacagucucuaccaaaagaagccaacaaacuguaaucccaaauaucggaucuggacccuggguaaggggugucuccagcagaauaagcaucuauuggacaauaguaaaaccgggagacauacuuuugauuaacagcacagggaaucuaauugcuccucgggguuacuucaaaauacgaagugggaaaagcucaauaaugaggucagaugcacccauuggcaaaugcaauucugaaugcaucacuccaaauggaagcauucccaaugacaaaccauuucaaaauguaaacaggaucacauauggggccugucccagauauguuaagcaaaacacucugaaauuggcaacagggaugcggaauguaccagagaaaacuagaggcauauucggcgcaaucgcggguuucauagaaaaugguugggagggaaugguggacgguugguacgguuucaggcaucaaaauucugagggcacaggacaagcagcagaucuuaaaagcacucaagcagcaaucaaccaaaucaacgggaaacugaauagguuaaucgagaaaacgaacgagaaauuccaucaaauugaaaaagaauucucagaaguagaagggagaauucaggaccucgagaaauauguugaggacacuaaaauagaucucuggucguacaacgcggagcuucuuguugcccuggagaaccaacauacaauugaucuaacugacucagaaaugaacaaacuguuugaaagaacaaagaagcagcugagggaaaaugcugaggauaugggcaaugguuguuucaaaauauaccacaaaugugacaaugccugcauagggucaaucagaaauggaacuuaugaccaugauguauacagagacgaagcauuaaacaaccgguuccagaucaaagguguugagcugaagucaggauacaaagauuggauccuauggauuuccuuugccauaucauguuuuuugcuuuguguuguuuugcugggguucaucaugugggccugccaaaaaggcaacauuaggugcagcauuugcauuuga

SEQ ID NO: 40842 - RNA, 1701 nt, Artificial Sequence
  derived and/or modified CDS sequence (wt) from hemagglutinin__InfluenzaA__AFJ77583
augaagacuaucauuacuuugagcuacauuuuaugucugguuuucgcucaaaaacuucccguaaaggacaacagcacggcaacgcugugccugggacaccaugcagugccaaacggaacgcuagugaaaacaaucacgaaugaccacauugaagugacuaaugcuacugagcugguucagaguuccucaacagguagaauaugcgacaguccucaccaaauccuugauggagaaaacugcacacuaauagaugcucuauugggagacccucauugugauggcuuccaaaauaaggaaugggaccuuuuuguugaacgcagcacagccuacagcaacuguuacccuuaugaugugccggacuaugccucccuuaggucacuaguugccucauccggcacacuggaguuuaacaaugaaagcuucaauuggacuggagucgcucagaauggaacaagcucugcuugcaaaaggagaucuauuaaaaguuucuuuaguagauugaauugguugcaccaauuaaaauacaaauauccagcacugaacgugacuaugccaaacaaugaaaaauuugacaaauuguacauuugggggguucaccacccgaguacggacagugaccaaaucagccuauaugcucaagcaucagggagagucacagucucuaccaaaagaagccaacaaacuguaaucccgaauaucggaucuagacccuggguaaggggugucuccagcagaauaagcaucuauuggacaauaguaaaaccgggagacauacuuuugauuaacagcacagggaaucuaauugcuccucgggguuacuucaaaauacgaagugggaaaagcucaauaaugaggucaaaugcacccauuggcaaaugcaauucugaaugcaucacuccaaauggaagcauucccaaugacaaaccauuucaaaauguaaacaggaucacauauggggccuguccuagauauguuaagcaaaacacucugaaauuggcaacagggaugcggaauguaccagagaaacaaacuagaggcauauucggcgcaaucgcggguuucauagaaaaugguugggagggaaugguggacgguugguacgguuucaggcaucaaaauucugagggcacaggacaagcagcagaucuuaaaagcacucaagcagcaaucaaccaaaucaacgggaaacugaauagguuaaucgagaaaacaaacgagaaauuccaucaaauugaaaaagaauucucagaaguagaagggagaauucaggaccucgagaaauauguugaggacacuaaaauagaucucuggucguacaacgcggagcuucuuguugcccuggagaaccaacauacaauugaucuaacugacucagaaaugaacaaacuguuugaaagaacaaggaagcaacugagggaaaaugcugaggauaugggcaaugguuguuucaaaauauaccacaaaugugacaaugccugcauagggucaaucagaaauggaacuuaugaccaugauguauacagagacgaagcauuaaacaaccgguuccagaucaaagguguugagcugaagucaggauacaaagauuggauccuauggauuuccuuugccauaucauguuuuuugcuuuguguuguuuugcugggguucaucaugugggccugccaaaaaggcaacauuaggugcaacauuugcauuuga

SEQ ID NO: 40843 - RNA, 1701 nt, Artificial Sequence
  derived and/or modified CDS sequence (wt) from hemagglutinin__InfluenzaA__AFJ77594
augaagacuaucauugcuuugagcuacauuuuaugucugguuuucgcucaaaaacuucccguaaaggacaacagcacggcaacgcugugccugggacaccaugcagugccaaacggaacgcuagugaaaacaaucacgaaugaccacauugaagugacuaaugcuacugagcugguucagaguuccucaacagguagaauaugcgacaguccucaccaaauccuugauggagaaaacugcacacuaauagaugcucuauugggagacccucauugugauggcuuccaaaauaaggaaugggaccuuuuuguugaacgcagcacagccuacagcaacuguuacccuuaugaugugccggauuaugccucccuuaggucacuaguugccucauccggcacacuggaguuuaacaaugaaagcuucaauuggacuggagucgcucagaauggaacaagcucugcuugcaaaaggagaucuauuaaaaguuucuuuaguagauugaauugguugcaccaauuaaaauacaaauauccagcacugaacgugacuaugccaaacaaugaaaaauuugacaaauuguacauuugggggguucaccacccgaguacggacagugaccaaaucagccuauaugcucaagcaucagggagagucacagucucuaccaaaagaagccaacaaacuguaaucccgaauaucggaucuagacccuggguaaggggugucuccagcagaauaagcaucuauuggacaauaguaaaaccgggagacauacuuuugauuaacagcacagggaaucuaauugcuccucgggguuacuucaaaauacgaagugggaaaagcucaauaaugaggucaaaugcacccauuggcaaaugcaauucugaaugcaucacuccaaauggaagcauucccaaugacaaaccauuucaaaauguaaacaggaucacauauggggccugucccagauauguuaagcaaaacacucugaaauuggcaacagggaugcggaauguaccagagaaacaaacuagaggcauauucggcgcaaucgcggguuucauagaaaaugguugggagggaaugguggacgguugguacgguuucaggcaucaaaauucugagggcacaggacaagcagcagaucuuaaaagcacucaagcagcaaucaaccaaaucaacgggaaacugaauagguuaaucgagaaaacaaacgagaaauuccaucaaauugaaaaagaauucucagaaguagaagggagaauucaggaccucgagaaauauguugaggacacuaaaauagaucucuggucguacaacgcugagcuucuuguugcccuggagaaccaacauacaauugaucuaacugacucagaaaugaacaaacuguuugaaagaacaaggaagcaacugagggaaaaugcugaggauaugggcaaugguuguuucaaaauauaccacaaaugugacaaugccugcauagggucaaucagaaauggaacuuaugaccaugauguauacagagacgaagcauuaaacaaccgguuccagaucaaagguguugagcugaagucaggauacaaagauuggauccuauggauuuccuuugccauaucauguuuuuugcuuuguguuguuuugcugggguucaucaugugggccugccaaaaaggcaacauuaggugcaacauuugcauuuga

SEQ ID NO: 40844 - RNA, 1701 nt, Artificial Sequence
  derived and/or modified CDS sequence (wt) from hemagglutinin__InfluenzaA__AFJ77605
augaaaacuaucauugcuuugagcuacauuuuaugucugauuuucgcucaaaaacuucccggaaaugacaacagcacggcaacgcugugccugggacaccaugcagugccaaacggaacgcuagugaaaacaaucacgaaugaccaaauugaagugacuaaugcuacugagcugguucagaguuccucaacagguaaaauaugcgacaguccucaccaaauccuugauggagaaaacugcacacuaauagaugcucuauugggagacccucauugugauggcuuccaaaauaaggaaugggaccuuuuuguugaacgcagcaaagccuacagcaacuguuacccuuaugaugugccggauuaugccucccuuaggucacuaguugccucauccggcacacuggaguuuaacaaugaaagcuucaauuggacuggagucgcucagaauggaacaagcucugcuugcaaaaggagaucuaauaaaaguuucuuuaguagauugaauugguugcaccaauuaaaauacaaauauccagcacugaacgugaccaugccaaacaaugaaaaauuugacaaauuguacauuugggggguucaccacccgaguacggacagugaccaaaucagccuauaugcucaagcaucagggagagucacagucucuaccaaaagaagccaacaaacuguaaucccgaauaucggaucuagacccuggguaaggggugucuccagcagaauaagcaucuauuggacaauaguaaaaccgggagacauacuuuugauuaacagcacagggaaucuaauugcuccucgggguuacuucaaaauacgaagugggaaaagcucaauaaugaggucagaugcacccauuggcaaaugcaauucugaaugcaucacuccaaauggaagcauucccaaugacaaaccauuucaaaauguaaacaggaucacauauggggccugucccagauauguuaagcaaaacacucugaaauuggcaacagggaugcggaauguaccagagaaacaaacuagaggcauauucggcgcaaucgcggguuucauagaaaaugguugggaggggaugguggacgguugguacgguuucaggcaucaaaauucugagggcacaggacaagcagcagaucuuaaaagcacucaagcagcaaucaaccaaaucaacgggaaacugaauagguuaaucgagaaaacgaacgagaaauuccaucaaauugaaaaagaauucucagaaguagaagggagaauucaggaccucgagaaauauguugaggacacuaaaauagaucucuggucguacaacgcggagcuucuuguugcccuggagaaccaacauacaauugaucuaacugacucagaaaugaacaaacuguuugaaagaacaaagaagcaacugagggaaaaugcugaggauaugggcaaugguuguuucaaaauauaccacaaaugugacaaugccugcauagggucaaucagaaauggaacuuaugaccaugauguauacagagacgaagcaguaaacaaucgguuucagaucaaagguguugagcugaagucaggauacaaagauuggauccuauggauuuccuuugccauaucauguuuuuugcuuuguguuguuuugcugggguucaucaugugggccugccaaaaaggcaacauuaggugcaacauuugcauuuga

SEQ ID NO: 40845 - RNA, 1701 nt, Artificial Sequence
  derived and/or modified CDS sequence (wt) from hemagglutinin__InfluenzaA__AFJ77616
augaagacuaucauugcuuugagcuacauuuuauguaugguucucgcucaaaaacuucccguaaaggacaacagcacggcaacgcugugccugggacaccaugcagugccaaacggaacgcuagugaaaacaaucacgaaugaccacauugaagugacuaaugcuacugagcugguucagaguuccucaacagguagaauaugcgacaguccucaccaaauccuugauggagaaaacugcacacuaauagaugcucuauugggagacccucauugugauggcuuccaaaauaaggaaugggaccuuuuuguugaacgcagcacagccuacagcaacuguuacccuuaugaugugccggauuaugccucccuuaggucacuaguugccucauccggcacacuggaguuuaacaaugaaagcuucaauuggacuggagucgcucagaauggaacaagcucugcuugcaaaaggagaucuauuaaaaguuucuuuaguagauugaauugguugcaccaauuaaaauacaaauauccagcacugaacgugacuaugccaaacaaugaaaaauuugacaaauuguacauuugggggguucaccacccgaguacggacagugaccaaaucagccuauaugcucaagcaucagggagagucacagucucuaccaaaagaagccaacaaacuguaaucccgaauaucggaucuagacccuggguaaggggugucuccagcagaauaagcaucuauuggacaauaguaaaaccgggagacauacuuuugauuaacagcacagggaaucuaauugcuccucgggguuacuucaaaauacgaagugggaaaagcucaauaaugaggucaaaugcauccauuggcaaaugcaauucugaaugcaucacuccaaauggaagcauucccaaugacaaaccauuucaaaauguaaacaggaucacauauggggccugucccagauauguuaagcaaaacacucugaaauuggcaacagggaugcggaauguaccagagaaacaaacuagaggcauauucggcgcaaucgcgggcuucauagaaaaugguugggagggaaugguggacgguugguacgguuucaggcaucaaaauucugagggcacaggacaagcagcagaucuuaaaagcacucaagcagcaaucaaccaaaucaacgggaaacugaauagguuaaucgagaaaacaaacgagaaauuccaucaaauugaaaaagaauucucagaaguagaagggagaauucaggaccucgagaaauauguugaggacacuaaaauagaucucuggucguacaacgcggagcuucuuguugcccuggagaaccaacauacaauugaucuaacugacucagaaaugaacaaacuguuugaaagaacaaggaagcaacugagggaaaaugcugaggauaugggcaaugguuguuucaaaauauaccacaaaugugacaaugccugcauagggucaaucagaaauggaacuuaugaccaugauguauacagagacgaagcauuaaacaaccgguuccagaucaaagguguugagcugaagucaggauacaaagauuggauccuauggauuuccuuugccauaucauguuuuuugcuuuguguuguuuugcugggguucaucaugugggccugccaaaaaggcaacauuaggugcaacauuugcauuuga

SEQ ID NO: 40846 - RNA, 1701 nt, Artificial Sequence
  derived and/or modified CDS sequence (wt) from hemagglutinin__InfluenzaA__AFJ77627
augaagacuaucauugcuuugagcuacauuuuaugucugguucucgcucaaaaacuucccguaaaggacaacagcacggcaacgcugugccugggacaccaugcagugccaaacggaacgcuagugaaaacaaucacgaaugaccacauugaagugacuaaugcuacugagcugguucagaguuccucaacagguagaauaugcgacaguccucaccaaauccuugauggagaaaacugcacacuaauagaugcucuauugggagacccucauugugauggcuuccaaaauaaggaaugggaccuuuuuguugaacgcagcacagccuacagcaacuguuacccuuaugaugugccggauuaugccucccuuaggucacuaguugccucauccggcacacuggaguuuaacaaugaaagcuucaauuggacuggagucgcucagaauggaacaagcucugcuugcaaaaggagaucuauuaaaaguuucuuuaguagauugaauugguugcaccaauuaaaauacaaauauccagcacugaacgugacuaugccaaacaaugaaaaauuugacaaauuguacauuugggggguucaccacccgaguacggacagugaccaaaucagccuauaugcucaagcaucagggagagucacagucucuaccaaaagaagccaacaaacuguaaucccgaauaucggaucuagacccuggguaaggggugucuccagcagaauaagcaucuauuggacaauaguaaaaccgggagacauacuuuugauuaacagcacagggaaucuaauugcuccucgggguuacuucaaaauacgaagugggaaaagcucaauaaugaggucaaaugcauccauuggcaaaugcaauucugaaugcaucacuccaaauggaagcauucccaaugacaaaccauuucaaaauguaaacaggaucacauauggggccugucccagauauguuaagcaaaacacucugaaauuggcaacagggaugcggaauguaccagagaaacaaacuagaggcauauucggcgcaaucgcggguuucauagaaaaugguugggagggaaugguggacgguugguacgguuucaggcaucaaaauucugagggcacaggacaagcagcagaucuuaaaagcacucaagcagcaaucaaccaaaucaacgggaaacugaauagguuaaucgagaaaacaaacgagaaauuccaucaaauugaaaaggaauucucagaaguagaagggagaauucaggaccucgagaaauauguugaggacacuaaaauagaucucuggucguacaacgcggagcuucuuguugcccuggagaaccaacauacaauugaucuaacugacucagaaaugaacaaacuguuugaaagaacaaggaagcaacugagggaaaaugcugaggauaugggcaaugguuguuucaaaauauaccacaaaugugacaaugccugcauagggucaaucagaaauggaacuuaugaccaugauguauacagagacgaagcauuaaacaaccgguuccagaucaaagguguugagcugaagucaggauacaaagauuggauccuauggauuuccuuugccauaucauguuuuuugcuuuguguuguuuugcugggguucaucaugugggccugccaaaaaggcaacauuaggugcaacauuugcauuuga

SEQ ID NO: 40847 - RNA, 1701 nt, Artificial Sequence
  derived and/or modified CDS sequence (wt) from hemagglutinin__InfluenzaA__AFJ77638
augaagacuaucauugcuuugagcuacauuuuaugucugguuuucgcucaaaaacuucccggaaaugacaacagcacggcaacgcugugccuggggcaccaugcaguaccaaacggaacgcuagugaaaacaaucacgaaugaccaaauugaagugacuaaugcuacugagcugguucagaguuccucaacagguagaauaugcgacaguccucaccaaauccuugauggagaaaacugcacacuaauagaugcucuauugggagacccucauugugauggcuuccaaaauaaggaaugggaccuuuuuguugaacgcagcaaagccuacagcaacuguuacccuuaugaugugccggauuaugccucccuuaggucacuaguugccucauccggcacacuggaguuuaacaaugaaagcuucaauuggacuggagucgcucagaauggaacaagcucugcuugcaaaaggagaucuaauaaaaguuucuuuaguagauugaauugguugcaccaauuaaaauacaaauauccagcacugaacgugacuaugccaaacaaugaaaaauuugacaaauuauacauuugggggguucaccacccgaguacggacagugaccaaaucagccuauaugcucaagcaucagggagagucacagucucuaccaaaagaagccaacaaacuguaaucccgaauaucggaucuagacccuggguaaggggugucuccagcagaauaagcaucuauuggacaauaguaaaaccgggagacauacuuuugauuaacagcacagggaaucuaauugcuccucgggguuacuucaaaauacgaagugggaaaagcucaauaaugagaucagaugcacccauuggcaaaugcaauucugaaugcaccacuccaaauggaagcauucccaaugacaaaccauuucaaaauguaaacaggaucacauauggggccugucccagauauguuaagcaaaacacucugaaauuggcaacagggaugcggaauguaccagagaaacaaacuagaggcauauucggcgcaaucgcggguuucauagaaaauggaugggagggaaugguggacgguugguacgguuucaggcaucaaaauucugagggcacaggacaagcagcagaucuuaaaagcacucaagcagcaaucaaccaaaucaacgggaaacugaauagguuaaucgggaaaacgaacgagaaauuccaucaaauugaaaaagaauucucagaaguagaagggagaauucaggaccucgagaaauauguugaggacacuaaaauagaucucuggucguacaacgcggagcuucuuguugcccuggagaaccaacauacaauugaucuaacugacucagaaaugaacaaacuguuugaaagaacaaagaagcaacugagggaaaaugcugaggauaugggcaaugguuguuucaaaauauaccacaaaugugacaaugccugcauagggucaaucagaaauggaacuuaugaccaugauguauacagagacgaagcauuaaacaaccgguuccagaucaaagguguugagcugaagucaggauacaaagauuggauccuauggauuuccuuugccauaucauguuuuuugcuuuguguuguuuugcugggguucaucaugugggccugccaaaaaggcaacauuaggugcaacauuugcauuuga

SEQ ID NO: 40848 - RNA, 1701 nt, Artificial Sequence
  derived and/or modified CDS sequence (wt) from hemagglutinin__InfluenzaA__AFJ77649
augaagacuaucauugcuuugagcuacauuuuaugucugguuuucgcucaaaaacuucccggaaaugacaacagcacggcaacgcugugccuggggcaccaugcaguaccaaacggaacgcuagugaaaacaaucacgaaugaccaaauugaagugacuaaugcuacugagcugguucagaguuccucaacagguagaauaugcgacaguccucaccaaauccuugauggagaaaacugcacacuaauagaugcucuauugggagacccucauugugauggcuuccaaaauaaggaaugggaccuuuuuguugaacgcagcaaagccuacagcaacuguuacccuuaugaugugccggauuaugccucccuuaggucacuaguugccucauccggcacacuggaguuuaacaaugaaagcuucaauuggacuggaguagcucagaauggaacaagcucugcuugcaaaaggagaucuaauaaaaguuucuuuaguagauugaauugguugcaccaauuaaaauacaaauauccagcacugaacgugacuaugccaaacaaugaaaaauuugacaaauuguacauuugggggguucaccacccgaguacggacagugaccaaaucagccuauaugcucaagcaucagggagagucacagucucuaccaaaagaagccaacaaacuguaaucccgaauaucggaucuagacccuggguaaggggugucuccagcagaauaagcaucuauuggacaauaguaaaaccgggagacauacuuuugauuaacaacacagggaaucuaauugcuccucgggguuacuucaaaauacgaaaugggaaaagcucaauaaugagaucagaugcacccauuggcaaaugcaauucugaaugcaucacuccaaauggaagcauucccaaugacaaaccauuucaaaauguaaacaggaucacauauggggccugucccagauauguuaagcaaaacacucugaaauuggcaacagggaugcggaauguaccagagaaacaaacuagaggcauauucggcgcaaucgcggguuucauagaaaaugguugggagggaaugguggacgguugguacgguuucaggcaucaaaauucugagggcacaggacaagcagcagaucuuaaaagcacucaagcagcaaucaaccaaaucaacgggaaacugaauagguuaaucgggaaaacgaacgagaaauuccaucaaauugaaaaagaauucucagaaguagaagggagaauucaggaccucgagaaauauguugaggacacuaaaauagaucucuggucguacaacgcggagcuucuuguugcccuggagaaccaacauacaauugaucuaacugacucagaaaugaacaaacuguuugaaagaacaaagaagcaacugagggaaaaugcugaggauaugggcaaugguuguuucaaaauauaccacaaaugugacaaugccugcauagggucaaucagaaauggaacuuaugaccaugauguauacagagacgaagcauuaaacaaccgguucaagaucaaagguguugagcugaagucaggauacaaagauuggauccuauggauuuccuuugccauaucauguuuuuugcuuuguguuguuuugcugggguucaucaugugggccugccaaaaaggcaacauuaggugcaacauuugcauuuga

SEQ ID NO: 40849 - RNA, 1701 nt, Artificial Sequence
  derived and/or modified CDS sequence (wt) from hemagglutinin__InfluenzaA__AFJ77660
augaagacuaucauugcuuugagcuacauuuuaugucugguuuucgcucaaaaacuucccggaaaugacaacagcacggcaacgcugugccuaggacaccaugcagugccaaacggaacgcuagugaaaacaaucacgaaugaccaaauugaagugacuaaugcuacugagcugguucagaguuccucaacagguagaauaugcgacaguccucaccgaauccuugauggagaaaacugcacacugauagaugcucuauugggagacccucauugugauggcuuccaaaauaaggaaugggaccuuuuuguugaacgcagcaaagccuacagcaacuguuacccuuaugaugugccggauuaugccucccuuaggucacuaguugccucauccggcacccuggaguuuaacaaugaaagcuucaauuggacuggagucgcucagaauggaacaagcucugcuugcaaaaggagaucuauuaaaaguuucuuuaguagauuaaauugguugcaccaauuaaaauacaaauauccagcacugaacgugacuaugccaaacaaugacaaauuugacaaauuguacauuugggggguucaccacccgaguacggacagugaccaaaccagccuauaugcucaagcaucagggagagucacagucucuaccaaaagaagccaacaaacuguaaucccgaauaucggaucuagacccuggguaaggggugucuccagcagaauaagcaucuauuggacaauaguaaaaccgggagacauacuuuugauuaacagcacagggaaucuaauugcuccucgggguuacuucaaaauacgaagugggaaaagcucaauaaugaggucagaugcacccauuggcaaaugcaauucugaaugcaucacuccaaauggaagcauucccaaugacaaaccauuucaaaauguaaacaggaucacauauggggccugucccagauauguuaagcaaaacacucugaaauuggcaacagggaugcgaaauguaccagagaaacaaacuagaggcauauucggcgcaaucgcggguuucauagaaaaugguugggagggaaugguggacgguugguacgguuucaggcaucaaaauucugagggcacaggacaagcagcagaucuuaaaagcacucaagcagcaaucaaccaaaucaacgggaaacugaauagguuaaucgagaaaacgaacgagaaauuccaucaaauugaaaaagaauucucagaaguagaagggagaauucaggaccucgagaaauauguugaggacacuaaaauagaucucuggucguacaacgcggagcuucuuguugcccuggagaaccaacauacaauugaucuaacugacucagaaaugaacaaacuguuugaaagaacaaggaagcaacugagggaaaaugcugaggauaugggcaaugguuguuucaaaauauaccacaaaugugacaaugccugcauagggucaaucagaaauggaacuuaugaccaugauguauacagagacgaagcauuaaacaaccgguuccagaucaaagguguugagcugaagucaggauacaaagauuggauccuauggauuuccuuugccauaucauguuuuuugcuuuguguuguuuugcugggguucaucaugugggccugccaaaaaggcaacauuaggugcaacauuugcauuuga

SEQ ID NO: 40850 - RNA, 1701 nt, Artificial Sequence
  derived and/or modified CDS sequence (wt) from hemagglutinin__InfluenzaA__AFJ77671
augaagacuaucauugcuuugagcuacauuuuaugucugguuuucgcucaaaaacuucccggaaaugacaacagcacggcaacgcugugccugggacaccaugcagugccaaacggaacgcuagugaaaacaaucacgaaugaccaaauugaagugacuaaugcuacugagcugguucagaguuccucaacagguagaauaugcgacaguccucaccgaauccuugauggagaaaacugcacacugauagaugcucuauugggagacccucauugugauggcuuccaaaauaaggaaugggaccuuuuuguugaacgcagcaaagccuacagcaacuguuacccuuaugaugugccggauuaugccucccuuaggucacuaguugccucauccggcacccuggaguuuaacaaugaaagcuucaauuggacuggagucgcucagaauggaacaagcucugcuugcaaaaggagaucuauuaaaaguuucuuuaguagauugaauugguugcaccaauuaaaauacaaauauccagcacugaacgugacuaugccaaacaaugacaaauuugacaaauuguacauuugggggguucaccacccgaguacggacagugaccaaaccagccuauaugcucaagcaucagggagagucacagucucuaccaaaagaagccaacaaacuguaaucccgaauaucggaucuagacccuggguaaggggugucuccagcagaauaagcaucuauuggacaauaguaaaaccgggagacauacuuuugauuaacagcacagggaaucuaauugcuccucgggguuacuucaaaauacgaagugggaaaagcucaauaaugaggucagaugcacccauuggcaaaugcaauucugaaugcaucacuccaaauggaagcauucccaaugacaaaccauuucaaaauguaaacaggaucacauauggggccugucccagauauguuaagcaaaacacucugaaauuggcaacagggaugcggaauguaccagagaaacaaacuagaggcauauucggcgcaaucgcggguuucauagaaaaugguugggagggaaugguggacgguugguacgguuucaggcaucaaaauucugagggcacaggacaagcagcagaucuuaaaagcacucaagcagcaaucaaccaaaucaacgggaaacugaauagguuaaucgagaaaacgaacgagaaauuccaucaaauugaaaaagaauucucagaaguagaagggagaauucaggaccucgagaaauauguugaggacacuaaaauagaucucuggucguacaacgcggagcuucuuguugcccuggagaaccaacauacaauugaucuaacugacucagaaaugaacaaacuguuugaaagaacaaggaagcaacugagggaaaaugcugaggauaugggcaaugguuguuucaaaauauaccacaaaugugacaaugccugcauagggucaaucagaaauggaacuuaugaccaugauguauacagagacgaagcauuaaacaaccgguuccagaucaaagguguugagcugaagucaggauacaaagauuggauccuauggauuuccuuugccauaucauguuuuuugcuuuguguuguuuugcugggguucaucaugugggccugccaaaaaggcaacauuaggugcaacauuugcauuuga

SEQ ID NO: 40851 - RNA, 1701 nt, Artificial Sequence
  derived and/or modified CDS sequence (wt) from hemagglutinin__InfluenzaA__AFJ77682
augaagacuaucauugcuuugagcuacauuuuaugucugguuuucgcucaaaaacuucccggaaaugacaacagcacggcaacgcugugccugggacaccaugcagugccaaacggaacgcuagugaaaacaaucacgaaugaccaaauugaagugacuaaugcuacugagcugguucagaguuccucaacagguagaauaugcgacaguccucaccgaauccuugauggagaaaacugcacacugauagaugcucuauugggagacccucauugugauggcuuccaaaauaaggaaugggaccuuuuuguugaacgcagcaaagccuacagcaacuguuacccuuaugaugugccggauuaugccucccuuaggucacuaguugccucauccggcacccuggaguuuaacaaugaaagcuucaauuggacuggugucgcucagaauggaacaagcucugcuugcaaaaggagaucuauuaaaaguuucuuuaguagauugaauugguugcaccaauuaaaauacaaauauccagcacugaacgugacuaugccaaacaaugacaaauuugacaaauuguacauuugggggguucaccacccgaguacggacagugaccaaaccagccuauaugcucaagcaucagggagagucacagucucuaccaaaagaagccaacaaacuguaaucccgaauaucggaucuagacccuggguaaggggugucuccagcagaauaagcaucuauuggacaauaguaaaaccgggagacauacuuuugauuaacagcacagggaaucuaauugcuccucgggguuacuucaaaauacgaagugggaaaagcucaauaaugaggucagaugcacccauuggcaaaugcaauucugaaugcaucacuccaaauggaagcauucccaaugacaaaccauuucaaaauguaaacaggaucacauauggggccugucccagauauguuaagcaaaacacucugaaauuggcaacagggaugcggaauguaccagagaaacaaacuagaggcauauucggcgcgaucgcggguuucauagaaaaugguugggagggaaugguggacgguugguacgguuucaggcaucaaaauucugagggcacaggacaagcagcagaucuuaaaagcacucaagcagcaaucaaccaaaucaacgggaaacugaauagguuaaucgagaaaacgaacgagaaauuccaucaaauugaaaaagaauucucagaaguagaagggagaauucaggaccucgagaaauauguugaggacacuaaaauagaucucuggucguacaacgcggagcuucuuguugcccuggagaaccaacauacaauugaucuaacugacucagaaaugaacaaacuguuugaaagaacaaggaagcaacugagggaaaaugcugaggauaugggcaaugguuguuucaaaauauaccacaaaugugacaaugccugcauagggucaaucagaaauggaacuuaugaccaugauguauacagagacgaagcauuaaacaaccgguuccagaucaaagguguugagcugaagucaggauacaaagauuggauccuauggauuuccuuugccauaucauguuuuuugcuuuguguuguuuugcugggguucaucaugugggccugccaaaaaggcaacauuaggugcaacauuugcauuuga

SEQ ID NO: 40852 - RNA, 1701 nt, Artificial Sequence
  derived and/or modified CDS sequence (wt) from hemagglutinin__InfluenzaA__AFJ77693
augaagacuaucauugcuuugagcuacauuuuaugucugguuuucgcucaaaaacuucccguaaaugacaacagcacggcaacgcugugccugggacaccauacagugccaaacggaacgcuagugaaaacaaucacgaaugacaacauugaagugacuaaugcuacugagcugguucagaguuccucaacagguagaauaugcgacaguccucaccaaauccuugauggagaaaacugcacacuaauagaugcucuauugggagacccucauugugauggcuuccaaaauaaggaaugggaccuuuuuguugaacgcagcacagccuacagcaacuguuacccuuaugaugugccggauuaugccucccuuaggucacuaguugccucauccggcacacuggaguuuaacaacgaaagcuucaauuggacuggagucgaucagaauggaacaagcucugcuugcaaaaggagaucuaauaaaaguuucuuuaguagauugaauugguugcaccaauuaaaauacaaauauccagcacugaacgugacuaugccaaacaaugaaaaauuugacaaauuguacauuugggggguucaccacccgaguacggacagugaccaaaucagccuauaugcucaagcaucagggagagucacagucucuaccaaaagaagccaacaaacuguaaucccgaauaucggaucuagacccuggguaaggggugucuccagcagaauaagcaucuauuggacaauaguaaaaccgggagacauacuuuugauuaacagcacagggaaucuaauugcuccucgggguuacuucaaaauacgaagugggaaaagcucaauaaugaggucaaaugcacccauuggaaaaugcaauucugaaugcaucacuccaaauggaagcauucccaaugacaaaccauuucaaaauguaaacaggaucacauauggggccugucccagauauguuaaacaaaacacucugaaauuggcaacagggaugcggaauguaccagagaaacaaacuagaggcauauucggcgcaaucgcagguuucauagaaaaugguugggagggaaugguggacgguugguacgguuucaggcaucaaaauuuugagggcacaggacaagcagcagaucuuaaaagcacucaagcagcaaucaaccaaaucaacgggaaacugaauagguuaauugagaaaacaaacgagaaauuccaucaaauugaaaaagaauucucagaaguagaagggagaauucaggaccucgagaaauauguugaggacacuaaaauagaucucuggucguacaacgcggagcuucuuguugcccuggagaaccaacauacaauugaucuaacugacucagaaaugaacaaacuguucgaaagaacaaggaagcaacugagggaaaaugcugaggauaugggcaaugguuguuucaaaauauaccacaaaugugacaaugccugcauagggucaaucagaaauggaacuuaugaccaugauguauacagagacgaagcauuaaacaaccgguuccagaucaaagguguugagcugaagucaggauacaaagauuggauccuauggauuuccuuugccauaucauguuuuuugcuuuguguuguuuugcugggguucaucaugugggccugccaaaaaggcaacauuaggugcaacauuugcauuuaa

SEQ ID NO: 40853 - RNA, 1701 nt, Artificial Sequence; identical to SEQ ID NO: 40850
  derived and/or modified CDS sequence (wt) from hemagglutinin__InfluenzaA__AFJ77704

SEQ ID NO: 40854 - RNA, 1701 nt, Artificial Sequence
  derived and/or modified CDS sequence (wt) from hemagglutinin__InfluenzaA__AFJ77715
augaagacuaucauugcuuugagcuacauuuuaugucugguuuucgcucaaaaacuucccguaaaugacaacagcacggcaacgcugugccugggacaccaugcagugccaaacggaacgcuagugaaaacaaucacgaaugacaacauugaagugacuaaugcuacugagcugguucagaguuccucaacagguagaauaugcgacaguccucaccaaauccuugauggagaaaacugcacacuaauagaugcucuauugggagacccucauugugauggcuuccaaaauaaggaaugggaccuuuuuguugaacgcagcacagccuacagcaacuguuacccuuaugaugugccggauuaugccucccuuaggucacuaguugccucauccggcacacuggaguuuaacaacgaaagcuucaauuggacuggagucgaucagaauggaacaagcucugcuugcaaaaggagaucuaauaaaaguuucuuuaguagauugaauugguugcaccaauuaaaauacaaauauccagcacugaacgugacuaugccaaacaaugaaaaauuugacaaauuguacauuugggggguucaccacccgaguacggacagugaccaaaucagccuauaugcucaagcaucagggagagucacagucucuaccaaaagaagccaacaaacuguaaucccgaauaucggaucuagacccuggguaaggggugucuccagcagaauaagcaucuauuggacaauaguaaaaccgggagacauacuuuugauuaacagcacagggaaucuaauugcuccucgggguuacuucaaaauacgaagugggaaaagcucaauaaugaggucaaaugcacccauuggaaaaugcaauucugaaugcaucacuccaaauggaagcauucccaaugacaaaccauuucaaaauguaaacaggaucacauauggggccugucccagauauguuaaacaaaacacucugaaauuggcaacagggaugcggaauguaccagagaaacaaacuagaggcauauucggcgcaaucgcagguuucauagaaaaugguugggagggaaugguggacgguugguacgguuucaggcaucaaaauucugagggcacaggacaagcagcagaucuuaaaagcacucaagcagcaaucaaccaaaucaacgggaaacugaauagguuaaucgagaaaacaaacgagaaauuccaucaaauugaaaaagaauucucagaaguagaagggagaauucaggaccucgagaaauauguugaggacacuaaaauagaucucuggucguacaacgcggagcuucuuguugcccuggagaaccaacauacaauugaucuaacugacucagaaaugaacaaacuguucgaaagaacaaggaagcaacugagggaaaaugcugaggauaugggcaaugguuguuucaaaauauaccacaaaugugacaaugccugcauagggucaaucagaaauggaacuuaugaccaugauguauacagagacgaagcauuaaacaaccgguuccagaucaaagguguugagcugaagucaggauacaaagauuggauccuauggauuuccuuugccauaucauguuuuuugcuuuguguuguuuugcugggguucaucaugugggccugccaaaaaggcaacauuaggugcaacauuugcauuuaa

SEQ ID NO: 40855 - RNA, 1701 nt, Artificial Sequence; identical to SEQ ID NO: 40854
  derived and/or modified CDS sequence (wt) from hemagglutinin__InfluenzaA__AFJ77726

SEQ ID NO: 40856 - RNA, 1701 nt, Artificial Sequence
  derived and/or modified CDS sequence (wt) from hemagglutinin__InfluenzaA__AFJ77737
augaagacuaucauugcuuugagcuacauucuaugucugguuuucgcucaaaaacuucccggaaaugacaacagcacggcaacgcugugccuugggcaccaugcaguaccaaacggaacgauagugaaaacaaucacgaaugaccaaauugaaguuacuaaugcuacugagcugguucagaguuccucaacagguggaauaugcgacaguccucaucagauccuugauggagaaaacugcacacuaauagaugcucuauugggagacccucagugugauggcuuccaaaauaagaaaugggaccuuuuuguugaacgcagcaaagccuacagcaacuguuacccuuaugaugugccggauuaugccucccuuaggucacuaguugccucauccggcacacuggaguuuaacaaugaaagcuucaauuggacuggagucacucagaauggaacaagcucugcuugcaaaaggagaucuaauaaaaguuucuuuaguagauugaauugguugacccaauuaaaauacaaauacccagcauugaacgugacuaugccaaacaaugaaaaauuugacaaauuguacauuugggggguucaccacccggguacggacagugaccaaaucagccuauaugcucaagcaucaggaagaaucacagucucuaccaaaagaagccaacaaacuguaaucccgaauaucggaucuagacccaggguaagggaugucuccagcagaauaagcaucuauuggacaauaguaaaaccgggagacauacuuuugauuaacagcacagggaaucuaauugcuccucgggguuacuucaaaauacgaagugggaaaagcucaauaaugagaucagaugcacccauuggcaaaugcaauucugaaugcaucacuccaaauggaagcauucccaaugacaaaccauuucaaaauguaaacaggaucacauauggggccugucccagauauguuaagcaaaacacucugaaauuggcaacagggaugcgaaauguaccagagaaacaaacuagaggcauauuuggcgcaaucgcggguuucauagaaaaugguugggagggaaugguggacgguugguacgguuucaggcaucaaaauucugagggcacaggacaagcagcagaucucaaaagcacucaagcagcaaucaaccaaaucaaugggaaacugaauagguuaaucgggaaaacaaacgagaaauuccaucagauugaaaaagaauucucagaaguagaagggagaauucaggaccucgagaaauauguugaggacacuaaaauagaucucuggucauacaacgcggagcuucuuguugcccuggagaaccaacauacaauugaucuaacugacucagaaaugaacaaacuguuugaaagaacaaagaagcaacugagggaaaaugcugaggauaugggcaaugguuguuucaaaauauaccacaaaugugacaaugccugcauagggucaaucagaaauggaacuuaugaccaugauguauacagagaugaagcauuaaacaaccgguuccagaucaaagguguugagcugaagucaggauacaaagauuggauccuauggauuuccuuugccauaucauguuuuuugcuuuguguugcuuuguugggguucaucaugugggccugccaaaaaggcaacauuaggugcaacauuugcauuuga

SEQ ID NO: 40857 - RNA, 1701 nt, Artificial Sequence
  derived and/or modified CDS sequence (wt) from hemagglutinin__InfluenzaA__AFJ77748
augaagacuaucauugcuuugagcuacauucuaugucugguuuucgcucaaaaacuucccggaaaugacaacagcacggcaacgcugugccuugggcaccaugcaguaccaaacggaacgauagugaaaacaaucacgaaugaccaaauugaaguuacuaaugcuacugagcugguacagaguuccucaacagguggaauaugcgacaguccucaucagauccuugauggagaaaacugcacacuaauagaugcucuauugggagacccucagugugauggcuuccaaaauaagaaaugggaccuuuuuguugaacgcagcaaagccuacagcaacuguuacccuuaugaugugccggauuaugccucccuuaggucacuaguugccucauccggcacacuggaguuuaacaaugaaagcuucgauuggacuggagucacucagaauggaacaagcucugcuugcaaaaggagaucuaauaaaaguuucuuuaguagauugaauugguugacccacuuaaaauacaaauacccagcauugaacgugacuaugccaaacaaugaaaaauuugacaaauuguacauuugggggguucaccacccggguacggacagugaccaaauuagccuauaugcucaagcaucaggaagaaucacagucucuaccaaaagaagccaacaaacuguaaucccgaauaucggaucuagacccaggguaagggaugucuccagccgaauaagcaucuauuggacaauaguaaaaccgggagacauacuuuugauuaacagcacagggaaucuaauugcuccucgggguuacuucaaaauacgaagugggaaaagcucaauaaugagaucagaugcacccauuggcaaaugcaauucugaaugcaucacuccaaauggaagcauucccaaugacaaaccauuucaaaauguaaacaggaucacauauggggccugucccagauauguuaagcaaaacacucugaaauuggcaacagggaugcgaaauguaccagagaaacaaacuagaggcauauuuggcgcaaucgcggguuucauagaaaaugguugggagggaaugguggacgguugguacgguuucaggcaucaaaauucugagggcacaggacaagcagcagaucucaaaagcacucaagcagcaaucaaccaaaucaaugggaaacugaauagguuaaucgggaaaacaaacgagaaauuccaucagauugaaaaagaauucucagaaguggaagggagaauucaggaccucgagaaauauguugaggacacuaaaauagaucucuggucauacaacgcggagcuucuuguugcccuggagaaccaacauacaauugaucuaacugacucagaaaugaacaaacuguuugaaagaacaaagaagcaacugagggaaaaugcugaggauaugggcaaugguuguuucaaaauauaccacaaaugugacaaugccugcauagggucaaucagaaauggaacuuaugaccaugauguguacagagaugaagcauuaaacaaccgguuccagaucaaagguguugagcugaagucaggauacaaagauuggauccuauggauuuccuuugccauaucauguuuuuugcuuuguguugcuuuguugggguucaucaugugggccugccaaaaaggcaacauuaggugcaacauuugcauuuga

SEQ ID NO: 40858 - RNA, 1701 nt, Artificial Sequence; identical to SEQ ID NO: 32761
  derived and/or modified CDS sequence (wt) from hemagglutinin__InfluenzaA__AFJ77759

SEQ ID NO: 40859 - RNA, 1701 nt, Artificial Sequence
  derived and/or modified CDS sequence (wt) from hemagglutinin__InfluenzaA__AFJ77781
augaagacuaucauugcuuugagcuacauucuaugucugguuuucgcucaaaaacuucccggaaaugacaacagcacggcaacgcugugccuugggcaccaugcaguaccaaacggaacgauagugaaaacaaucacgaaugaccaaauugaaguuacuaaugcuacugagcugguucagaguuccucaacagguggaauaugcgacaguccucaucagauccuugauggagaaaacugcacacuaauagaugcucuauugggagacccucagugugauggcuuccaaaauaagaaaugggaccuuuuuguugaacgcagcaaagccuacagcaacuguuacccuuaugaugugccggauuaugccucccuuaggucacuaguugccucauccggcacacuggaguuuaacagugaaagcuucgauuggacuggagucacucagaauggaacaagcucugcuugcaaaaggagaucuaauaaaaguuucuuuaguagauugaauugguugacccacuuaaaauacaaauacccagcauugaacgugacuaugccaaacaaugaaaaauuugacaaauuguacauuugggggguucaccacccggguacggacagugaccaaaucagccuauaugcucaagcaucaggaagaaucacagucucuaccaaaagaagccaacaaacuguaaucccgaauaucggaucuagacccaggguaagggaugucuccagccgaauaagcaucuauuggacaauaguaaaaccgggagacauacuuuugauuaacagcacagggaaucuaauagcuccucgggguuacuucaaaauacgaagugggaaaagcucaauaaugagaucagaugcacccauuggcaaaugcaauucugaaugcaucacuccaaauggaagcauucccaaugacaaaccauuucaaaauguaaacaggaucacauauggggccugucccagauauguuaagcaaaacacucugaaauuggcaacagggaugcgaaauguaccagagaaacaaacuagaggcauauuuggcgcaaucgcggguuucauagaaaaugguugggagggaaugguggacgguugguacgguuucaggcaucaaaauucugagggcacaggacaagcagcagaucucaaaagcacucaagcagcaaucaaccaaaucaaugggaaacugaauagguuaaucgggaaaacaaacgagaaauuccaucagauugaaaaagaauucucggaaguagaagggagaauucaggaccucgagaaauauguugaggacacuaaaauagaucucuggucauacaacgcggagcuucuuguugcccuggagaaccaacauacaauugaucuaacugacucagaaaugaacaaacuguuugaaagaacaaagaagcaacugagggaaaaugcugaggauaugggcaaugguuguuucaaaauauaccacaagugugacaaugccugcauagggucaaucagaaauggaacuuaugaccaugauguguacagagaugaagcauuaaacaaccgguuccagaucaaagguguugagcugaagucaggauacaaagauuggauccuauggauuuccuuugccauaucauguuuuuugcuuuguguugcuuuguugggguucaucaugugggccugccaaaaaggcaacauuaggugcaacauuugcauuuga

SEQ ID NO: 40860 - RNA, 1701 nt, Artificial Sequence
  derived and/or modified CDS sequence (wt) from hemagglutinin__InfluenzaA__AFJ77792
augaagacuaucauugcuuugagcuacauucuaugucugguuuucgcucaaaaacuucccggaaaugacaacagcacggcaacgcugugccuugggcaccaugcaguaccaaacggaacaauagugaaaacaaucacgaaugaccaaauugaaguuacuaaugcuacugagcugguucagaguuccucaacagguggaauaugcgacaguccucaucagauccuugauggagaaaacugcacacuaauagaugcucuauugggagacccucagugugauggcuuccaaaauaagaaaugggaccuuuuuguugaacgcagcaaagccuacagcaacuguuacccuuaugaugugccggauuaugccucccuuaggucacuaguugccucauccggcacacuggaguuuaacaaugaaagcuucaauuggacuggagucacucaaaauggaacaagcucugcuugcaaaaggagaucuaauaaaaguuucuuuaguagauugaauugguugacccacuuaaaauucaaauacccagcauugaacgugacuaugccaaacaaugaaaaauuugacaaauuguacauuugggggguucaccacccggguacggacaaugaccaaaucagccuauaugcucaagcaucaggaagaaucacagucucuaccaaaagaagccaacaaacuguaaucccgaauaucggaucuagacccaggguaagggauguccccagcagaauaagcaucuauuggacaauaguaaaaccgggagacauacuuuugauuaacagcacagggaaucuaauugcuccucgggguuacuucaaaauacgaagugggaaaagcucaauaaugagaucagaugcacccauuggcaaaugcaauucugaaugcaucacuccaaauggaagcauucccaaugacaaaccauuucaaaauguaaacaggaucacauauggggccugucccagauauguuaagcaaaacacucugaaauuggcaacagggaugcgaaauguaccagagaaacaaacuagaggcauauuuggcgcaaucgcggguuucauagaaaaugguugggagggaaugguggacgguugguacgguuucaggcaucaaaauucugagggaacaggacaagcagcagaucucaaaagcacucaagcagcaaucaaccaaaucaaugggaagcugaauagguugaucgggaaaacaaacgagaaauuccaucagauugaaaaagaauucucagaaguagaagggagaauucaggaccucgagaaauauguugaggacacuaaaauagaucucuggucauacaacgcggagcuucuuguugcccuggagaaccaacauacaauugaucuaacugacucagaaaugaacaaacuguuugaaagaacaaagaagcaacugagggaaaaugcugaggauaugggcaaugguuguuucaaaauauaccacaaaugugacaaugccugcauagggucaaucagaaauggaacuuaugaccaugauguauacagagaugaagcauuaaacaaccgguuccagaucaaagguguugagcugaagucaggauacaaagauuggauccuauggauuuccuuugccauaucauguuuuuugcuuuguguugcuuuguugggguucaucaugugggccugccaaaaaggcaacauuaggugcaacauuugcauuuga

SEQ ID NO: 40861 - RNA, 1701 nt, Artificial Sequence
  derived and/or modified CDS sequence (wt) from hemagglutinin__InfluenzaA__AFJ77803
augaagacuaucauugcuuugagcuacauucuaugucugguuuucgcucaaaaacuucccggaaaugacaacagcacggcaacgcugugccuugggcaccaugcaguaccaaacggaacaauagugaaaacaaucacgaaugaccaaauugaaguuacuaaugcuacugagcugguucagaguuccucaacagguggaauaugcgacaguccucaucagauccuugauggagaaaacugcacacuaauagaugcucuauugggagacccucagugugauggcuuccaaaauaagaaaugggaccuuuuuguugaacgcagcaaagccuacagcaacuguuacccuuaugaugugccggauuaugccucccuuaggucacuaguugccucauccggcacacuggaguuuaacaaugaaagcuucaauuggacuggagucacucaaaauggaacaagcucugcuugcaaaaggagaucuaauaaaaguuucuuuaguagauugaauugguugacccacuuaaaauucaaauacccagcauugaacgugacuaugccaaacaaugaaaaauuugacaaauuguacauuugggggguucaccacccggguacggacaaugaccaaaucagccuauaugcucaagcaucaggaagaaucacagucucuaccaaaagaagccaacaaacuguaaucccgaauaucggaucuagacccaggguaagggauguccccagcagaauaagcaucuauuggacaauaguaaaaccgggagacauacuuuugauuaacagcacagggaaucuaauugcuccucgggguuacuucaaaauacgaagugggaaaagcucaauaaugagaucagaugcacccauuggcaaaugcaauucugaaugcaucacuccaaauggaagcauucccaaugacaaaccauuucaaaauguaaacaggaucacauauggggccugucccagauauguuaagcaaaacacucugaaauuggcaacagggaugcgaaacguaccagagaaacaaacuagaggcauauuuggcgcaaucgcagguuucauagaaaaugguugggagggaaugguggacgguugguacgguuucaggcaucaaaauucugagggaacaggacaagcagcagaucucaaaagcacucaagcagcaaucaaccaaaucaaugggaagcugaauagguugaucgggaaaacaaacgagaaauuccaucagauugaaaaagaauucucagaaguagaagggagaauucaggaccucgagaaauauguugaggacacuaaaauagaucucuggucauacaacgcggagcuucuuguugcccuggagaaccaacauacaauugaucuaacugacucagaaaugaacaaacuguuugaaagaacaaagaagcaacugagggaaaaugcugaggauaugggcaaugguuguuucaaaauauaccacaaaugugacaaugccugcauagggucaaucagaaauggaacuuaugaccaugauguauacagagaugaagcauuaaacaaccgguuccagaucaaagguguugagcugaagucaggauacaaagauuggauccuauggauuuccuuugccauaucauguuuuuugcuuuguguugcuuuguugggguucaucaugugggccugccaaaaaggcaacauuaggugcaacauuugcauuuga

SEQ ID NO: 40862 - RNA, 1701 nt, Artificial Sequence; identical to SEQ ID NO: 39964
  derived and/or modified CDS sequence (wt) from hemagglutinin__InfluenzaA__AFJ77814

SEQ ID NO: 40863 - RNA, 1701 nt, Artificial Sequence
  derived and/or modified CDS sequence (wt) from hemagglutinin__InfluenzaA__AFJ77825
augaagacuaucauugcuuugagcuacauucuaugucugguuuucgcucaaaaacuucccggaaaugacaacagcacggcaacgcugugccuugggcaccaugcaguaccaaacggaacaauagugaaaacaaucacgaaugaccaaauugaaguuacuaaugcuacugagcugguucagaguuccucaacagguggaauaugcgacaguccucaucagauccuugauggagaaaacugcacacuaauagaugcucuauugggagacccucagugugauggcuuccaaaauaagaaaugggaccuuuuuguugaacgcagcaaggccuacagcaacuguuacccuuaugaugugccggauuaugccucccuuaggucacuaguugccucauccggcacacuggaguuuaacaaugaaagcuucaauuggacuggagucacucaaaauggaacaagcucugcuugcaaaaggagaucuaauaaaaguuucuuuaguagauugaauugguugacccacuuaaaauucaaauacccagcauugaacgugacuaugccaaacaaugaaaaauuugacaaauuguacauuugggggguucaccacccggguacggacaaugaccaaaucagccuauaugcucaagcaucaggaagaaucacagucucuaccaaaagaagccaacaaacuguaaucccgaauaucggaucuagacccaggguaagggauguccccagcagaauaagcaucuauuggacaauaguaaaaccgggagacauacuuuugauuaacagcacagggaaucuaauugcuccucgggguuacuucaaaauacgaagugggaaaagcucaauaaugagaucagaugcacccauuggcaaaugcaauucugaaugcaucacuccaaauggaagcauucccaaugacaaaccauuucaaaauguaaacaggaucacauauggggccugucccagauauguuaagcaaaacacucugaaauuggcaacagggaugcgaaacguaccagagaaacaaacuagaggcauauuuggcgcaaucgcggguuucauagaaaaugguugggagggaaugguggacgguugguacgguuucaggcaucaaaauucugagggaacaggacaagcagcagaucucaaaagcacucaagcagcaaucaaccaaaucaaugggaagcugaauagguugaucgggaaaacaaacgagaaauuccaucagauugaaaaagaauucucagaaguagaagggagaauucaggaccucgagaaauauguugaggacacuaaaauagaucucuggucauacaacgcggagcuucuuguugcccuggagaaccaacauacaauugaucuaacugacucagaaaugaacaaacuguuugaaagaacaaagaagcaacugagggaaaaugcugaggauaugggcaaugguuguuucaaaauauaccacaaaugugacaaugccugcauagggucaaucagaaauggaacuuaugaccaugauguauacagagaugaagcauuaaacaaccgguuccagaucaaagguguugagcugaagucaggauacaaagauuggauccuauggauuuccuuugccauaucauguuuuuugcuuuguguugcuuuguugggguucaucaugugggccugccaaaaaggcaacauuaggugcaacauuugcauuuga

SEQ ID NO: 40864 - RNA, 1701 nt, Artificial Sequence
  derived and/or modified CDS sequence (wt) from hemagglutinin__InfluenzaA__AFJ77836
augaagacuaucauugcuuugagcuacauucuaugucuaguuuucgcucaaaaacuucccggaaaugacaacagcacggcaacgcugugccuugggcaccaugcaguaccaaacggaacaauagugaaaacaaucacgaaugaccaaauugaaguuacuaaugcuacugagcugguucagaguuccucaacagguggaauaugcgacaguccucaucagauccuugauggagaaaacugcacacuaauagaugcucuauugggagacccucagugugauggcuuccaaaauaagaaaugggaccuuuuuguugaacgcagcaaagccuacagcaacuguuacccuuaugaugugccggauuaugccucccuuaggucacuaguugccucauccggcacacuggaguuuaacaaugaaagcuucaauuggacuggagucacucaaaauggaacaagcucugcuugcaaaaggagaucuaauaaaaguuucuuuaguagauugaauugguugacccacuuaaaauucaaauacccagcauugaacgugacuaugccaaacaaugaaaaauuugacaaauuguacauuugggggguccaccacccggguacggacaaugaccaaaucagccuauaugcucaagcaucaggaagaaucacagucucuaccaaaagaagccaacaaacuguaaucccgaauaucggaucuagacccaggguaagggauguccccagcagaauaagcaucuauuggacaauaguaaaaccgggagacauacuuuugauuaacagcacagggaaucuaauugcuccucgggguuacuucaaaauacgaagugggaaaagcucaauaaugagaucagaugcacccauuggcaaaugcaauucugaaugcaucacuccaaauggaagcauucccaaugacaaaccauuucaaaauguaaacaggaucacauauggggccugucccagauauguuaagcaaaacacucugaaauuggcaacagggaugcgaaacguaccagagaaacaaacuagaggcauauuuggcgcaaucgcggguuucauagaaaaugguugggagggaaugguggacgguugguacgguuucaggcaucaaaauucugagggaacaggacaagcagcagaucucaaaagcacucaagcagcaaucaaccaaaucaaugggaagcugaauagguugaucgggaaaacaaacgagaaauuccaucagauugaaaaagaauucucagaaguagaagggagaauucaggaccucgagaaauauguugaggacacuaaaauagaucucuggucauacaacgcggagcuucuuguugcccuggagaaccaacauacaauugaucuaacugacucagaaaugaacaaacuguuugaaagaacaaagaagcaacugagggaaaaugcugaggauaugggcaaugguuguuucaaaauauaccacaaaugugacaaugccugcauagggucaaucagaaauggaacuuaugaccaugauguauacagagaugaagcauuaaacaaccgguuccagaucaaagguguugagcugaagucaggauacaaagauuggauccuauggauuuccuuugccauaucauguuuuuugcuuuguguugcuuuguugggguucaucaugugggccugccaaaaaggcaacauuaggugcaacauuugcauuuga

SEQ ID NO: 40865 - RNA, 1701 nt, Artificial Sequence
  derived and/or modified CDS sequence (wt) from hemagglutinin__InfluenzaA__AFJ77847
augaagacuaucauugcuuugagcuacauucuaugucugguuuucgcucaaaaacuucccggaaaugacaacagcacggcaacgcugugccuugggcaccaugcaguaccaaacggaacaauagugaaaacaaucacgaaugaccaaauugaaguuacuaaugcuacugagcugguucagaguuccucaacagguggaauaugcgacaguccucaucagauccuugauggagaaaacugcacacuaauagaugcucuauugggagacccucagugugauggcuuccaaaauaagaaaugggaccuuuuuguugaacgcagcaaagccuacagcaacuguuacccuuaugaugugccggauuaugccucccuuaggucacuaguugccucauccggcacacuggaguuuaacaaugaaagcuucaauuggacuggagucacucaaaauggaacaagcucugcuugcaaaaggagaucuaauaaaaguuucuuuaguagauugaauugguugacccacuuaaaauucaaauacccagcauugaacgugacuaugccaaacaaugaaaaauuugacaaauuguacauuugggggguucaccacccggguacggacaaugaccaaaucagccuauaugcucaagcaucaggaagaaucacagucucuaccaaaagaagccaacaaacuguaaucccgaauaucggaucuagacccaggguaagggauguccccagcagaauaagcaucuauuggacaauaguaaaaccgggagacauacuuuugauuaacagcacagggaaucuaauugcuccucgggguuacuucaaaauacgaagugggaaaagcucaauaaugagaucagaugcacccauuggcaaaugcaauucugaaugcaucacuccaaauggaagcauucccaaugacaaaccauuucaaaacguaaacaggaucacauauggggccugucccagauauguuaagcaaaacacucugaaauuggcaacagggaugcgaaacguaccagagaaacaaacuagaggcauauuuggcgcaaucgcggguuucauagaaaaugguugggagggaaugguggacgguugguacgguuucaggcaucaaaauucugagggaacaggacaagcagcagaucucaaaagcacucaagcagcaaucaaccaaaucaaugggaagcugaauagguugaucgggaaaacaaacgagaaauuccaucagauugaaaaagaauucucagaaguagaagggagaauucaggaccucgagaaauauguugaggacacuaaaauagaucucuggucauacaacgcggagcuucuuguugcccuggagaaccaacauacaauugaucuaacugacucagaaaugaacaaacuguuugaaagaacaaagaagcaacugagggaaaaugcugaggauaugggcaaugguuguuucaaaauauaccacaaaugugacaaugccugcauagggucaaucagaaauggaacuuaugaccaugauguauacagagaugaagcauuaaacaaccgguuccagaucaaagguguugagcugaagucaggauacaaagauuggauccuauggauuuccuuugccauaucauguuuuuugcuuuguguugcuuuguugggguucaucaugugggccugccaaaaaggcaacauuaggugcaacauuugcauuuga

SEQ ID NO: 40866 - RNA, 1701 nt, Artificial Sequence
  derived and/or modified CDS sequence (wt) from hemagglutinin__InfluenzaA__AFJ77858
augaagacuaucauugcuuugagcuacauucuaugucugguuuucgcucaaaaacuucccggaaaugacaacagcacggcaacgcugugccuugggcaccaugcaguaccaaacggaacgauagugaaaacaaucacgaaugaccaaauugaaguuacuaaugcuacugagcugguucagaguuccucaacagguggaauaugcgacaguccucaucagauccuugauggagaaaacugcacacuaauagaugcucuauugggagacccucagugugauggcuuccaaaauaagaaaugggaccuuuuuguugaacgcagcaaagccuacagcaacuguuacccuuaugaugugccggauuaugccucccuuaggucacuaguugccucauccggcacacuggaguuuaacaaugaaagcuucaauuggacuggagucacucaaaauggaacaagcucugcuugcaaaaggagaucuaauaacaguuucuuuaguagauugaauugguugacccacuuaaaauucaaauacccagcauugaacgugacuaugccaaacaaugaaaaauuugacaaauuguacauuugggggguucaccacccggguacggacaaugaccaaaucagccuauaugcucaagcaucaggaagaaucacagucucuacccaaagaagccaacaaacuguaaucccgaauaucggaucuagacccaggguaagggauauccccagcagaauaagcaucuauuggacaauaguaaaaccgggagacaugcuuuugauuaacagcacagggaaucuaauugcuccucgggguuacuucaaaauacgaagugggaaaagcucaauaaugagaucagaugcacccauuggcaaaugcaauucugaaugcaucacuccaaauggaagcauucccaaugacaaaccauuucaaaauguaaacaggaucacauauggggccugucccagauauguuaagcaaaacacucugaaauuggcaacagggaugcgaaauguaccagagaaacaaacuagaggcauauuuggcgcaaucgcggguuucauagaaaaugguugggagggaaugguggaugguugguacgguuucaggcaucaaaauucugagggaacaggacaagcagcagaucucaaaagcacucaagcagcaaucaaccaaaucaaugggaagcugaauaaguugaucgggaaaaccaacgagaaauuccaucagauugaaaaagaauucucagaaguagaagggagaauucaggaccucgagaaauauguugaggacacuaaaauagaucucuggucauacaacgcggagcuucuuguugcccuggagaaccaacauacaauugaucuaacugacucagaaaugaacaaacuguuugaaagaacaaagaagcaacugagggaaaaugcugaggauaugggcaaugguuguuucaaaauauaccacaaaugugacaaugccugcauagggucaaucagaaauggaacuuaugaccaugauguauacagagaugaagcauuaaacaaccgguuccagaucaaagguguugagcugaagucaggauacaaagauuggauccuauggauuuccuuugccauaucauguuuuuuguuuuguguugcuuuguugggguucaucaugugggccugccaaaaaggcaacauuaggugcaacauuugcauuuga

SEQ ID NO: 40867 - RNA, 1701 nt, Artificial Sequence
  derived and/or modified CDS sequence (wt) from hemagglutinin__InfluenzaA__AFJ77869
augaagacuaucauugcuuuuagcuacauucuaugucugguuuucgcucaaaaacuucccggaaaugacaacagcacggcaacgcugugccuugggcaccaugcaguaccaaacggaacgauagugaaaacaaucacgaaugaccaaauugaaguuacuaaugcuacugagcugguucagaguuccucaacagguggaauaugcgacaguccucaucagauccuugauggagaaaacugcacacuaauagaugcucuauugggagacccucagugugauggcuuccaaaauaagaaaugggaccuuuuuguugaacgcagcaaagccuacagcaacuguuacccuuaugaugugccggauuaugccucccuuaggucacuaguugccucauccggcacacuggaguuuaacaaugaaagcuucaauuggacuggagucacucaaaauggaacaagcucugcuugcaaaaggagaucuaauaacaguuucuuuaguagauugaauugguugacccacuuaaaauucaaauacccagcauugaacgugacuaugccaaacaaugaaaaauuugacaaauuguacauuugggggguucaccacccggguacggacaaugaccaaaucagccuauaugcucaagcaucaggaagaaucacagucucuaccaaaagaagccaacaaacuguaaucccgaauaucggaucuagacccaggguaagggauauccccagcagaauaagcaucuauuggacaauaguaaaaccgggagacauacuuuugauuaacagcacagggaaucuaauugcuccucgggguuacuucaaaauacgaagugggaaaagcucaauaaugagaucagaugcacccauuggcaaaugcaauucugaaugcaucacuccaaauggaagcauucccaaugacaaaccauuucaaaauguaaacaggaucacauauggggccugucccagauauguuaagcaaaacacucugaaauuggcaacagggaugcgaaauguaccagagaaacaaacuagaggcauauuuggcgcaaucgcggguuucauagaaaaugguugggagggaaugguggaugguugguacgguuucaggcaucaaaauucugagggaacaggacaagcagcagaucucaaaagcacucaagcagcaaucaaccaaaucaaugggaagcugaauagguugaucgggaaaaccaacgagaaauuccaucagauugaaaaagaauucucagaaguagaagggagaauucaggaccucgagaaauauguugaggacacuaaaauagaucucuggucauacaacgcggagcuucuuguugcccuggagaaccaacauacaauugaucuaacugacucagaaaugaacaaacuguuugaaagaacaaagaagcaacugagggaaaaugcugaggauaugggcaaugguuguuucaaaauauaccacaaaugugacaaugccugcauagggucaaucagaaauggaacuuaugaccaugauguauacagggaugaagcauuaaacaaccgguuccagaucaaagguguugagcugaagucaggauacaaagauuggauccuauggauuuccuuugccauaucauguuuuuugcuuuguguugcuuuguugggguucaucaugugggccugccaaaaaggcaacauuaggugcaacauuugcauuuga

SEQ ID NO: 40868 - RNA, 1701 nt, Artificial Sequence
  derived and/or modified CDS sequence (wt) from hemagglutinin__InfluenzaA__AFJ77880
augaagacuaucauugcuuugagcuacauucuaugucugguuuucgcucaaaaacuucccggaaaugacaacagcacggcaacgcugugccuugggcaccaugcaguaccaaacggaacaauagugaaaacaaucacaaaugaccaaauugaaguuacuaaugcuacugagcugguucagaguuccucaacaggaggaauaugcaacaguccucaucagauccuugauggagaaaacugcacacuaauagaugcucuauugggagacccucagugugauggcuuccaaaauaagaaaugggaccuuuuuguugaacgcagcaaagccuacagcaacuguuacccuuaugaugugccggauuaugccucccuuaggucacuaguugccucauccggcacacuggaguuuaacaaugaaagcuucaauuggacuggagucacucaaaauggaacaaguucugcuugcaaaaggagaucuaauaaaaguuucuuuaguagauugaauugguugacccacuuaaaauucaaauacccagcauugaacgugacuaugccaaacaaugaaaaauuugacaaauuguacauuugggggguucaccacccggguacggacaaugaccaaaucagccuauaugcucaagcaucaggaagaaucacagucucuaccaaaagaagccaacaaacuguaaucccgaauaucggaucuagacccaggguaagggauguccccagcagaauaagcaucuauuggacaauaguaaaaccgggagacauacuuuugauuaacagcacagggaaucuaauugcuccucgggguuacuucaaaauacgaagugggaaaagcucaauaaugagaucagaugcacccauuggcaaaugcaauucugaaugcaucacuccaaauggaagcauucccaaugacaaaccauuucaaaacguaaacaggaucacauauggggccugucccagauauguuaagcaaaacacucugaaauuggcaacagggaugcgaaacguaccagagaaacaaacuagaggcauauuuggcgcaaucgcggguuucauagaaaaugguugggagggaaugguggacgguugguacgguuucaggcaucaaaauucugagggaacaggacaagcagcagaucucaaaagcacucaagcagcaaucaaccaaaucaaugggaagcugaauagguugaucgggaaaacaaacgagaaauuccaucagauugaaaaagaauucucagaaguagaagggagaauucaggaccucgagaaauauguugaggacacuaaaauagaucucuggucauacaacgcggagcuucuuguugcccuggagaaccaacauacaauugaucuaacugacucagaaaugaacaaacuguuugaaagaacaaagaagcaacugagggaaaaugcugaggauaugggcaaugguuguuucaaaauauaucacaaaugugacaaugccugcauagggucaaucagaaauggaacuuaugaccaugauguauacagagaugaagcauuaaacaaccgguuccagaucaaagguguugagcugaagucaggauacaaagauuggauccuauggauuuccuuugccauaucauguuucuugcuuuguguugcuuuguugggguucaucaugugggccugccaaaaaggcaacauuaggugcaacauuugcauuuga

SEQ ID NO: 40869 - RNA, 1701 nt, Artificial Sequence
  derived and/or modified CDS sequence (wt) from hemagglutinin__InfluenzaA__AFJ77902
augaagacuaucauugcuuugagcuacauucuaugucugguuuucgcucaaaaacuucccggaaaugacaacagcacggcaacgcugugccuugggcaccaugcaguaccaaacggaacgauagugaaaacaaucacgaaugaccaaauugaaguuacuaaugcuacugagcugguucagaguuccucaacagguggaauaugcgacaguccucaucagauccuugauggagaaaacugcacacuaauagaugcucuauugggagacccucagugugauggcuuccaaaauaagaaaugggaccuuuuuguugaacgcagcaaagccuacagcaacuguuacccuuaugaugugccggauuaugccucccuuaggucauuaguugccucauccggcacacuggaguuuaacaaugaaagcuucaauuggacuggagucacucaaaauggaacaagcucugcuugcaaaaggagaucuaauaacaguuucuuuaguagauugaauugguugacccacuuaaaauucaaauacccagcauugaacgugacuaugccaaacaaugaaaaauuugacaaauuguacauuugggggguucaccacccggguacggacaaugaccaaaucggccuauaugcucaagcaucaggaagaaucacagucucuaccaaaagaagccaacaaacuguaaucccgaauaucggaucuagacccaggguaagggauauccccagcagaauaagcauuuauuggacaauaguaaaaccgggagacaugcuuuugauuaacagcacagggaaucuaauugcuccucgggguuacuucaaaauacgaagugggaaaagcucaauaaugagaucagaugcacccauuggcaaaugcaauucugaaugcaucacuccaaauggaagcauucccaaugacaaaccauuucaaaauguaaacaggaucacauauggggccugucccagauauguuaagcaaaacacucugaaauuggcaacagggaugcgaaauguaccagagaaacaaacuagaggcauauuuggcgcaaucgcggguuucauagaaaaugguugggagggaaugguggaugguugguacgguuucaggcaucaaaauucugagggaacaggacaagcagcagaucucaaaagcacucaagcagcaaucaaccaaaucaaugggaagcugaauagguugaucgggaaaaccaacgagaaauuccaucagauugaaaaagaauucucagaaguagaagggagaauucaggaccucgagaaauauguugaggacacuaaaauagaucuuuggucauacaacgcggagcuucuuguugcccuggagaaccaacauacaauugaucuaacugacucagaaaugaacaaacuguuugaaagaacaaagaagcaacugagggaaaaugcugaggauaugggcaaugguuguuucaaaauauaccacaaaugugacaaugccugcauagggucaaucagaaauggaacuuaugaccaugauguauacagagaugaagcauuaaacaaccgguuccagaucaaagguguugagcugaagucaggauacaaagauuggauccuauggauuuccuuugccauaucauguuuuuugcuuuguguugcuuuguugggguucaucaugugggccugccaaaaaggcaacauuaggugcaacauuugcauuuga

SEQ ID NO: 40870 - RNA, 1701 nt, Artificial Sequence
  derived and/or modified CDS sequence (wt) from hemagglutinin__InfluenzaA__AFJ77913
augaagacuaucauugcuuugagcuacauucuaugucugguuuucgcucaaaaacuucccggaaaugacaacagcacggcaacgcugugccuugggcaccaugcaguaccaaacggaacgauagugaaaacaaucacgaaugaccaaauugaaguuacuaaugcuacugagcugguucagaguuccucaacagguggaauaugcgacaguccucaucagauccuugauggagaaaacugcacacuaauagaugcucuauugggagacccucagugugauggcuuccaaaauaagaaaugggaccuuuuuguugaacgcagcaaagccuacagcaacuguuacccuuaugaugugcaggauuaugccucccuuaggucacuaguugccucauccggcacacuggaguuuaacaaugaaagcuucaauuggacuggagucacucaaaauggaacaagcucugcuugcaaaaggagaucuaauaacaguuucuuuaguagauugaauugguugacccacuuaaaauucaaauacccagcauugaacgugacuaugccaaacaaugaaaaauuugacaaauuguacauuugggggguucaccacccggguacggacaaugaccaaaucagccuauaugcucaagcaucaggaagaaucacagucucuaccaaaagaagccaacaaacuguaaucccgaauaucggaucuagacccaggguaagggauauccccagcagaauaagcaucuauuggacaauaguaaaaccgggagacaugcuuuugauuaacagcacagggaaucuaauugcuccucgggguuacuucaaaauacgaagugggaaaagcucaauaaugagaucagaugcacccauuggcaaaugcaauucugaaugcaucacuccaaauggaagcauucccaaugacaaaccauuucaaaauguaaacaggaucacauauggggccugucccagauauguuaagcaaaacacucugaaauuggcaacagggaugcgaaauguaccagagaaacaaacuagaggcauauuuggcgcaaucgcggguuucauagaaaaugguugggagggaaugguggaugguugguacgguuucaggcaucaaaauucugagggaacaggacaagcagcagaucucaaaagcacucaagcagcaaucaaccaaaucaaugggaagcugaauagguugaucgggaaaaccaacgagaaauuccaucagauugaaaaagaauucucagaaguagaagggagaauucaggaccucgagaaauauguugaggacacuaaaauagaucucuggucauacaacgcggagcuucuuguugcccuggagaaccaacauacaauugaucuaacugacucagaaaugaacaaacuguuugaaagaacaaagaagcaacugagggaaaaugcugaggauaugggcaaugguuguuucaaaauauaccacaaaugugacaaugccugcauagggucaaucagaaauggaacuuaugaccaugauguauacagagaugaagcauuaaacaaccgauuccagaucaaagguguugagcugaagucaggauacaaagauuggauccuauggauuuccuuugccauaucauguuuuuugcuuuguguugcuuuguugggguucaucaugugggccugccaaaaaggcaacauuaggugcaacauuugcauuuga

SEQ ID NO: 40871 - RNA, 1701 nt, Artificial Sequence
  derived and/or modified CDS sequence (wt) from hemagglutinin__InfluenzaA__AFJ77924
augaagacuaucauugcuuugagcuacauucuaugucugguuuucgcucaaaaacuucccggaaaugacaacagcacggcaacgcugugccuugggcaccaugcaguaccaaacggaacgguagugaaaacaaucacaaaugaccaaauugaaguuacuaaugcuacugagcugguucagaguuccucaacagguggaauaugcgacaguccucaucagauccuugauggagaaaacugcacacuaauggaugcucuauugggagacccucagugugauggcuuccaaaauaagaaaugggaccuuuuuguugaacgcagcaaagccuacagcaacuguuacccuuaugaugugccggauuaugccucccuuaggucacuaguugccucauccggcacacuggaguuuaacaaugaaagcuucaauuggacuggagucacucaaaauggaacaagcucugcuugcaaaaggagaucuaauaacaguuucuuuaguagauugaauugguugacccacuuaaaauucaaauacccagcauugaacgugacuaugccaaacaaugaaaaauuugacaaauuguacauuugggggguucaccacccggguacggacaaugaccaaaucagccuauaugcucaagcaucaggaagaaucacagucucuaccaaaagaagccaacaaacuguaaucccgaauaucggaucuagacccaggguaagggauauccccagcagaauaagcaucuauuggacaauaguaaaaccgggagacauacuuuugauuaacagcacagggaaucuaauugcuccucgggguuacuucaaaauacgaagugggaaaagcucaauaaugagaucagaugcacccauuggcaaaugcaauucugaaugcaucacuccaaauggaagcauucccaaugacaaaccauuucaaaauguaaacaggaucacauauggggccugucccagauauguuaagcaaaacacucugaaauuggcaacagggaugcgaaauguaccagagaaacaaacuagaggaauauuuggcgcaaucgcggguuucauagaaaaugguugggagggaaugguggaugguugguacgguuucaggcaucaaaauucugagggaacaggacaagcagcagaucucaaaagcacucaagcagcaaucaaccaaaucaaugggaagcugaauagguugaucgggaaaaccaacgagaaauuccaucagauugaaaaagaauucucagaaguagaagggagaauucaggaccucgagaaauauguugaggacacuaaaauagaucucuggucauacaacgcggagcuucuuguugcccuggagaaccaacauacaauugaucuaacugacucagaaaugaacaaacuguuugaaagaacaaaaaagcaacugagggaaaaugcugaggauaugggcaaugguuguuucaaaauauaccacaaaugugacaaugccugcauaggaucaaucagaaauggaacuuaugaccaugauguauacagagaugaagcauuaaacaaccgguuccagaucaaagguguugagcugaagucaggauacaaagauuggauccuauggauuuccuuugccauaucauguuuuuugcuuuguguugcuuuguugggguucaucaugugggccugccaaaaaggcaacauuaggugcaacauuugcauuuga

SEQ ID NO: 40872 - RNA, 1701 nt, Artificial Sequence
  derived and/or modified CDS sequence (wt) from hemagglutinin__InfluenzaA__AFJ77935
augaagacuaucauugcuuugagcuacauucuaugucugguuuucgcucaaaaacuucccggaaaugacaacagcacggcaacgcugugccuugggcaccaugcaguaccaaacggaacgguagugaaaacaaucacaaaugaccaaauugaaguuacuaaugcuacugagcugguucagaguuccucaacagguggaauaugcgacaguccucaucagauccuugauggagaaaacugcacacuaauggaugcucuauugggagacccucagugugauggcuuccaaaauaagaaaugggaccuuuuuguugaacgcagcaaagccuacagcaacuguuacccuuaugaugugccggaucaugccucccuuaggucacuaguugccucauccggcacacuggaguuuaacaaugaaagcuucaauuggacuggagucacucaaaauggaacaagcucugcuugcaaaaggagaucuaauaacaguuucuuuaguagauugaauugguugacccacuuaaaauucaaauacccagcauugaacgugacuaugccaaacaaugaaacauuugacaaauuguacauuugggggguucaccacccggguacggacaaugaccaaaucagccuauaugcucaagcaucaggaagaaucacagucucuaccaaaagaagccaacaaacuguaaucccgaauaucggaucuagacccaggguaagggauauccccagcagaauaagcaucuauuggacaauaguaaaaccgggagacauacuuuugauuaacagcacagggaaucuaauugcuccucgggguuacuucaaaauacgaagugggaaaagcucaauaaugagaucagaugcacccauuggcaaaugcaauucugaaugcaucacuccaaauggaagcauucccaaugacaaaccauuucaaaauguaaacaggaucacauauggggccugucccagauauguuaagcaaaacacucugaaauuggcaacagggaugcgaaauguaccagagaaacaaacuagaggcauauuuggcgcaaucgcggguuucauagaaaaugguugggagggaaugguggaugguugguacgguuucaggcaucaaaauucugagggaacaggacaagcagcagaucucaaaagcacucaagcagcaaucaaccaaaucaaugggaagcugaauagguugaucgggaaaaccaacgagaaauuccaucagauugaaaaagaauucucagaaguagaagggagaauucaggaccucgagaaauauguugaggacacuaaaauagaucucuggucauacaacgcggagcuucuuguugcccuggaaaaccaacauacaauugaucuaacugacucagaaaugaacaaacuguuugaaagaacaaaaaagcaacugagggaaaaugcugaggauaugggcaaugguuguuucaaaauauaccacaaaugugacaaugccugcauaggaucaaucagaaauggaacuuaugaccaugauguauacagagaugaagcauuaaacaaccgguuccagaucaaagguguugagcugaagucaggauacaaagauuggauccuauggauuuccuuugccauaucauguuuuuugcuuuguguugcuuuguugggguucaucaugugggccugccaaaaaggcaacauuaggugcaacauuugcauuuga

SEQ ID NO: 40873 - RNA, 1701 nt, Artificial Sequence
  derived and/or modified CDS sequence (wt) from hemagglutinin__InfluenzaA__AFJ77946
augaagacuaucauugcuuugagcuacauucuaugucugguuuucgcucaaaaacuucccggaaaugacaacagcacggcaacgcugugccuugggcaccaugcaguaccaaacggaacgauagugaaaacaaucacgaaugaccaaauugaaguuacuaaugcuacugagcugguucagaguuccucaacagguggaauaugcgacaguccucaucagauccuugauggagaaaacugcacacuaauagaugcucuauugggagacccucagugugauggcuuccaaaauaagaaaugggaccuuuuuguugaacgcagcaaagccuacagcaacuguuacccuuaugaugugccggauuaugccucccucaggucacuaguugccucauccggcacacuggaguuuaacaaugaaagcuucaauuggacuggagucacucaaaauggaacaagcucugcuugcaaaaggagaucuaauaacaguuucuuuaguagauugaauugguugacccacuuaaaauucaaauacccagcauugaacgugacuaugccaaacaaugaaaaauuugacaaauuguacauuugggggguucaccacccggguacggacaaugaccaaaucagccuauaugcucaagcaucaggaagaaucacagucucuaccaaaagaagccaacaaacuguaaucccgaauaucggaucuagacccaggguaagggauauccccagcagaauaagcaucuauuggacaauaguaaaaccgggagacaugcuuuugauuaacagcacagggaaucuaauugcuccucgggguuacuucaaaauacgaagugggaaaagcucaauaaugagaucagaugcacccauuggcaaaugcaauucugaaugcaucacuccaaauggaagcauucccaaugacaaaccauuucaaaauguaaacaggaucacauauggggccugucccagauauauuaagcaaaacacucugaaauuggcaacagggaugcgaaauguaccagagaaacaaacuagaggcauauuuggcgcaaucgcggguuucauagaaaaugguugggagggaaugguggaugguugguacgguuucaggcaucaaaauucugaaggaacaggacaagcagcagaucucaaaagcacucaagcagcaaucaaccaaaucaaugggaagcugaauagguugaucgggaaaaccaacgagaaauuccaucagauugaaaaagaauucucagaaguagaagggagaauucaggaccucgagaaauauguugaggacacuaaaauagaucucuggucauacaacgcggagcuucuuguugcccuggagaaccaacauacaauugaucuaacugacucagaaaugaacaaacuguuugaaagaacaaagaagcaacugagggaaaaugcugaggauaugggcaaugguuguuucaaaauauaccacaaaugugacaaugccugcauagggucaaucagaaauggaacuuaugaccaugauguauacagagaugaagcauuaaacaaccgguuccagaucaaagguguugagcugaagucaggauacaaagauuggaucauauggauuuccuuugccauaucauguuuuuugcuuuguguugcuuuguugggguucaucaugugggccugccaaaaaggcaacauuaggugcaacauuugcauuuga

SEQ ID NO: 40874 - RNA, 1701 nt, Artificial Sequence
  derived and/or modified CDS sequence (wt) from hemagglutinin__InfluenzaA__AFJ77957
augaagacuaucauugcuuugagcuacauucuaugucugguuuucgcucaaaaacuucccggaaaugacaacagcacggcaacgcugugccuugggcaccaugcaguaccaaacggaacgauagugaaaacaaucacaaaugaccaaauugaaguuacuaaugcuacugagcugguucagaguuccucaacagguggaauaugcgacaguccucaucagauccuugauggagaaaacugcacacuaauagaugcucuauugggagacccucagugugauggcuuccaaaauaagaaaugggaccuuuuuguugaacgcagcaaagccuacagcaacuguuacccuuaugaugugccggauuaugccucccuuaggucacuaauugccucauccggcacacuggaguuuaacaaugaaagcuucaauuggacuggagucacucaaaauggaacaagcucugcuugcaaaaggagaucuaauagcaguuucuuuaguagauugaauugguugacccacuuaaaauucaaauacccagcauugaacgugacuaugccaaacaaugaagaauuugacaaauuguacauuugggggguucaccacccggguacagacaaugaccaaaucagccuauaugcucaagcaucaggaagaaucacagucucuaccaaaagaagccaacaaacuguaaucccgaauaucggaucuagacccaggguaagggauauccccagcagaauaagcaucuauuggacaauaguaaaaccgggagacauacuuuugauuaacagcacagggaaucuaauugcuccucgggguuacuucaaaauacgaagugggaaaagcucaauaaugagaucagaugcacccauuggcaaaugcaauucugaaugcaucacuccaaauggaagcauucccaaugacaaaccauuucaaaauguaaacaggaucacauauggggccugucccagauauguuaagcaaaacacucugaaauuggcaacagggaugcgaaauguaccagagaaacaaacuagaggcauauuuggcgcaaucgcggguuucauagaaaaugguugggagggaaugguggaugguugguacgguuucaggcaucaaaauucugagggaauaggacaagcagcagaucucaaaagcacucaagcagcaaucgaccaaaucaaugggaagcugaauagguugaucgggaaaaccaacgagaaauuccaucagauugaaaaagaauucucagaaguagaagggagaauucaggaccucgagaaauauguugaggacacuaaaauagaucucuggucauacaacgcggagcuucuuguugcccuggagaaccaacauacaauugaucuaacugacucagaaaugaacaaacuguuugaaagaacaaagaagcaacugagggaaaaugcugaggauaugggcaaugguuguuucaaaauauaccacaaaugugacaaugccugcauagggucaaucagaaauggaacuuaugaccaugauguauacagagaugaagcauuaaacaaccgguuccagaucaaagguguugagcugaagucaggauacaaagauuggauccuauggauuuccuuugccauaucauguuuuuugcuuuguguugcuuuguugggguucaucaugugggccugccaaaaaggcaacauuaggugcaacauuugcauuuga

SEQ ID NO: 40875 - RNA, 1701 nt, Artificial Sequence; identical to SEQ ID NO: 32647
  derived and/or modified CDS sequence (wt) from hemagglutinin__InfluenzaA__AFJ77968

SEQ ID NO: 40876 - RNA, 1701 nt, Artificial Sequence
  derived and/or modified CDS sequence (wt) from hemagglutinin__InfluenzaA__AFJ77979
augaagacuaucauugcuuugagcuacauucuaugucugguuuucgcucaaaaacuucccggaaaugacaacagcacggcaacgcugugccuugggcaccaugcaguaccaaacggaacgauagugaaaacaaucacgaaugaccaaauugaaguuacuaaugcuacugagcugguucagaguuccucaacagguggaauaugcgacaguccucaucagauccuugauggagaaaacugcacacuaauagaugcucuauugggagacccucagugugauggcuuccaaaauaagaaaugggaccuuuuuguugaacgcagcaaagccuacagcaacuguuacccuuaugaugugccggauuaugccucccuuaggucacuaguugccucauccggcacacuggaguuuaacaaugaaagcuucaauuggacuggagucacucaaaauggaacaagcucugcuugcaaaaggagaucuaauaacaguuucuuuaguagauugaauugguugacccacuuaaaauucaaauacccagcauugaacgugacuaugccaaacaaugaaaaauuugacaaauuguacauuugggggguucaccacccggguacggacaaugaccaaaucuuccuguaugcucaagcaucaggaagaaucacagucucuaccaaaagaagccaacaaacuguaaucccgaauaucggaucuagacccagaguaaggaauauccccagcagaauaagcaucuauuggacaauaguaaaaccgggagacauacuuuugauuaacagcacagggaaucuaauugcuccuagggguuacuucaaaauacgaagugggaaaagcucaauaaugagaucagaugcacccauuggcaaaugcaauucugaaugcaucacuccaaauggaagcauucccaaugacaaaccauuucaaaauguaaacaggaucacauauggggccugucccagauauguuaagcaaaacacucugaaauuggcaacagggaugcgaaauguaccagagaaacaaacuagaggcauauuuggcgcaaucgcggguuucauagaaaaugguugggagggaaugguggaugguugguacgguuucaggcaucaaaauucugagggaauaggacaagcagcagaucucaaaagcacucaagcagcaaucaaucaaaucaaugggaagcugaauagguugaucgggaaaaccaacgagaaauuccaucagauugaaaaagaauucucagaaguagaagggagaauucaggaccucgagaaauauguugaggacacuaaaauagaucucuggucauacaacgcggagcuucuuguugcccuggagaaccaacauacaauugaucuaacugacucagaaaugaacaaacuguuugaaagaacaaagaagcaacugagggaaaaugcugaggauaugggcaaugguuguuucaaaauauaccacaaaugugacaaugccugcauaggaucaaucagaaauggaacuuaugaccaugauguauacagagaugaagcauuaaacaaccgguuccagaucaaaggcguugagcugaggucaggauacaaagauuggauccuauggauuuccuuugccauaucauguuuuuugcuuuguguugcuuuguugggguucaucaugugggccugccaaaaaggcaacauuaggugcaacauuugcauuuga

SEQ ID NO: 40877 - RNA, 1701 nt, Artificial Sequence
  derived and/or modified CDS sequence (wt) from hemagglutinin__InfluenzaA__AFJ77990
augaagacuaucauugcuuugagcuacauucuaugucugguuuucgcucaaaaacuucccggaaaugacaacagcacggcaacgcugugccuugggcaccaugcaguaccaaacggaacgauagugaaaacaaucacgaaugaccaaauugaaguuacuaaugcuacugagcugguucagaguuccucaacagguggaauaugcgacaguccucaucagauccuugauggagaaaacugcacacuaauagaugcucuauugggagacccucagugugauggcuuccaaaauaagaaaugggaccuuuuuguugaacgcagcaaagccuacagcaacuguuacccuuaugaugugccggauuaugccucccuuaggucacuaguugccucuuccggcacacuggaguuuaacaaugaaagcuucaauuggacuggagucacucaaaauggaacaagcucugcuugcaaaaggagaucuaauaacaguuucuuuaguagauugaauugguugacccacuuaaaauucaaauacccagcauugaacgugacuaugccaaacaaugaaaaauuugacaaauuguacauuugggggguucaccacccggguacggacaaugaccaaaucuuccuguaugcucaagcaucaggaagaaucacagucucuaccaaaagaagccaacaaacuguaaucccgaauaucggaucuagacccagaguaaggaauauccccagcagaauaagcaucuauuggacaauaguaaaaccgggagacauacuuuugauuaacagcacagggaaucuaauugcuccuagggguuacuucaaaauacgaagugggaaaagcucaauaaugagaucagaugcacccauuggcaaaugcaauucugaaugcaucacuccaaauggaagcauucccaaugacaaaccauuucaaaauguaaacaggaucacauauggggccugucccagauauguuaagcaaaacacucugaaauuggcaacagggaugcgaaauguaccagagaaacaaacuagaggcauauuuggcgcaaucgcggguuucauagaaaaugguugggagggaaugguggaugguugguacgguuucaggcaucaaaauucugagggaauaggacaagcagcagaucucaaaagcacucaagcagcaaucaaucaaaucaaugggaagcugaauagguugaucgggaaaaccaacgagaaauuccaucagauugaaaaagaauucucagaaguagaagggagaauucaggaccucgagaaauauguugaggacacuaaaauagaucucuggucauacaacgcggagcuucuuguugcccuggagaaccaacauacaauugaucuaacugacucagaaaugaacaaacuguuugaaagaacaaagaagcaacugagggaaaaugcugaggauaugggcaaugguuguuucaaaauauaccacaaaugugacaaugccugcauaggaucaaucagaaauggaacuuaugaccaugaugaauacagagaugaagcauuaaacaaccgguuccagaucaaaggcguugagcugaagucaggauacaaagauuggauccuauggauuuccuuugccauaucauguuuuuugcuuuguguuacuuuguugggguucaucaugugggccugccaaaaaggcaacauuaggugcaacauuugcauuuga

SEQ ID NO: 40878 - RNA, 1701 nt, Artificial Sequence
  derived and/or modified CDS sequence (wt) from hemagglutinin__InfluenzaA__AFJ78001
augaagacuaucauugcuuugagcuacauucuaugucugguuuucgcucaaaaacuucccggaaaugacaacagcacggcaacgcugugccuugggcaccaugcaguaccaaacggaacgauagugaaaacaaucacgaaugaccaaauugaaguuacuaaugcuacugagcugguucagaguuccucaacagguggaauaugcgacaguccucaucagauccuugauggaaaaaacugcacacuaauagaugcucuauugggagacccucagugugaugacuuccaaaauaagaaaugggaccuuuuuguugaacgcagcaaagccuacagcaacuguuacccuuaugaugugccggauuaugccucccuuaggucacuaguugccucauccggcacacuggaguuuaacaaugaaagcuucaauuggacuggagucacucaaaauggaacaagcucugcuugcaaaaggagaucuaauaacaguuucuuuaguagauugaauugguugacccacuuaaaauucaaauacccagcauugaacgugacuaugccaaacaaugaaaaauuugacaaauuguacauuugggggguucaccacccggguacggacaaugaccaaaucuuccuguaugcucaagcaucaggaagaaucacagucucuaccaaaagaagccaacaaacuguaaucccgaauaucggaucuagacccaggguaaggaauauccccagcagaauaagcaucuauuggacaauaguaaaaccgggagacauacuuuugauuaacagcacagggaaucuaauugcuccuagggguuacuucaaaauacgaagugggaaaagcucaauaaugagaucagaugcacccauuggcaaaugcaauucugaaugcaucacuccaaauggaagcauucccaaugacaaaccauuucaaaauguaaacaggaucacauauggggccugucccagauauguuaagcaaaacacucugaaauuggcaacagggaugcgaaauguaccagagaaacaaacuagaggcauauuuggcgcaaucgcggguuucauagaaaaugguugggagggaaugguggaugguugguacgguuucaggcaucaaaauucugagggaauaggacaagcagcagaucucaaaagcacucaagcagcaaucaaucaaaucaaugggaagcugaauagguugaucgggaaaaccaacgagaaauuccaucagauugaaaaagaauucucagaaguagaagggagaauucaggaccucgagaaauauguugaggacacuaaaauagaucucuggucauacaacgcggagcuucuuguugcccuggagaaccaacauacaauugaucuaacugacucagaaaugaacaaacuguuugaaagaacaaagaagcaacugagggaaaaugcugaggauaugggcaaugguuguuucaaaauauaccacaaaugugacaaugccugcauaggaucaaucagaaauggaacuuaugaccaugauguauacagagaugaagcauuaaacaaccgguuccagaucaaaggcguugagcugaagucaggauacaaagauuggauccuauggauuuccuuugccauaucauguuuuuugcuuuguguuacuuuguugggguucaucaugugggccugccaaaaaggcaacauuaggugcaacauuugcauuuga

SEQ ID NO: 40879 - RNA, 1701 nt, Artificial Sequence
  derived and/or modified CDS sequence (wt) from hemagglutinin__InfluenzaA__AFJ78012
augaagacuaucauugcuuugagcuacauucuaugucugguuuucgcucaaaaacuucccggaaaugacaacagcacggcaacgcugugccuugggcaccaugcaguaccaaacggaacgauagugaaaacaaucacgaaugaccaaauugaaguuacuaaugcuacugagcugguucagaguuccucaacagguggaauaugcgacaguccucaucagauccuugauggagaaaacugcacacuaauagaugcucuauugggagacccucagugugauggcuuccaaaauaagaaaugggaccuuuuuguugaacgcagcaaagcccacagcaacuguuacccuuaugaugugccggauuaugccucccuuaggucacuaguugccucauccggcacacuggaguuuaacaaugaaagcuucaauuggacuggagucacucaaaauggaacaagcucugcuugcaaaaggagaucuaauaacaguuucuuuaguagauugaauugguugacccacuuaaaauucaaauacccagcauugaacgugacuaugccaaacaaugaaaaauuugacaaauuguacauuugggggguucaccacccggguacggacaaugaccaaaucuuccuguaugcucaagcaucaggaagaaucacagucucuaccaaaagaagccaacaaacuguaaucccgaauaucggaucuagacccagaguaaggaauauccccagcagaauaagcaucuauuggacaauaguaaaaccgggagacauacuuuugauuaacagcacagggaaucuaauugcuccuagggguuacuucaaaauacgaagugggaaaagcucaauaaugagaucagaugcacccauuggcaaaugcaauucugaaugcaucacuccaaauggaagcauucccaaugacaaaccauuucaaaauguaaacaggaucacauacggggccugucccagauauguuaagcaaaacacucugaaauuggcaacagggaugcgaaauguaccagagaaacaaacuagaggcauauuuggcgcaaucgcggguuucauagaaaaugguugggagggaaugguggaugguugguacgguuucaggcaucaaaauucugagggaauaggacaagcagcagaucucaaaagcacucaagcagcaaucgaucaaaucaaugggaagcugaauagguugaucgggaaaaccaacgagaaauuccaucagauugaaaaagaauucucagaaguagaagggagaauucaggaccucgagaaauauguugaggacacuaaaauagaucucuggucauacaacgcggagcuucuuguugcccuggagaaccaacauacaauugaucuaacugacucagaaaugaacaaacuguuugaaagaacaaagaagcaacugagggaaaaugcugaggauaugggcaaugguuguuucaaaauauaccacaaaugugacaaugccugcauaggaucaaucagaaauggaacuuaugaccaugauguauacagagaugaagcauuaaacaaccgguuccagaucaagggcguugagcugaagucaggauacaaagauuggauccuauggauuuccuuugccauaucauguuuuuugcuuuguguugcuuuguugggguucaucaugugggccugccaaaaaggcaacauuaggugcaacauuugcauuuga

SEQ ID NO: 40880 - RNA, 1701 nt, Artificial Sequence
  derived and/or modified CDS sequence (wt) from hemagglutinin__InfluenzaA__AFJ78023
augaagacuaucauugcuuugagcuacauucuaugucugguuuucgcucaaaaacuucccggaaaugacaacagcacggcaacgcugugccuugggcaccaugcaguaccaaacggaacgauagugaaaacaaucacgaaugaucaaauugaaguuacuaaugcuacugagcugguucagaguuccucaacagguggaauaugcgacaguccucaucagauccuugauggagaaaacugcacacuaauagaugcucuauugggagacccucagugugauggcuuccaaaauaagaaaugggaccuuuuuguugaacgcagcaaagccuacagcaacuguuacccuuaugaugugccggauuaugccucccuuaggucacuaguugccucauccggcacacuggaguuuaacaaugaaagcuucaauuggacuggagucacucaaaauggaacaagcucugcuugcaaaaggaaaucuaauaacaguuucuuuaguagauugaauugguugacccacuuaaaauucaaauacccagcauugaacgugacuaugccaaacaaugaaaaauuugacaaauuguacauuugggggguucaccacccggguacagacaaugaccaaaucuuccuguaugcucaagcaucaggaagaaucacagucucuaccaaaagaagccaacaaacuguaaucccgaauaucggaucuagacccagaguaaggaauauccccagcagaauaagcaucuauuggacaauaguaaaaccgggagacauacuuuugauuaacagcacagggaaucuaauugcuccuagggguuacuucaaaauacgaagugggaaaagcucaauaaugagaucggaugcacccauuggcaaaugcaauucugaaugcaucacuccaaauggaagcauucccaaugacaaaccauuucaaaauguaaacaggaucacauauggggccugucccagauauguuaagcaaaacacucugaaauuggcaacagggaugcgaaacguaccagagaaacaaacuagaggcauauuuggcgcaaucgcggguuucauagaaaaugguugggagggaaugguggaugguugguacgguuucaggcaucaaaauucugagggaauaggacaagcagcagaucucaaaagcacucaagcagcaaucaaucaaaucaaugggaagcugaauagguugaucgggaaaaccaacgagaaauuccaucagauugaaaaagaauucucagaaguagaagggagaauucaggaccucgagaaauauguugaggacacuaaaauagaucucuggucauacaacgcggagcuucuuguugcccuggagaaccaacauacaauugaucuaacugacucagaaaugaacaaacuguuugaaagaacaaagaagcaacugagggaaaaugcugaggauaugggcaaugguuguuucaaaauauaccacaaaugugacaaugccugcauaggaucaaucagaaauggaacuuaugaccaugauguauacagagaugaagcauuaaacaaccgguuccagaucaaaggcguugagcugaagucaggauacaaagauuggauccuauggauuuccuuugccauaucauguuuuuugcuuuguguugcuuuguugggguucaucaugugggccugccaaaaaggcaacauuaggugcaacauuugcauuuga

SEQ ID NO: 40881 - RNA, 1701 nt, Artificial Sequence
  derived and/or modified CDS sequence (wt) from hemagglutinin__InfluenzaA__AFJ78034
augaagacuaucauugcuuugagcuacauucuaugucugguuuucgcucaaaaacuucccggaaaugacaacagcacggcaacgcugugccuugggcaccaugcaguaccaaacggaacgauagugaaaacaaucacgaaugaucaaauugaaguuacuaaugcuacugagcugguucagaguuccucaacagguggaauaugcgacaguccucaucagauccuugauggagaaaacugcacacuaauagaugcucuauugggagacccucagugugauggcuuccaaaauaagaaaugggaccuuuuuguugaacgcagcaaagccuacagcaacuguuacccuuaugaugugccggauuaugccucccuuaggucacuaguugccucauccggcacacuggaguuuaacaaugaaagcuucaauuggacuggagucacucaaaauggaacaagcucugcuugcaaaaggagaucuaauaacaguuucuuuaguagauugaauugguugacccacuuaaaauucaaauacccagcauugaacgugacuaugccaaacaaugaaaaauuugacaaauuguacauuugggggguucaccacccggguacagacaaugaccaaaucuuccuguaugcucaagcaucaggaagaaucacagucucuaccaaaagaagccaacaaacuguaaucccgaauaucggaucuagacccagaguaaggaauauccccagcagaauaagcaucuauuggacaauaguaaaaccgggagacauacuuuugauuaacagcacagggaaucuaauugcuccuagggguuacuucaaaauacgaagugggaaaagcucaauaaugagaucggaugcacccauuggcaaaugcaauucugaaugcaucacuccaaauggaagcauucccaaugacaaaccauuucaaaauguaaacaggaucacauauggggccugucccagauauguuaagcaaaacacucugaaauuggcaacagggaugcgaaacguaccagagaaacaaacuagaggcauauuuggcgcaaucgcggguuucauagaaaaugguugggagggaaugguggaugguugguacgguuucaggcaucaaaauucugagggaauaggacaagcagcagaucucaaaagcacucaagcagcaaucaaucaaaucaaugggaagcugaauagguugaucgggaaaaccaacgagaaauuccaucagauugaaaaagaauucucagaaguagaagggagaauucaggaccucgagaaauauguugaggacacuaaaauagaucucuggucauacaacgcggagcuucuuguugcccuggagaaccaacauacaauugaucuaacugacucagaaaugaacaaacuguuugaaagaacaaagaagcaacugagggaaaaugcugaggauaugggcaaugguuguuucaaaauauaccacaaaugugacaaugccugcauaggaucaaucagaaauggaacuuaugaccaugauguauacagagaugaagcauuaaacaaccgguuccagaucaaaggcguugagcugaagucaggauacaaagauuggauccuauggauuuccuuugccauaucauguuuuuugcuuuguguugcuuuguugggguucaucaugugggccugccaaaaaggcaacauuaggugcaacauuugcauuuga

SEQ ID NO: 40882 - RNA, 1701 nt, Artificial Sequence
  derived and/or modified CDS sequence (wt) from hemagglutinin__InfluenzaA__AFJ78045
augaagacuaucauugcuuugagcuacauucuaugucugguuuucgcucaaaaacuucccggaaaugacaacagcacggcaacgcugugccuugggcaccaugcaguaccaaacggaacgauagugaaaacaaucacgaaugaccaaauugaaguuacuaaugcuacugagcugguucagaguuccucaacagguggaauaugcgacaguccucaucagauccuugauggagaaaacugcacacuaauagaugcucuauugggagacccucagugugauggcuuccaaaauaagaaaugggaccuuuuuguugaacgcagcagagccuacagcaacuguuacccuuaugaugugccggauuaugccucccuuaggucacuaguugccucauccggcacacuggaguuuaacaaugaaagcuucaauuggacuggagucacucaaaauggaacaagcucugcuugcaaaaggagaucuaauaacaguuucuuuaguagacugaauugguugacccacuuaaaauucaaauacccagcauugaacgugacuaugccaaacaaugaaaaauuugacaaauuguacauuugggggguucaccacccggguacggacaaugaccaaaucuuccuguaugcucaagcaucaggaagaaucacagucucuaccaaaagaagccaacaaacuguaaucccgaauaucggaucuaggcccagaguaaggaauauccccagcagaauaagcaucuauuggacaauaguaaaaccgggagacauacuuuugauuaacagcacagggaaucuaauugcuccuagggguuacuucaaaauacgaagugggaaaagcucaauaaugagaucagaugcacccauuggcaaaugcaauucugaaugcaucacuccaaauggaagcauucccaaugacaaaccauuucaaaauguaaacaggaucacauauggggccugucccagauauguuaagcaaaacacucugaaauuggcaacagggaugcgaaauguaccagagaaacaaacuagaggcauauuuggcgcaaucgcggguuucauagaaaaugguugggagggaaugguggaugguugguacgguuucaggcaucaaaauucugagggaaugggacaagcagcagaucucaaaagcacucaagcagcaaucaaucaaaucaaugggaagcugaauagguugaucgggaaaaccaacgagaaauuccaucagauugaaaaagaauucucagaaguagaagggagaauucaggaccucgagaaauauguugaggacacuaaaauagaucucuggucauacaacgcggagcuucuuguugcccuggagaaccaacauacaauugaucuaacugacucagaaaugaacaaacuguuugaaagaacaaagaagcaacugagggaaaaugcugaggauaugggcaaugguuguuucaaaauauaccacaaaugugacaaugccugcauaggaucaaucagaaauggaacuuaugaccaugauguauacagagaugaagcuuuaaacaaccgguuccagaucaaaggcguugagcugaagucaggauacaaagauuggauccuauggauuuccuuugccauaucauguuuuuugcuuuguguugcuuuguugggguucaucaugugggccugccaaaaaggcaacauuaagugcaacauuugcauuuga

SEQ ID NO: 40883 - RNA, 1701 nt, Artificial Sequence; identical to SEQ ID NO: 32647
  derived and/or modified CDS sequence (wt) from hemagglutinin__InfluenzaA__AFJ78056

SEQ ID NO: 40884 - RNA, 1701 nt, Artificial Sequence
  derived and/or modified CDS sequence (wt) from hemagglutinin__InfluenzaA__AFJ78067
augaagacuaucauugcuuugagcuacauucuaugucugguuuucgcucaaaaacuucccggaaaugacaacagcacggcaacgcugugccuugggcaccaugcaguaccaaacggaacgauagugaaaacaaucacgaaugaccaaauugaaguuacuaaugcuacugagcugguucagaguuccucaacagguggaauaugcgacaguccucaucagauccuugauggagaaaauugcacacuaauagaugcucuauugggagacccucagugugauggcuuccaaaauaagaaaugggaccuuuuuguugaacgcagcaaagccuacagcaacuguuacccuuaugaugugccggauuaugccucccuuaggucacuaguugccucauccggcacacuggaguuuaacaaugaaagcuucaauuggacuggagucacucaaaauggaacaagcucugcuugcaaaaggagaucuaauaacaguuucuuuaguagauugaauugguugacccacuuaaaauucaaauacccagcauugaacgugacuaugccaaacaaugaaaaauuugacaaauuguacauuugggggguucaccacccggguacggacaaugaccaaaucuuccuguaugcucaagcaucaggaagaaucacagucucuaccaaaagaagccaacaaacuguaaucccgaauaucggaucuagacccagaguaaggaauauccccagcagaauaagcaucuauuggacaauaguaaaaccgggagacauacuuuugauuaacagcacagggaaucuaauugcuccuagggguuacuucaaaauacgaagugggagaagcucaauaaugagaucagaugcacccauuggcaaaugcaauucugaaugcaucacuccaaauggaagcauucccaaugacaaaccauuucaaaauguaaacaggaucacauauggggccugucccagauauguuaagcaaaacacucugaaauuggcaacagggaugcgaaauguaccagagaaacaaacuagaggcauauuuggcgcaaucgcggguuucauagaaaaugguugggagggaaugguggaugguugguacgguuucaggcaucaaaauucugagggaauagggcaagcagcagaucucaaaagcacucaagcagcaaucaaucaaaucaaugggaagcugaauagguugaucgggaaaaccaacgagaaauuccaucagauugaaaaagaauucucagaaguagaagggagaauucaggaccucgagaaauauguugaggacacuaaaauagaucucuggucauacaacgcggagcuucuuguugcccuggagaaccaacauacaauugaucuaacugacucagaaaugaacaaacuguuugaaagaacaaagaagcaacugagggaaaaugcugaggauaugggcaaugguuguuucaaaauauaccacaaaugugacaaugccugcauaggaucaaucagaaauggaacuuaugaccaugauguauacagagaugaagcauuaaacaaccgguuccagaucaaaggcguugagcugaagucaggcuacaaagauuggauccuauggauuuccuuugccauaucauguuuuuugcuuuguguugcuuuguugggguucaucaugugggccugccaaaaaggcaacauuaggugcaacauuugcauuuaa

SEQ ID NO: 40885 - RNA, 1701 nt, Artificial Sequence
  derived and/or modified CDS sequence (wt) from hemagglutinin__InfluenzaA__AFJ78078
augaagacuaucauugcuuugagcuacauucuaugucugguuuucgcucaaaaacuucccggaaaugacaacagcacggcaacgcugugccuugggcaccaugcaguaccaaauggaacgauagugaaaacaaucacgaaugaccaaauugaaguuacuaaugcuacugagcugguucagaguuccucaacagguggaauaugcgacaguccucaucagauccuugauggagaaaacugcacacuaauagaugcucuauugggagacccucagugugauggcuuccaaaauaagaaaugggaccuuuuuguugaacgcagcaaagccuacagcaacuguuacccuuaugaugugccggauuaugccucccuuaggucacuaguugccucauccggcacacuggaguuuaacaaugaaagcuucaauuggacuggagucacucaaaacggaacaagcucugcuugcaaaaggagaucuaauaacaguuucuuuaguagauugaauugguugacccacuuaaaauucaaauacccagcauugaacgugacuaugccaaacaaugaaaaauuugacaaauuguacauuugggggguucaccacccggguacagacaaugaccaaaucuuccuguaugcucaagcaucaggaagaaucacagucucuaccaaaagaagucaacaaacuguaaucccgaauaucggaucuagacccagaguaaggaauauccccagcagaauaagcaucuauuggacaauaguaaaaccgggagacauacuuuugauuaacagcacagggaaucuaauugcuccuagggguuacuucaaaauacgaagugggaaaagcucaauaaugagaucagaugcacccauugacaaaugcaauucugaaugcaucacuccaaauggaagcauucccaaugacaaaccauuucaaaauguaaacaggaucacauacggggccugucccagauauguuaagcaaaacacucugaaauuggcaacagggaugcgaaauguaccagagaaacaaacuagaggcauauuuggcgcaaucgcggguuucauagaaaaugguugggagggaaugguggaugguugguacgguuucaggcaucaaaauucugagggaauaggacaagcagcagaucucaaaagcacucaagcagcaaucgaucaaaucaaugggaagcugaauagguugaucgggaaaaccaaugagaaauuccaucagauugaaaaagaauucucagaaguagaagggagaauucaggaccucgagaaauauguugaggacacuaaaauagaucucuggucauacaacgcggagcuucuuguugcccuggagaaccaacauacaauugauuuaacugacucagaaaugaacaaacuguuugaaaaaacaaagaagcaacugagggaaaaugcugaggauaugggcaaugguuguuucaaaauauaccacaaaugugacaaugccugcauaggaucaaucagaaauggaacuuaugaccaugauguauacagagaugaagcauuaaacaaccgcuuccagaucaagggcguugagcugaagucaggauacaaagauuggauccuauggauuuccuuugccauaucauguuuuuugcuuuguguugcuuuguugggguucaucaugugggccugccaaaaaggcaacauuaggugcaacauuugcauuuga

SEQ ID NO: 40886 - RNA, 1701 nt, Artificial Sequence; identical to SEQ ID NO: 40809
  derived and/or modified CDS sequence (wt) from hemagglutinin__InfluenzaA__AFJ78089

SEQ ID NO: 40887 - RNA, 1701 nt, Artificial Sequence
  derived and/or modified CDS sequence (wt) from hemagglutinin__InfluenzaA__AFJ78100
augaagacuaucauugcuuugagcuacauucuaugucugguuuucgcucaaaaacuucccggaaaugacaacagcacggcaacgcugugccuugggcaccaugcaguaccaaacggaacgauagugaaaacaaucacgaaugaccaaauugaaguuacuaaugcuacugagcugguucagaguuccucaacagguggaauaugcgacaguccucaucagauccuugauggagaaaacugcacacuaauagaugcucuauugggagacccucagugugauggcuuccaaaauaagaaaugggaccuuuuuguugaacgcagcaaagccuacagcaacuguuacccuuaugaugugccggauuaugccucccuuaggucacuaguugccucauccggcacacuggaguuuaacaaugaaagcuucaauuggacuggagucacucaaaacggaacaagcucugcuugcaaaaggagaucuaauaacaguuucuuuaguagauugaauugguugacccacuuaaaauucaaauacccagcauugaacgugacuaugccaaacaaugaaaaauuugacaaauuguacauuugggggguucaccacccggguacagacaaugaccaaaucuuccuguaugcucaagcaucaggaagaaucacagucucuaccaaaagaagucaacaaacuguaaucccgaauaucggaucuagacccagaguaaggaauauccccagcagaauaagcaucuauuggacaauaguaaaaccgggagacauacuuuugauuaacagcacagggaaucuaauugcuccuagggguuacuucaaaauacgaagugggaaaagcucaauaaugagaucagaugcacccauuggcaaaugcaauucugaaugcaucacuccaaauggaagcauucccaaugacaaaccauuucaaaauguaaacaggaucacauacggggccugucccagauauguuaagcaaaacacucugaaauuggcaacagggaugcgaaauguaccagagaaacaaacuagaggcauauuuggcgcaaucgcggguuucauagaaaaugguugggagggaaugguggaugguugguacgguuucaggcaucaaaauucugagggaauaggacaagcagcagaucucaaaagcacucaagcagcaaucgaucaaaucaaugggaagcugaauagauugaucgggaaaaccaaugagaaauuccaucagauugaaaaagaauucucagaaguagaagggagaauucaggaccucgagaaauauguugaggacacuaaaauagaucucuggucauacaacgcggagcuucuuguugcccuggagaaccaacauacaauugauuuaacugacucagaaaugaacaaacuguuugaaaaaacaaagaagcaacugagggaaaaugcugaggauaugggcaaugguuguuucaaaauauaccacaaaugugacaaugccugcauaggaucaaucagaaauggaacuuaugaccaugauguauacagagaugaagcauuaaacaaccgguuccagaucaagggcguugagcugaagucaggauacaaagauuggauccuauggauuuccuuugccauaucauguuuuuugcuuuguguugcuuugcugggguucaucaugugggccugccaaaaaggcaacauuaggugcaacauuugcauuuga

SEQ ID NO: 40888 - RNA, 1701 nt, Artificial Sequence
  derived and/or modified CDS sequence (wt) from hemagglutinin__InfluenzaA__AFJ78111
augaagacuaucauugcuuugagcuacauucuaugucugguuuucgcucaaaaacuucccggaaaugacaacagcacggcaacgcugugccuugggcaccaugcaguaccaaacggaacgauagugaaaacaaucacgaaugaccaaauugaaguuacuaaugcuacugagcugguucagaguuccucaacagguggaauaugcgacaguccucaucagauccuugauggagaaaacugcacucuaauagaugcucuauugggagacccucagugugauggcuuccaaaauaagaaaugggaccuuuuuguugaacgcagcaaagccuacagcaacuguuacccuuaugaugugccggauuaugccucccuuaggucacuaguugccucauccggcacacuggaguuuaacaaugaaagcuucaauuggacuggagucacucaaaacggaacaagcucugcuugcaaaaggagaucuaauaacaguuucuuuaguagauugaauugguugacccacuuaaaauucaaauacccagcauugaacgugacuaugccaaacaaugaaaacuuugacaaauuguacauuugggggguucaccacccggguacagacaaugaccaaaucuuccuguaugcucaagcaucaggaagaaucacagucucuaccaaaagaagucaacaaacuguaaucccgaauaucggaucuagacccagaguaaggaauauccccagcagaauaagcaucuauuggacaauaguaaaaccgggagacauacuuuugauuaacagcacagggaaucuaauugcuccuagggguuacuucaaaauacgaagugggaaaagcucaauaaugagaucagaugcacccauuggcaaaugcaauucugaaugcaucacuccaaauggaagcauucccaaugacaaaccauuucaaaauguaaacaggaucacauacggggccugucccagauauguuaagcaaaacacucugaaauuggcaacagggaugcgaaauguaccagagaaacaaacuagaggcauauuuggcgcaauagcggguuucauagaaaaugguugggagggaaugguggaugguugguacgguuucagacaucaaaauucugagggaauaggacaagcagcagaucucaaaagcacucaagcagcaaucgaucaaaucaaugggaagcugaauagguugaucgggaaaaccaaugagaaauuccaucagauugaaaaagaauucucagaaguagaagggagaauucaggaccucgagaaauauguugaggacacuaaaauagaucucuggucauacaacgcggagcuucuuguugcccuggagaaccaacauacaauugauuuaacugacucagaaaugaacaaacuguuugaaaaaacaaagaagcaacugagggaaaaugcugaggauaugggcaaugguuguuucaaaauauaccacaaaugugacaaugccugcauaggaucaaucagaaauggaacuuaugaccaugauguauacagagaugaagcauuaaacaaccgguuccagaucaagggcguugagcugaagucaggauacaaagauuggauccuauggauuuccuuugccauaucauguuuuuugcuuuguguugcuuuguugggguucaucaugugggccugccaaaaaggcaacauuaggugcaacauuugcauuuga

SEQ ID NO: 40889 - RNA, 1701 nt, Artificial Sequence
  derived and/or modified CDS sequence (wt) from hemagglutinin__InfluenzaA__AFJ78122
augaagacuaucauugcuuugagcuacauucuaugucugauuuucgcucaaaaacuucccggaaaugacaacagcacggcaacgcugugccuugggcaccaugcaguaccaaacggaacgauagugaaaacaaucacgaaugaccaaauugaaguuacuaaugcuacugagcugguucagaguuccucaacagguggaauaugcgauaguccucaucagauccuugauggagaaaacugcacacuaauagaugcucuauugggagacccucagugugauggcuuccaaaauaagaaaugggaccuuuuuguugaacgcagcaaagccuacagcaacuguuacccuuaugaugugccggauuaugccucccuuaggucacuaguugccucauccggcacacuggaguuuaacaaugaaagcuucaauuggacuggagucacucaaaacggaacaagcucugcuugcaaaaggagaucuaauaacaguuucuuuaguagauugaauugguugacccacuuaaaauucaaauacccagcauugaacgugacuaugccaaacaaugaaaaauuugacaaauuguacauuugggggguucaccacccggguacagacaaugaccaaaucuuccuguaugcucaagcaucaggaagaaucacagucucuaccaaaagaagucaacaaacuguaaucccgaauaucggaucuagacccagaguaaggaauauccccagcagaauaagcaucuauuggacaauaguaaaaccgggagacauacuuuugauuaacagcacagggaaucuaauugcuccuagggguuacuucaaaauacggagugggagaagcucaauaaugagaucagaugcacccauugacaaaugcaauucugaaugcaucacuccaaauggaagcauucccaaugacaaaccauuucaaaauguaaacaggaucacauacggggccugucccagauauguuaagcaaaacacucugaaauuggcaacagggaugcgaaauguaccagagaaacaaacuagaggcauauuuggcgcaaucgcggguuucauagaaaaugguugggagggaaugguggaugguugguacgguuucaggcaucaaaauucugagggaauaggacaagcagcagaucucaaaagcacucaagcagcaaucgaucaaaucaaugggaagcugaauagguugaucaggaaaaccaaugagaaauuccaucagauugaaaaagaauucucagaaguagaagggagaauucaggaccucgagaaauauguugaggacacuaaaauagaucucuggucauacaacgcggagcuucuuguugcccuggagaaccaacauacaauugauuuaacugacucagaaaugaacaaacuguuugaaaaaacaaagaagcaacugagggaaaaugcugaggauaugggcaaugguuguuucaaaauauaccacaaaugugacaaugccugcauaggaucaaucagaaauggaacuuaugaccaugauguauacagagaugaagcauuaaacaaccgguuccagaucaagggcguugagcugaagucaggauacaaagauuggauccuauggauuuccuuugccauaucauguuuuuugcuuuguguugcuuuguugggguucaucaugugggccugccaaaaaggcaacauuaggugcaacauuugcauuuga

SEQ ID NO: 40890 - RNA, 1701 nt, Artificial Sequence
  derived and/or modified CDS sequence (wt) from hemagglutinin__InfluenzaA__AFJ78144
augaagacuaucauugcuuugagcuacauucuaugucugguuuucgcucaaaaacuuccuggaaaugacaacagcacggcaacgcugugccuugggcaccaugcaguaccaaacggaacgauagugaaaacaaucacgaaugaccaaauugaaguuacuaaugcuacugagcugguucagaguuccucaacaggugaaauaugcgacaguccucaucagauccuugauggagaaaacugcacacuaauagaugcucuauugggagacccucagugugauggcuuccaaaauaagaaaugggaccuuuuuguugaacgcagcaaagccuacagcaacuguuacccuuaugaugugccggauuaugccucccuuaggucacuaguugccucauccggcacacuggaguuuaacaaugaaagcuucaauuggacuggagucacucaaaacggaacaagcucuucuugcauaagaagaucuaauaacaguuucuuuaguagauugaauugguugacccacuuaaaauucaaauauccagcauugaacgugacuaugccaaacaaugaaaaauuugacaaauuguacauuugggggguucaccacccggguacggacaaugaccaaaucuuccuguaugcucaagcaucaggaagaaucacagucucuaccaaaagaagccaacaaacuguaaucccgaauaucggaucuagacccagaguaaggaauauccccagcagaauaagcaucuauuggacaauaguaaaaccgggagacauacuuuugauuaacagcacagggaaucuaauugcuccuagggguuacuucaaaauacgaagugggaaaagcucaauaaugagaucagaugcacccauuggcaaaugcaauucugaaugcaucacuccaaauggaagcauucccaaugacaaaccauuccaaaauguaaacaggaucacauacggggccugucccagauauguuaagcaaaacacucugaaauuggcaacagggaugcgaaauguaccagagaaacaaacuagaggcauauuuggcgcaaucgcggguuucauagaaaaugguugggagggaaugguggaugguugguacgguuucaggcaucaaaauucugagggaauaggacaagcagcagaucucaaaagcacucaagcagcaaucgaucaaaucaaugggaagcugaauagguugaucgggaaaaccaacgagaaauuccaucagauugaaaaagaauucucagaagucgaagggaggauucaggaccuugagaaauauguugaggacaccaaaguagaucucuggucauacaacgcggagcuucuuguugcccuggagaaccaacauacaauugaucuaacugacucagaaaugaacaaacuguuugaaaaaacaaagaagcaacugagggaaaaugcugaggauaugggcaaugguuguuucaaaauauaccacaaaugugacaaugccugcauaggaucaaucagaaauggaacuuaugaccacgauguauacagagaugaagcauuaaacaaccgguuccagaucaagggcguugagcugaagucaggauacaaagauuggauccuauggauuuccuuugccauaucauguuuuuugcuuuguguugcuuuguugggguucaucaugugggccugccaaaaaggcaacauuaggugcaacauuugcauuuga

SEQ ID NO: 40891 - RNA, 1701 nt, Artificial Sequence; identical to SEQ ID NO: 40890
  derived and/or modified CDS sequence (wt) from hemagglutinin__InfluenzaA__AFJ78155

SEQ ID NO: 40892 - RNA, 1701 nt, Artificial Sequence
  derived and/or modified CDS sequence (wt) from hemagglutinin__InfluenzaA__AFJ78166
augaagacuaucauugcuuugagcuacauucuaugucugguuuucgcucaaaaacuuccuggaaaugacaacagcacggcaacgcugugccuugggcaccaugcaguaccaaacggaacgauagugaaaacaaucacgaaugaccaaauugaaguuacuaaugcuacugagcugguucagaguuccucaacaggugaaauaugcgacaguccucaucagauccuugauggagaaaacugcacacuaauagaugcucuauugggagacccucagugugauggcuuccaaaauaagaaaugggaccuuuuuguugaacgcagcaaagccuacagcaacuguuacccuuaugaugugccggauuaugccucccuuaggucacuaguugccucauccggcacacuggaguuuaacaaugaaagcuucaauuggacuggagucacucaaaacggaacaagcucugcuugcauaaggagaucuaauaacaguuucuuuaguagauugaauugguugacccacuuaaaauucaaauacccagcauugaacgugacuaugccaaacaaugaagaauuugacaaauuguacauuugggggguucaccacccggguacggacaaugaccaaaucuuccuguaugcucaagcaucaggaagaaucacagucucuaccaaaagaagccaacaaacuguaaucccgaauaucggaucuagacccagaguaaggaauauccccagcagaauaagcaucuauuggacaauaguaaaaccgggagacauacuuuugauuaacagcacagggaaucuaauugcuccuagggguuacuucaaaauacgaagugggaaaagcucaauaaugagaucagaugcacccauuggcaaaugcaauucugaaugcaucacuccaaauggaagcauucccaaugacaaaccauuccaaaauguaaacaggaucacauacggggccugucccagauauguuaagcaaaacacucugaaauuggcaacagggaugcgaaauguaccagagaaacaaacuagaggcauauuuggcgcaaucgcggguuucauagaaaaugguugggagggaaugguggaugguugguacgguuucaggcaucaaaauucugagggaauaggacaagcagcagaucucaaaagcacucaagcagcaaucgaucaaaucaaugggaagcugaauagguugaucgggaaaaccaacgagaaauuccaucagauugaaaaagaauucucagaagucgaagggagaauucaggaccuugagaaauauguugaggacaccaaaauagaucucuggucauacaacgcggagcuucuuguugcccuggagaaccaacauacaauugaucuaacugacucagaaaugaacaaacuguuugaaaaaacaaagaggcaacugagggaaaaugcugaggauaugggcaaugguuguuucaaaauauaccacaaaugugacaaugccugcauaggaucaaucagaaauggaacuuaugaccacgauguauacagagaugaagcauuaaacaaccgguuccagaucaagggcguugagcugaagucaggauacaaagauuggauccuauggauuuccuuugccauaucauguuuuuugcuuuguguugcuuuguugggguucaucaugugggccugccaaaaaggcaacauuaggugcaacauuugcauuuga

SEQ ID NO: 40893 - RNA, 1701 nt, Artificial Sequence
  derived and/or modified CDS sequence (wt) from hemagglutinin__InfluenzaA__AFJ78177
augaagaccaucauugcuuugagcuacauucuaugucugguuuucgcucaaaaacuucccggaauugacaacagcacggcaacgcugugccuugggcaccaugcaguaccaaacggaacgauagugaaaacaaucacgaaugaccaaauugaaguuacuaaugcuacugagcugguucagaguuccucaacagguggaauaugcgacaguccucaucagauccuugauggagaaaacugcacacuaauagaugcucuauugggagacccucagugugauggcuuccaaaauaagaaaugggaccuuuuuguugaacgcagcaaagccuacagcaacuguuacccuuaugaugugccggauuaugccucccuuaggucacuaguugccucauccggcacacuggaguuuaacaaugaaagcuucaauuggacuggagucacucaaaauggaacaagcucugcuugcaaaaggggaucuaauaacaguuucuuuaguagauugaauugguugacccacucaaaauucaaauacccagcauugaacgugacuaugccaaacaaugaagaauuugacaaauuguacauuugggggguucaccacccggguacggacaaugaccaaaucuuccuguaugcucaagcaucaggaagaaucacagucucuaccaaaagaagccaacaaacuguaaucccgaauaucggaucuagacccagaguaaggaauauccccagcagaauaagcaucuauuggacaauaguaaaaccgggagacauacuuuugauuaacagcacagggaaucuaauugcuccuagggguuacuucaaaauacgaagugggaaaagcucaauaaugagaucagaugcacccauuggcaaaugcaauucugaaugcaucacuccaaauggaagcauucccaaugacaaaccauuucaaaauguaaacaggaucacauacggggccugucccagauauguuaagcaaaacacucugaaauuggcaacagggaugcgaaauguaccagagaaacaaacuagaggcauauuuggcgcaaucgcggguuucauagaaaaugguugggagggaaugguggaugguugguacgguuucaggcaucaaaauucugagggaauaggacaagcagcagaucucaaaagcacucaagcagcaaucgaucaaaucaaugggaagcugaauagguugaucgggaaaaccaacgagaaauuccaccagauugaaaaagaauuuucagaaguagaagggagaauucaggaccucgagaaauauguugaggacacuaaaauagaucucuggucauacaacgcggagcuucuuguugcccuggagaaccaacauacaauugaucuaacugacucagaaaugaacaaacuguuugaaaagacaaagaagcaacugagggaaaaugcugaggauaugggcaaugguuguuucaaaauauaccacaaaugugacaaugccugcauaggaucaaucagaaauggaacuuaugaccaugauguauacagagaugaagcauuaaacaaccgguuucagaucaagggcguugagcugaagucaggauacaaagauuggauccuauggauuuccuuugccauaucauguuuuuugcuuuguguugcuuuguugggguucaucaugugggccugccaaaaaggcaacauuaggugcaacauuugcauuuga

SEQ ID NO: 40894 - RNA, 1701 nt, Artificial Sequence
  derived and/or modified CDS sequence (wt) from hemagglutinin__InfluenzaA__AFJ78188
augaagacuaucauugcuuugagcuacauucuaugucugguuuucgcucaaaaacuuccuggaaaugacaacagcacggcaacgcugugccuugggcaccaugcaguaccaaacggaacgauagugaaaacaaucacgaaugaccaaauugaaguuacuaaugcuacugagcugguucagaguuccucaacaggugaaauaugcgacaguccucaucagauccuugauggagaaaacugcacacuaauagaugcucuauugggagacccucagugugauggcuuccaaaauaagaaaugggaccuuuuuguugaacgcagcaaagccuacagcaacuguuacccuuaugaugugccggauuaugccucccuuaggucacuaguugccucauccggcacacuggaguuuaacaaugaaagcuucaauuggacuggagucacucaaaacggaacaagcucugcuugcauaaggagaucuaauaacaguuucuuuaguagauugaauugguugacccacuuaaaauucaaauacccagcauugaacgugacuaugccaaacaaugaaaaauuugacaaauuguacauuugggggguucaccacccggguacggacaaugaccaaaucuuccuguaugcucaagcaucaggaagaaucacagucucuaccaaaagaagccaacaaacuguaaucccgaauaucggaucuagacccagaauaaggaauaucccuagcagaauaagcaucuauuggacaauaguaaaaccgggagacauacuuuugauuaacagcacagggaaucuaauugcuccuagggguuacuucaaaauacgaagugggaaaagcucaauaaugagaucagaugcacccauuggcaaaugcaauucugaaugcaucacuccaaauggaagcauucccaaugacaaaccauuccaaaauguaaacaggaucacauacggggccugucccagauauguuaagcaaaacacucugaaauuggcaacagggaugcgaaauguaccagagaaacaaacuagaggcauauuuggcgcaaucgcggguuucauagaaaaugguugggagggaaugguggaugguugguacgguuucaggcaucaaaauucugagggaacaggacaagcagcagaucucaaaagcacucaagcagcaaucgaucaaaucaaugggaagcugaauagguugaucgggaaaaccaacgagaaauuccaucagauugaaaaagaauucucagaagucgaagggagaauucaggaccuugagaaauauguugaggacaccaaaauagaucucuggucauacaacgcggagcuucuuguugcccuggagaaccaacauacaauugaucuaacugacucagaaaugaacaaacuguuugaaaaaacaaagaagcaacugagggaaaaugcugaggauaugggcaaugguuguuucaaaauauaccacaaaugugacaaugccugcauaggaucaaucagaaauggaacuuaugaccacgauguauacagagaugaagcauuaaacaaccgguuccagaucaagggcguugagcugaagucaggauacaaagauuggauccuauggauuuccuuugccauaucauguuuuuugcuuuguguugcuuuguugggguucaucaugugggccugccaaaaaggcaacauuaggugcaacauuugcauuuga

SEQ ID NO: 40895 - RNA, 1701 nt, Artificial Sequence
  derived and/or modified CDS sequence (wt) from hemagglutinin__InfluenzaA__AFJ78210
augaagacuaucauugcuuugagcuacauucuaugucugguuuucgcucaaaaacuuccuggaaaugacaacagcacggcaacgcugugccuugggcaccaugcaguaccaaacggaacgauagugaaaacaaucacgaaugaccaaauugaaguuacuaaugcuacugagcugguucagaguuccucaacaggugaaauaugcgacaguccucaucagauccuugauggagaaaacugcacacuaauagaugcucuauugggagacccucagugugauggcuuccaaaauaagaaaugggaccuuuuuguugaacgcagcaaagccuacagcaacuguuacccuuaugaugugccggauuaugccucccuuaggucacuaguugccucauccggcacacuggaguuuaacaaugaaagcuucaauuggacuggagucacucaaaacggaacaagcucugcuugcauaaggagaucuaauaacaguuucuuuaguagauugaauugguugacccacuuaaaauucaaauacccagcauugaacgugacuaugccaaacaaugaaaaauuugacaaauuguacauuugggggguucaccacccggguacggacaaugaccaaaucuuccuguaugcucaagcaucaggaagaaucacagucucuaccaaaagaagccaacaaacuguaaucccgaauaucggaucuagacccagaguaaggaauaucccuagcagaauaagcaucuauuggacaauaguaaaaccgggagacauacuuuugauuaacagcacagggaaucuaauugcuccuagggguuacuucaaaauacgaagugggaaaagcucaauaaugagaucagaugcacccauuggcaaaugcaauucugaaugcaucacuccaaauggaagcauucccaaugacaaaccauuccaaaauguaaacaggaucacauacggggccugucccagauauguuaagcaaaacacucugaaauuggcaacagggaugcgaaauguaccagagaaacaaacuagaggcauauuuggcgcaaucgcggguuucauagaaaaugguugggagggaaugguggaugguugguacgguuucaggcaucaaaauucugagggaacaggacaagcagcagaucucaaaagcacucaagcagcaaucgaucaaaucaaugggaagcugaauagguugaucgggaaaaccaacgagaaauuccaucagauugaaaaagaauucucagaagucgaagggagaauucaggaccuugagaaauauguugaggacaccaaaauagaucucuggucauacaacgcggagcuucuuguugcccuggagaaccaacauacaauugaucuaacugacucagaaaugaacaaacuguuugaaaaaacaaagaagcaacugagggaaaaugcugaggauaugggcaaugguuguuucaaaauauaccacaaaugugacaaugccugcauaggaucaaucagaaauggaacuuaugaccacgauguauacagagaugaagcauuaaacaaccgguuccagaucaagggcauugagcugaagucaggauacaaagauuggauccuauggauuuccuuugccauaucauguuuuuugcuuuguguugcuuuguugggguucaucaugugggccugccaaaaaggcaacauuaggugcaacauuugcauuuga

SEQ ID NO: 40896 - RNA, 1701 nt, Artificial Sequence
  derived and/or modified CDS sequence (wt) from hemagglutinin__InfluenzaA__AFJ78221
augaagacuaucauugcuuugagcuacauucuauguuugguuuucgcucaaaaacuuccuggaaaugacaacagcacggcaacgcugugccuugggcaccaugcaguaccaaacggaacgauagugaaaacaaucacgaaugaccaaauugaaguuacuaaugcuacugagcugguucagaguuccucaacaggugaaauaugcgacaguccucaucagauccuugauggagaaaacugcacacuaauagaugcucuauugggagacccucagugugauggcuuccaaaauaagaaaugggaccuuuuuguugaacgcagcaaagccuacagcaacuguuacccuuaugaugugccggauuaugccucccuuaggucacuaguugccucauccggcacacuggaguuuaacaaugaaagcuucaauuggacuggagucacucaaaacggaacaagcucugcuugcauaaggagaucuaacaacaguuucuuuaguagauugaauugguugacccacuuaaaauucaaauacccagcauugaaugugacuaugccaaacaaugaagaauuugacaaauuguacauuugggggguucaccacccggguacggacaaugaccaaaucuuccuguaugcucaagcaucaggaagaaucacagucucuaccaaaagaagccaacaaacuguaaucccgaauauuggaucuagacccagaguaaggaauaucccuagcagaauaagcaucuauuggacaauaguaaaaccgggagacauacuuuugauuaacagcacagggaaucuaauugcuccuagggguuacuucaaaauacgaaguggaaaaagcucaauaaugagaucagaugcaccuauuggcaaaugcaauucugaaugcaucacuccaaauggaagcauucccaaugacaaaccauuccaaaauguaaacaggaucacauacggggccugucccagauauguuaagcaaaacacucugaaauuggcaacagggaugcgaaauguaccagagaaacaaacuagaggcauauuuggcgcaaucgcggguuucauagaaaaugguugggagggaaugguggaugguugguacgguuucaggcaucaaaauucugagggaacaggacaagcagcagaucucaaaagcacucaagcagcaaucgaucaaaucaaugggaagcugaauagguugaucgggaaaaccaacgagaaauuccaucagauugaaaaagaauucucagaagucgaagggagaauucaggaccuugagaaauauguugaggacaccaaaauagaucucuggucauacaacgcggagcuucuuguugcccuggagaaccaacacacaauugaucuaacugacucagaaaugaacaaacuguuugaaaaaacaaagaagcaacugagggaaaaugcugaggauaugggcaaugguuguuucaaaauauaccacaaaugugacaaugccugcauaggaucaaucagaaauggaacuuaugaccacgauguguacagagaugaagcauuaaacaaccgguuccagaucaagggcguugagcugaagucaggauacaaagauuggauccuauggauuuccuuugccauaucauguuuuuugcuuuguguugcuuuguugggguucaucaugugggccugccaaaaaggcaacauuaggugcaacauuugcauuuga

SEQ ID NO: 40897 - RNA, 1701 nt, Artificial Sequence
  derived and/or modified CDS sequence (wt) from hemagglutinin__InfluenzaA__AFJ78232
augaagacuaucauugcuuugagcuacauucuauguuugguuuucgcucaaaaacuuccuggaaaugacaacagcacggcaacgcugugccuugggcaccaugcaguaccaaacggaacgauagugaaaacaaucacgaaugaccaaauugaaguuacuaaugcuacugagcugguucagaguuccucaacagguaaaauaugcgacaguccucaucagauccuugauggagaaaacugcacacuaauagaugcucuauugggagacccucagugugauggcuuccaaaauaagaaaugggaccuuuuuguugaacgcagcaaagccuacagcaacuguuacccuuaugaugugccggauuaugccucccuuaggucacuaguugccucauccggcacacuggaguuuaacaaugaaagcuucaauuggacuggagucacucaaaacggaacaagcucugcuugcauaaggagaucuaacaacaguuucuuuaguagauugaauugguugacccacuuaaaauucaaauacccagcauugaacgugacuaugccaaacaaugaagaauuugacaaauuguacauuugggggguucaccacccggguacggacaaugaccaaaucuuccuguaugcucaagcaucaggaagaaucacagucucuaccaaaagaagccaacaaacuguaaucccgaauauuggaucuagacccagaguaaggaauaucccuagcagaauaagcaucuauuggacaauaguaaaaccgggagacauacuuuugauuaacagcacagggaaucuaauugcuccuagggguuacuucaaaauacgaaguggaaaaagcucaauaaugagaucagaugcaccuauuggcaaaugcaauucugaaugcaucacuccaaauggaagcauucccaaugacaaaccauuccaaaauguaaacaggaucacauacggcgccugucccagauauguuaagcaaaacacucugaaauuggcaacagggaugcgaaauguaccagagaaacaaacuagaggcauauuuggcgcaaucgcggguuucauagaaaaugguugggagggaaugguggaugguugguacgguuucaggcaucaaaauucugagggaacaggacaagcagcagaucucaaaagcacucaagcagcaaucgaucaaaucaaugggaagcugaauagguugaucgggaaaaccaacgagaaauuccaucagauugaaaacgaauucucagaagucgaagggagaauucaggaccuugagaaauauguugaggacaccaaaauagaucucuggucauacaacgcggagcuucuuguugcccuggagaaccaacauacaauugaucuaaccgacucagaaaugaacaaacuguuugaaaaaacaaagaagcaacugagggaaaaugcugaggauaugggcaaugguuguuucaaaauauaccacaaaugugacaaugccugcauaggaucaaucagaaauggaacuuaugaccacgauguauacagagaugaagcauuaaacaaccgguuccagaucaagggcguugagcugaagucaggauacaaagauuggauccuauggauuuccuuugccauaucauguuuuuugcuuuguguugcuuuguugggguucaucaugugggccugccaaaaaggcaacauuaggugcaacauuugcauuuga

SEQ ID NO: 40898 - RNA, 1701 nt, Artificial Sequence
  derived and/or modified CDS sequence (wt) from hemagglutinin__InfluenzaA__AFJ78243
augaagacuaucauugcuuugagcuacauucuauguuugguuuucgcucaaaaacuuccuggaaaugacaacagcacggcaacgcugugccuugggcaccaugcaguaccaaacggaacgauagugaaaacaaucacgaaugaccaaauugaaguuacuaaugcuacugagcugguucagaguuccucaacaggugaaauaugcgacaguccucaucagauccuugauggagaaaacugcacacuaauagaugcucuauugggagacccucagugugauggcuuccaaaauaagaaaugggaccuuuuuguugaacgcagcaaagccuacagcaacuguuacccuuaugaugugccggauuaugccucccuuaggucacuaguugccucauccggcacacuggaguuuaacaaugaaagcuucaauuggacuggagucacucaaaacggaacaagcucugcuugcauaaggagaucuaacaacaguuucuuuaguagauugaauugguugacccacuuaaaauucaaauacccagcauugaacgugacuaugccaaacaaugaagaauuugacaaauuguacauuugggggguucaccauccggguacggacaaugaccaaaucuuccuguaugccaaagcaucaggaagaaucacagucucuaccaaaagaagccaacaaacuguaaucccgaauauuggaucuagacccagaguaaggaauaucccuagcagaauaagcaucuauuggacaauaguaaaaccgggagacauacuuuugauuaacagcacagggaaucuaauugcuccuagggguuacuucaaaauacgaaguggaaaaagcucaauaaugagaucagaugcacccguuggcaaaugcaauucugaaugcaucacuccaaauggaagcauucccaaugacaaaccauuccaaaauguaaacaggaucacauacggggccugucccagauauguuaagcaaaacacucugaaauuggcaacagggaugcgaaauguaccagagaaacaaacuagaggcauauuuggcgcaaucgcggguuucauagaaaaugguugggagggaaugguggaugguugguacgguuucaggcauaaaaauucugagggaacaggacaagcagcagaucucaaaagcacucaagcagcaaucgaucaaaucaaugggaagcugaauagguugaucgggaaaaccaacgagaaauuccaucagauugaaaaagaauucucagaagucgaagggagaauucaggaccuugagaaauauguugaggacaccaaaauagaucucuggucauacaacgcggagcuucuuguugcccuggagaaccaacauacaauugaucuaacugacucagaaaugaacaaacuguuugaaaaaacaaagaagcaacugagggaaaaugcugaggauaugggcaaugguuguuucaaaauauaccacaaaugugacaaugccugcauaggaucaaucagaaauggaacuuaugaccacgauguauacagagaugaagcauuaaacaaccgguuccagaucaagggcguugagcugaagucaggauacaaagauuggauccuauggauuuccuuugccauaucauguuuuuugcuuuguguugcuuuguugggguucaucaugugggccugccaaaaaggcaacauuaggugcaacauuugcauuuga

SEQ ID NO: 40899 - RNA, 1701 nt, Artificial Sequence
  derived and/or modified CDS sequence (wt) from hemagglutinin__InfluenzaA__AFJ78254
augaagacuaucauugcuuugagcuacauucuaugucugguuuucgcucaaaaacuuccuggaaaugacaacagcacggcaacacugugccuugggcaccaugcaguaccaaacggaacaauagugaaaacaaucacgaaugaccaaauugaaguuacuaaugcuacugagcugguucagaguuccucaacaggugaaauaugcgacaguccucaucagauccuugauggagaaaacugcacacuaauagaugcucuauugggagacccucagugugauggcuuccaaaauaagaaaugggaccuuuuuguugaacgcagcaaagccuacagcaacuguuacccuuaugaugugccggauuaugccucccuuaggucacuaguugccucauccggcacacuggaguuuaacaaugaaagcuucaauuggacuggagucacucaaaacggaacaagcucugcuugcauaaggagaucuaauaacaguuucuuuaguagauugaauugguugacccacuuaaaauucaaauauccagcauugaacgugacuaugccaaacaaugaagaauuugacaaauuguacauuugggggguucaccacccggguacggacaaugaccaaaucuuccuguaugcucaagcaucaggaagaaucacagucucuaccaaaagaagccaacaaacuguaaucccgaauaucggaucuagacccagaguaaggaauauccccagcagaauaagcaucuauuggacaauaguaaaaccgggagacauacuuuugauuaacagcacagggaaucuaauugcuccuagggguuacuucaaaauacgaagugggaaaagcucaauaaugagaucagaugcacccauuggcaaaugcaauucugaaugcaucacuccaaauggaagcauucccaaugacaaaccauuccaaaauguaaacaggaucacauacggggccugucccagauauguuaagcaaaacacucugaaauuggcaacagggaugcgaaauguaccagaaaaacaaacuagaggcauauuuggcgcaaucgcggguuucauagaaaaugguugggagggaaugguggaugguugguacgguuucaggcaucaaaauucugagggaauaggacaagcagcagaucucaaaagcacucaagcagcaaucgaucaaaucaaugggaagcugaauagguugaucgggaaaaccaacgagaaauuccaucagauugaaaaagaauucucagaagucgaagggaggauucaggaccuugagaaauauguugaggacaccaaaguagaucucuggucauacaacgcggagcuucuuguugcccuggagaaccaacauacaauugaucuaacugacucagaaaugaacaaacuguuugaaaaaacaaagaagcaacugagggaaaaugcugaggauaugggcaaugguuguuucaaaauauaccacaaaugugacaaugccugcauaggaucaauaagaaauggaacuuaugaccacgauguauacagagaugaagcauuaaauaaccgguuccagaucaagggcguugagcugaagucaggauacaaagauuggauccuauggauuuccuuugccauaucauguuuuuugcuuuguguugcuuuguugggguucaucaugugggccugccaaaaaggcaacauuaggugcaacauuugcauuuga

SEQ ID NO: 40900 - RNA, 1701 nt, Artificial Sequence; identical to SEQ ID NO: 40899
  derived and/or modified CDS sequence (wt) from hemagglutinin__InfluenzaA__AFJ78265

SEQ ID NO: 40901 - RNA, 1701 nt, Artificial Sequence
  derived and/or modified CDS sequence (wt) from hemagglutinin__InfluenzaA__AFJ78276
augaagacuaucauugcuuugagcuacauucuaugucugguuuucgcucaaaaacuuccuggaaaugacaacagcacggcaacgcugugccuugggcaccaugcaguaccaaacggaacgauagugaaaacaaucacgaaugaccaaauugaaguuacuaaugcuacugagcugguucagaguuccucaacaggugaaauaugcgacaguccucaucagauccuugauggagaaaacugcacacuaauagaugcucuauugggagacccucagugugauggcuuccaaaauaagaaaugggaccuuuuuguugaacgcagcaaagccuacagcaacuguuacccuuaugaugugccggauuaugccucccuuaggucacuaguugccucauccggcacacuggaguuuaacaaugaaagcuucaauuggacuggaguuacucaaaacggaacaagcucugcuugcauaaggagaucuaauaacaguuucuuuaguagauugaauugguugacccacuuaaaauucaaauauccagcauugaacgugacuaugccaaacaaugaaaaauuugacaaauuguacauuugggggguucaccacccggguacggacaaugaccaaaucuuccuguaugcucaagcaucaggaagaaucacagucucuaccaaaagaagccaacaaacuguaaucccgaauaucggaucuagacccagaguaaggaauauccccagcagaauaagcaucuauuggacaauaguaaaaccgggagacauacuuuugauuaacagcacagggaaucuaauugcuccuagggguuacuucaaaauacgaagugggaaaagcucaauaaugagaucagaugcacccauuggcaaaugcaauucugaaugcaucacuccaaauggaagcauucccaaugacaaaccauuccaaaauguaaacaggaucacauacggggccugucccagauauguuaagcaaaacacucugaaauuggcaacagggaugcgaaauguaccagagaaacaaacuagaggcauauuuggcgcaaucgcggguuucauagaaaaugguugggagggaaugguggaugguugguacgguuucaggcaucaaaauucugagggaauaggacaagcagcagaucucaaaagcacucaagcagcaaucgaucaaaucaaugggaagcugaauagguugaucgggaaaaccaacgagaaauuccaucagauugaaaaagaauucucagaagucgaagggaggauucaggaccuugagaaauauguugaggacaccaaaguagaucucuggucauacaacgcggagcuucuuguugcccuggagaaccaacauacaauugaucuaacugacucagaaaugaacaaacuguuugaaaaaacaaagaagcaacugagggaaaaugcugaggauaugggcaaugguuguuucaaaauauaccacaaaugugacaaugccugcauaggaucaaucagaaauggaacuuaugaccacgauguauacagagaugaagcauuaaauaaccgguuccagaucaagggcguugagcugaagucaggauacaaagauuggauccuauggauuuccuuugccauaucauguuuuuugcuuuguguugcuuuguugggguucaucaugugggccugccaaaaaggcaacauuaggugcaacauuugcauuuga

SEQ ID NO: 40902 - RNA, 1701 nt, Artificial Sequence
  derived and/or modified CDS sequence (wt) from hemagglutinin__InfluenzaA__AFJ78287
augaagacuaucauugcuuugagcuacauucuaugucugguuuucgcucaaaaacuuccuggaaaugacaacagcacggcaacgcugugccuugggcaccaugcaguaccaaacggaacgauagugaaaacaaucacgaaugaccaaauugaaguuacuaaugcuacugagcugguucagaguuccucaacaggugaaauaugcgacaguccucaucagauccuugauggaaaaaacugcacacuaauggaugcucuauugggagacccucagugugauggcuuccaaaauaagaaaugggaccuuuuuguugaacgcagcaaagccuacagcaacuguuacccuuaugaugugccggauuaugccucccuuaggucacuaguugccucauccggcacacuggaguuuaacaaugaaagcuucaauuggacuggagucacucaaaacggaacaagcucugcuugcauaaggagaucuaaaaacaguuucuuuaguagauugaauugguugacccacuuaaacuucaaauacccagcauugaacgugacuaugccaaacaaugaacaauuugacaaauuguacauuugggggguucaccacccggguacggacaaagaccaaaucuucccguaugcucaagcaucaggaagaaucacagucucuaccaaaagaagccaacaaacuguaaucccgaauaucggaucuagacccagaguaaggaauaucccuagcagaauaagcaucuauuggacaauaguaaaaccgggagacauacuuuugauuaacagcacagggaaucuaauugcuccuagggguuacuucaaaauacgaagugggaaaagcucaauaaugagaucagaugcacccauuggcaaaugcaauucugaaugcaucacuccaaauggaagcauucccaaugacaaaccauuccaaaauguaaacaggaucacauacggggccugucccagauauguuaagcaaaacacucugaaauuggcaacagggaugcgaaauguaccagagaaacaaacuagaggcauauuuggcgcaaucgcggguuucauagaaaaugguugggagggaaugguggaugguugguacgguuucaggcaucaaaauucugagggaagaggacaagcagcagaucucaaaagcacucaagcagcaaucgaucaaaucaaugggaagcugaauagauugaucgggaaaaccaacgagaaauuccaucagauugaaaaagaauucucagaagucgaagggagaauucaggaccuugagaaauauguugaggacacuaaaauagaucucuggucauacaacgcggagcuucuuguugcccuggagaaccaacauacaauugaucuaacugacucagaaaugaacaaacuguuugaaaaaacaaagaagcaacugagggaaaaugcugaggauaugggcaaugguuguuucaaaauauaccacaaaugugacaaugccugcauaggaucaaucagaaauggaacuuaugaccacgauguauacagagaugaagcauuaaacaaccgguuucagaucaagggaguugagcugaagucaggguacaaagauuggauccuauggauuuccuuugccauaucauguuuuuugcuuuguguugcuuuguugggguucaucaugugggccugccaaaaaggcaacauuaggugcaacauuugcauuuga

SEQ ID NO: 40903 - RNA, 1698 nt, Artificial Sequence
  derived and/or modified CDS sequence (wt) from hemagglutinin__InfluenzaA__AFJ78309
augaaagcaaaacuacuaguccuguuauguacauuuacagcuacauaugcagacacaauauguauaggcuaccaugccaacaacucaaccgacacuguugacacaguacuugagaagaaugugacagugacacacucugucaaccuacuugaggacagucacaauggaaaacuaugucuacuaaaaggaauagccccacuacaauuagguaauugcagcguugccggauggaucuuaggaaacccagaaugcgaaucacugauuucuaaggaaucaugguccuacauuguagagacaccaaauccugagaauggaacauguuacccaggguauuucgccgacuaugaggaacugagggagcaauugaguucaguaucuucauuugagagauucgaaauauuccccaaagaaagcucauggcccaaccacaccguaaccggaguaucggcaucaugcucccauaaugggaaaagcaguuuuuacagaaauuugcuauggcugacggagaagaauggcuuguacccaaaccugagcaaguccuauguaaacaacaaagagaaagaaguccuuguacuaugggguguucaucacccgucuaacauaggggaccaaagggccaucuaucauacagaaaaugcuuaugucucuguagugucuucacauuauagcagaagauucaccccagaaauagcaaaaagacccaaaguaagagaucaggaaggaagaaucaacuacuacuggacucugcuggaacccggggacacaauaauauuugaggcaaauggaaaucuaauagcgccaugguaugcuuucgcacugaguagaggcuuuggaucaggaaucaucaccucaaaugcaccaauggaugaaugugaugcgaagugccaaacaccucagggagcuauaaacaguagucuuccuuuccagaauguacacccaaucacaauaggagaguguccaaaguaugucaggagugcaaaauuaaggaugguuacaggacuaaggaacaucccauccauucaauccagagguuuguuuggagccauugccgguuucauugaagggggguggacuggaaugauagaugggugguaugguuaucaucaucagaaugagcaaggaucuggcuaugcugcagaucaaaaaagcacacaaaaugccauuaacgggauuacaaacaaggugaauucuguaauugagaaaaugaacacucaauucacagcugugggcaaagaauucaacaaauuagaaagaaggauggaaaacuuaaauaaaaaaguugaugauggauuucuggacauuuggacauauaaugcagaauuguugguucuacuggaaaaugaaaggacuuuggauuuccaugacucaaaugugaagaaucuguaugagaaaguaaaaagccaauuaaagaauaaugccaaagaaauaggaaacggguguuuugaauucuaucacaaguguaacaaugaaugcauggaaagugugaaaaauggaacuuaugacuauccaaaauauuccgaagaaucaaaguuaaacagggagaaaauugauggagugaaauuggaaucaaugggagucuaucagauucuggcgaucuacucaacugucgccaguucacugguucuuuuggucucccugggggcaaucagcuucuggauguguuccaaugggucuuugcaguguagaauaugcaucuga

SEQ ID NO: 40904 - RNA, 1701 nt, Artificial Sequence
  derived and/or modified CDS sequence (wt) from hemagglutinin__InfluenzaA__AFJ78320
augaagacuaucauugcuuugagcuacauuuuaugucugguuuucgcucaaaaacuucccggaaaugacaacagcacggcaacgcugugccuggggcaccaugcaguaccaaacggaacgcuagugaaaacaaucacgaaugaccaaauugaagugacuaaugcuacugagcugguucagaguuccucaacagguagaauaugcgacaguccucaccaaauccuugauggagaaaacugcacacuaauagaugcucuauugggagacccucauugugauggcuuccaaaauaaggaaugggaccuuuuuguugaacgcagcaaagccuacagcaacuguuacccuuaugaugugccggauuaugccucccuuaggucacuaguugccucauccggcacacuggaguuuaacaaugaaagcuucaauuggacuggagucgcucagaauggaacaagcucugcuugcaaaaggagaucuaauaaaaguuucuuuaguagauugaauugguugcaccaauuaaaauacaaauauccagcacugaacgugacuaugccaaacaaugaaaaauuugacaaauuauacauuugggggguucaccacccgaguacggacagugaccaaaucagccuauaugcucaagcaucagggagagucacagucucuaccaaaagaagccaacaaacuguaaucccgaauaucggaucuagacccuggguaaggggugucuccagcagaauaagcaucuauuggacaauaguaaaaccgggagacauacuuuugauuaacagcacagggaaucuaauugcuccucgggguuacuucaaaauacgaagugggaaaagcucaauaaugagaucagaugcacccauuggcaaaugcaauucugaaugcaucacuccaaauggaagcauucccaaugacaaaccauuucaaaauguaaacaggaucacauauggggccugucccagauauguuaagcaaaacacucugaaauuggcaacagggaugcggaauguaccagagaaacaaacuagaggcauauucggcgcaaucgcggguuucauagaaaaugguugggagggaaugguggacgguugguacgguuucaggcaucaaaauucugagggcacaggacaagcagcagaucuuaaaagcacucaagcagcaaucaaccaaaucaacgggaaacugaauagguuaaucgggaaaacgaacgagaaauuccaucaaauugaaaaagaauucucagaaguagaagggagaauucaggaccucgagaaauauguugaggacacuaaaauagaucucuggucguacaacgcggagcuucuuguugcccuggagaaccaacauacaauugaucuaacugacucagaaaugaacaaacuguuugaaagaacaaagaagcaacugagggaaaaugcugaggauaugggcaaugguuguuucaaaauauaccacaaaugugacaaugccugcauagggucaaucagaaauggaacuuaugaccaugauguauacagagacgaagcauuaaacaaccgguuccagaucaaagguguugagcugaagucaggauacaaagauuggauccuauggauuuccuuugccauaucauguuuuuugcuuuguguuguuuugcugggguucaucaugugggccugccaaaaaggcaacauuaggugcaacauuugcauuuga

SEQ ID NO: 40905 - RNA, 1698 nt, Artificial Sequence
  derived and/or modified CDS sequence (wt) from hemagglutinin__InfluenzaA__AFJ78331
augaaagcaaaacuacugguccuguuauguacauuuacagcuacauaugcagacacaauauguauaggcuaccaugccaacaacucaaccgacacuguugacacaguacuugagaagaaugugacagugacacacucugucaaccuacuugaggacagucacaauggaaaacuaugucuacuaaaaggaauagccccacuacaauuggguaauugcagcguugccggauggaucuuaggaaacccagaaugcgaauuacugauuuccaaggaaucaugguccuacauuguagaaacaccaaauccugagaauggaacauguuacccaggguauuucgccgacuaugaggaacugagggagcaauugaguucaguaucuucauuugagagauucgaaauauuccccaaagaaagcucauggcccaaccacaccguaaccggaguaucagcaucaugcucccauaaugggaaaagcaguuuuuacagaaauuugcuauggcugacggggaagaaugguuuguacccaaaccugagcaaguccuauguaaacaacaaagagaaagaaguccuugugcuaugggguguucaucacccgccuaacauaggggaccaaagggcccucuaucauacagaaaaugcuuaugucucuguagugucuucacauuauagcagaagauucaccccagaaauagccaaaagacccaaaguaagagaucaggaaggaagaaucaacuacuacuggacucugcuggaaccuggggacacaauaauauuugaggcaaauggaaaucuaauagcgccaugguaugcuuucgcacugaguagaggcuuuggaucaggaaucaucaccucaaaugcaccaauggaugaaugugaugcgaagugucaaacaccucagggagcuauaaacaguagucuuccuuuccagaauguacacccaguuacaauaggagaguguccaaaguaugucaggagugcaaaauuaaggaugguuacaggacuaaggaacaucccauccauucaauccagagguuuguuuggagccauugccgguuucauugaagggggguggacuggaaugguagaugggugguaugguuaucaucaucagaaugagcaaggaucuggcuaugcugcagaucaaaaaagcacacaaaaugccauuaacgggauuacaaacaaggugaauucuguaauugagaaaaugaacacucaauucacagcugugggcaaagaauucaacaaauuggaaagaaggauggaaaacuuaaauaaaaaaguugaugauggguuucuggacauuuggacauauaaugcagaauuguugguucuacuggaaaaugaaaggacuuuggauuuccaugauuccaaugugaagaaucuguaugagaaaguaaaaagccaauuaaagaauaaugccaaagaaauaggaaacggguguuuugaauucuaucacaaguguaacaaugaaugcauggaaagugugaaaaauggaacuuaugacuauccaaaauauuccgaagaaucaaaguuaaacagggagaaaauugauggagugaaauuggaaucaaugggagucuaucagauucuggcgaucuacucaacugucgccaguucccugguucuuuuggucucccugggggcaaucagcuucuggauguguuccaaugggucuuugcaguguagaauaugcaucuga

SEQ ID NO: 40906 - RNA, 1698 nt, Artificial Sequence; identical to SEQ ID NO: 40905
  derived and/or modified CDS sequence (wt) from hemagglutinin__InfluenzaA__AFJ78342

SEQ ID NO: 40907 - RNA, 1698 nt, Artificial Sequence
  derived and/or modified CDS sequence (wt) from hemagglutinin__InfluenzaA__AFJ78353
augaaagcaaaacuacugguccuguuauguacauuuacagcuacauaugcagacacaauauguauaggcuaccaugccaacaacucaaccgacacuguugacacaguacuugagaagaaugugacagugacacacucugucaaccuacuugaggacagucacaauggaaaacuaugucuacuaaaaggaauagccccacuacaauuggguaauugcagcguugccggauggaucuuaggaaacccagaaugcgaauuacugauuuccaaggaaucaugguccuacauuguagaaacaccaaauccugagaauggaacauguuacccaggguauuucgccgacuaugaggaacugagggagcaauugaguucaguaucuucauuugagagauucgaaauauuccccaaagaaagcucauggcccaaccacaccguaaccggaguaucagcaucaugcucccauaaugggaaaagcaguuuuuacagaaauuugcuauggcugacggggaagaaugguuuguacccaaaccugagcaagucuuauguaaacaacaaagagaaagaaguccuugugcuaugggguguucaucacccgccuaacauaggggaccaaagggcccucuaucauacagaaaaugcuuaugucucuguagugucuucacauuauagcagaagauucaccccagaaauagccaaaagacccaaaguaagagaucaggaaggaagaaucaacuacuacuggacucugcuggaacccggggacacaauaauauuugaggcaaauggaaaucuaauagcaccaugguaugcuuucgcacugaguagaggcuuuggaucaggaaucaucaccucaaaugcaccaauggaugaaugugaugcgaagugucaaacaccucagggagcuauaaacaguagucuuccuuuccagaauguacacccaguuacaauaggagaguguccaaaguaugucaggagugcaaaauuaaggaugguuacaggacuaaggaacaucccauccauucaauccagagguuuguuuggagccauugccgguuucauugaagggggguggacuggaaugguagaugggugguaugguuaucaucaucagaaugagcaaggaucuggcuaugcugcagaucaaaaaagcacacaaaaugccauuaacgggauuacaaacaaggugaauucuguaauugagaaaaugaacacucaauucacagcugugggcaaagaauucaacaaauuggaaagaaggauggaaaacuuaaauaaaaaaguugaugauggcuuucuggacauuuggacauauaaugcagaauuguugguucuacuggaaaaugaaaggacuuuggauuuccaugacuccaaugugaagaaucuguaugagaaaguaaaaagccaauuaaagaauaaugccaaagaaauaggaaacggguguuuugaauucuaucacaaguguaacaaugaaugcauggaaagugugaaaaauggaacuuaugacuauccaaaauauuccgaagaaucaaaguuaaacagggagaaaauugauggagugaaauuggaaucaaugggagucuaucagauucuggcgaucuacucaacugucgccaguucccugguucuuuuggucucccugggggcaaucagcuucuggauguguuccaaugggucuuugcaguguagaauaugcaucuga

SEQ ID NO: 40908 - RNA, 1698 nt, Artificial Sequence
  derived and/or modified CDS sequence (wt) from hemagglutinin__InfluenzaA__AFJ78364
augaaagcaaaacuacuaguccuguuauguacauuuacagcuacauaugcagacacaauauguauaggcuaccaugccaacaacucaaccgacacuguugacacaguacuugagaagaaugugacagugacacacucugucaaccuacuugaggacagucacaauggaaaacuaugucuacuaaaaggaauagccccacuacaauuagguaauugcagcguugccggauggaucuuaggaaacccagaaugcgaaucacugauuuccaaggaaucaugguccuacauuguagagacaccaaauccugagaauggaacauguuacccaggguauuucgccgacuaugaggaacugagggagcaauugaguucaguaucuucauuugagagauucgaaauauuccccaaagaaagcucauggcccaaccacacuguaaccggaguaucggcaucaugcucccauaaugggaaaagcaguuuuuacagaaauuugcuauggcugacggagaagaauggcuuguacccaaaccugagcaaguccuauguaaacaacaaagagaaagaaguccuuguacuaugggguguucaucacccgucuaacauaggggaccaaagggccaucuaucauacagaaaaugcuuaugucucuguagugucuucacauuauaacagaagauucaccccagaaauagcaaaaagacccaaaguaagaaaucaggaaggaagaaucaacuacuacuggacucugcuggaacccggggacacaauaauauuugaggcaaauggaaaucuaauagcgccaugguaugcuuucgcacugaguagaggcuuuggaucaggaaucaucaccucaaaugcaccaauggaugaaugugaugcaaagugccaaacaccucagggagcuauaaacaguagucuuccuuuccagaauguacacccaaucacaauaggagaguguccaaaguaugucaggagugcaaaauuaaggaugguuacaggacuaaggaacaucccauccauucaauccagagguuuguuuggagccauugccgguuucauugaagggggguggacuggaaugauagaugggugguaugguuaucaucaucagaaugagcaaggaucuggcuaugcugcagaucaaaaaagcacacaaaaugccauuaacgggaucacaaacaaggugaauucugugauugagaaaaugaacacucaauucacagcugugggcaaagaauucaacaaauuagaaagaaggauggaaaacuuaaacaaaaaaguugaugauggauuucuggacauuuggacauauaaugcagaauugcugguucuacuggaaaaugaaaggacuuuggauuuccaugacucaaaugugaagaaucuguaugagaaaguaaaaagccaauuaaagaauaaugccaaagaaauaggaaacggguguuuugaauucuaucacaaguguaacaaugaaugcauggaaagugugaaaaauggaacuuaugacuauccaaaauauuccgaagaaucaaaguuaaacagggagaaaauugauggagugaaauuggaaucaaugggagucuaucagauucuggcgaucuacucaacugucgccaguucacugguucuuuuggucucccugggggcaaucagcuucuggauguguuccaaugggucuuugcaguguagaauaugcaucuga

SEQ ID NO: 40909 - RNA, 1698 nt, Artificial Sequence
  derived and/or modified CDS sequence (wt) from hemagglutinin__InfluenzaA__AFJ78375
augaaagcaaaacuacuaguccuguuauguacauuuacagcuacauaugcagacacgauauguauaggcuaccaugccaacaacucaaccgacacuguugacacaguacuugagaagaauguuacagugacacacucuaucaaccuacuugagaacagucacaauggaaaauuaugucuacuaaaaggaauagccccacuacaauuggguaauugcagcguugccggauggaucuuaggaaacccagaaugcgaauuacugauuucuaaggaaucaugguccuacauuguagaaacaccaaauccugagaauggaacauguuacccagggcauuucgccgacuaugaggaacugagggagcaauugaguucaguauccucauuugagagauucgaaauauuccccaaagaaagcucauggcccaaccacaccguaaccggaguaucggcaucaugcucccauaaugggaaaagcaguuuuuacagaaauuugcuauggcugacggagaagaauggcuuguacccaaaccugagcaaguccuauguaaacaacaaagagaaagaaguccuuguacuaugggguguucaucacccgucuaacauaggggaccaaagggccaucuaucauacagaaaaugcuuaugucucuguagugucuucacauuauagcagaagauucaccccagaaauagucaaaagacccaaaguaagagaucaggaaggaagaaucaacuacuacuggacucugcuggaacccggggacacaauaauauuugaggcaaauggaaaucuaauagcgccaugguaugcuuucgcacugaguagaggcuuuggaucaggaaucaucaccucaaaugcaccaauggaugaaugugaugcgaagugucaaacaccucagggagcuauaaacaguagucuuccuuuccagaauguacacccagucacaauaggagaguguccaaaguauguaaggagugcaaaauuaaggaugguuacaggacuaaggaacaucccauccauucaauccagagguuuguuuggagccauugccgguuucauugaagggggguggacuggaaugauagaugggugguaugguuaucaucaucagaaugagcaaggaucugguuaugcugcagaucaaaaaagcacacagaaugccauuaacgggauuacaaacaaggugaauucuauaauugagaaaaugaacacucaauucacagcugugggcaaagaauucaacaaauuagaaagaaggauggaaaacuuaaauaaaaaaguugaugauggauuucuagacauuuggacauauaaugcagaauuguugguucuacuagaaaaugaaaggacuuuggauuuccaugacucaaaugugaagaaucuguaugagaaaguaaaaagccaauuaaagaauaaugccaaagaaauaggaaacggguguuuugaauucuaucacaaauguaacaaugaaugcauggaaagugugaaaaauggaacuuaugacuauccaaaauauuccgaagaaucaaaguuaaacagggagaaaauugauggagugaaauuggaaucaaugggagucuaucagauucuggcgaucuacucaacugucgccaguucacugguucuuuuggucucccugggggcaaucagcuucuggauguguuccaaugggucuuugcaguguagaauaugcaucuga

SEQ ID NO: 40910 - RNA, 1698 nt, Artificial Sequence; identical to SEQ ID NO: 34137
  derived and/or modified CDS sequence (wt) from hemagglutinin__InfluenzaA__AFJ78386

SEQ ID NO: 40911 - RNA, 1698 nt, Artificial Sequence; identical to SEQ ID NO: 34137
  derived and/or modified CDS sequence (wt) from hemagglutinin__InfluenzaA__AFJ78397

SEQ ID NO: 40912 - RNA, 1698 nt, Artificial Sequence
  derived and/or modified CDS sequence (wt) from hemagglutinin__InfluenzaA__AFJ78408
augaaaguaaaacuacugguucuguuauguacauuuacagcuacauaugcagacacaauauguauaggcuaccaugccaacaacucaaccgacacuguugacacaguacuugagaagaaugugacagugacacacucugucaaccuacuugaggacagucacaauggaaaacuaugucuacuaaaaggaauagccccacuacaauuggguaauugcagcguugccggauggaucuuaggaaacccagaaugcgaauuacugaucuccaaggaaucaugguccuacauuguagaaacaccaaauccugagaauggaacauguuacccaggguauuucgccgacuaugaggaacugagggagcaauugaguucaguaucuucauuugagagguucgaaauauuccccaaagagagcucauggcccaaccacaccguaaccggaguaucagcaucaugcucccauaacgggaaaagcaguuuuuacagaaauuugcuauggcugacggggaagaaugguuuguacccaaaccugagcaaguccuaugcaaacaacaaagagaaagaaguccuuguacuaugggguguucaucacccgccuaacauaggggaccaaagggcccucuaucauacagaaaaugcuuaugucucuguagugucuucacauuauagcagaagauucaccccagaaauagccaaaagacccaaggugagagaucaggaaggaagaaucaacuacuacuggacucugcuggaacccggggauacaauaauauuugaggcaaauggaaaucuaauagcgccaagguuugcuuucgcacugaguagaggcuuuggaucaggaaucaucaccucaaaugcaccaauggaugaaugugaugcgaagugucaaacaccucagggagcuauaaacagcagucuuccuuuccagaauguacacccagucacaauaggagaguguccaaaguaugucaggagugcaaaauuaaggaugguuacaggacuaaggaacaucccauccauucaauccagagguuuguuuggagccauugccgguuucauugaagggggguggacuggaaugguagaugguugguaugguuaucaucaucagaaugagcaaggaucuggguaugcugcagaucaaaaaagcacacaaaaugccauuaacgggauuacaaacaaggugaauucuguaauugagaaaaugaacacucaauucacagcugugggcaaagaauucaacaaauuggaaagaaggauggaaaacuuaaauaaaaaaguugaugauggguuucuagacauuuggacauauaaugcagaauuguugguucuacuggaaaaugaaaggacuuuggauuuccaugacuccaacgugaagaaucuguaugagaaaguaaaaagccaauuaaagaauaaugccaaagaaauaggaaacggguguuuugaauucuaucacaaguguaacgaugaaugcauggagagugugaaaaauggaacuuaugacuauccaaaauauuccgaagaaucaaaguuaaauagggagaaaauugauggagugaaauuggaaucaaugggagucuaucagauucuggcgaucuacucaacagucgccaguucccugguucuuuuggucucccugggggcaaucagcuucuggauguguuccaaugggucuuugcaguguagaauaugcaucuaa

SEQ ID NO: 40913 - RNA, 1698 nt, Artificial Sequence
  derived and/or modified CDS sequence (wt) from hemagglutinin__InfluenzaA__AFJ78419
augaaaguaaaacuacugguccuguuaugcacauuuacagcuacauaugcagacacaauauguauaggcuaccaugccaacaacucaaccgacacuguugacacaguacuugagaaaaaugugacagugacacacucugucaaccugcuugaggacagucacaauggaaaacuaugucuauuaaaaggaauagccccacuacaauuggguaauugcagcguugccggguggaucuuaggaaacccagaaugcgaauuacugauuuccaaggaaucaugguccuacauuguagaaaaaccaaauccugagaauggaacauguuacccaggguauuucgccgacuaugaggaacugagggagcaauugaguucaguaucuucauuugagagguucgaaauauuccccaaagaaagcucauggcccaaccacaccguaaccggaguaucagcaucaugcucccauaaugggaaaagcaguuuuuacaaaaauuugcuauggcugacggggaagaaugguuuguacccaaaccugagcaaguccuaugcaaacaacaaagagaaagaaguccuuguacuaugggguguucaucacccgccuaacauaggugaccaaagggcccucuaucauacagaaaaugcuuaugucucuguagugucuucacauuauagcagaaaauucaccccagaaauagccaaaagacccaaaguaagagaucaagaaggaagaaucaacuacuacuggacucugcuugaacccggggauacaguaauauuugaggcaaauggaaaucuaauagcgccaagauaugcuuucgcacugaguagaggcuuuggaucaggaaucaucaacucaaaugcaccaauggaugaaugugaugcgaagugccaaacaccccagggagcuauaaacagcagucuuccuuuccagaauguacacccagucacaauaggagaguguccaaaguaugucaggagugcaaaauuaaggaugguuacaggacuaaggaacaucccauccauucaauccagaggucuguuuggagccauugccgguuucauugaagggggguggacuggaaugguagaugguugguaugguuaucaucaucagaaugagcaaggaucuggcuaugcugcagaucaaaaaagcacacaaaaugccauuaaugggauuacaaacaaggugaauucuguaauugagaaaaugaacacucaauucacagcugugggcaaagaauucaacaaauuggaaagaaggauggaaaacuuaaauaaaaaaguugaugauggguuuauagacauuuggacauauaaugcagaauuguugguucuacuggaaaaugaaaggacuuuggauuuccaugacuccaaugugaagaaucuguaugagaaaguaaaaagccaauuaaagaauaaugccaaagaaauaggaaauggguguuuugaauucuaucacaaguguaacgaugaaugcauggagaguguaaaaaauggaacuuaugacuauccaaaauauuccgaggaaucaaaguuaaacagggagaaaauugauggagugaaauuggaaucaaugggagucuaucagauucuggcgaucuacucaacagucgccaguucucugguucuuuuggucucccugggggcaaucagcuucuggauguguuccaaugggucuuugcaguguagaauaugcaucuaa

SEQ ID NO: 40914 - RNA, 1698 nt, Artificial Sequence
  derived and/or modified CDS sequence (wt) from hemagglutinin__InfluenzaA__AFJ78430
augaaaguaaaacuacugguccuguuaugcacauuuacagcuacauaugcagacacaauauguauaggcuaccaugccaacaacucaaccgacacuguugacacaguacuugagaagaaugugacagugacacacucugucaaccugcuugaggacagucacaauggaaaauuaugucuauuaaaaggaauagccccacuacaauuggguaauugcaguguugccggauggaucuuaggaaacccagaaugcgaauuacugauuuccagggaaucaugguccuacauuguagaaaacccaaauccugagaauggaacauguuacccagggcauuucgccgacuaugaggaacugagggagcaauugaguucaguaucuucauuugagagguucgaaauauuccccaaagaaagcucauggcccaaccacaccguaaccggaguaucagcaucaugcucccauaaugggaaaagcaguuuuuacaaaaauuugcuauggcugacggggaagaaugguuuguacccaaaccugagcaaguccuaugcaaacaacaaagagaaagaaguccuuguacuaugggguguucaucacccgccuaacauaggugaccaaagggcccucuaucauacagaaaaugcuuaugucucuguagugucuucacauuauagcagaaaauucaccccagaaauagccaaaagacccaaaguaagagaucaagaaggaagaaucaacuacuacuggacucugcuuggacccggggauacaauaauauuugaggcaaauggaaaucuaauagcgccaagauaugcuuucgcacugaguagaggcuuuggaucaggaaucaucaacucaaaugcaccaauggaugaaugugaugcgaagugccaaacaccucagggagcuauaaacagcagucuuccuuuccagaauguacacccagucacaauaggagaguguccaaaguaugucaggagugcaaaauuaaggaugguuacaggacuaaggaacaucccauccauucaauccagagguuuguuuggagccauugccgguuucauugaagggggguggacuggaaugguagaugguugguaugguuaucaucaucagaaugagcaaggaucuggcuaugcugcagaucaaaaaagcacacaaaaugccauuaaugggauuacaaacaaggugaauucuguaauugagaaaaugaacacucaauucacagcugugggcaaagaauucaacaaauuggaaagaaggauggaaaacuuaaauaaaaaaguugaugauggguuuauagacauuuggacauauaaugcagaauuguugguucuacuggaaaaugaaaggacuuuggauuuccaugacuccaaugugaagaaucuguaugagaaaguaaaaagccaauuaaagaauaaugccaaagaaauaggaaauggguguuuugaauucuaucacaaguguaacgaugaaugcauggagaguguaaaaaauggaacuuaugacuauccaaaauauuccgaagaaucaaaguuaaacagggagaaaauugauggagugaaauuggaaucaaugggagucuaucagauucuggcgaucuacucaacagucgccaguucucugguucuuuuggucucccugggggcaaucagcuucuggauguguuccaaugggucuuugcaguguagaauaugcaucuaa

SEQ ID NO: 40915 - RNA, 1698 nt, Artificial Sequence
  derived and/or modified CDS sequence (wt) from hemagglutinin__InfluenzaA__AFJ78441
augaaaguaaaacuaaugguccuguuaugcacauuuacagcuacauaugcagacacaauauguauaggcuaccaugccaacaacucaaccgacacuguugacacaguacuugagaagaaugugacagugacacacucugucaaccugcuugaggacagucacaauggaaaauuaugucuauuaaaaggaauagccccacuacaauuggguaauugcagcguugccggauggaucuuaggaaacccagaaugcgaauuacugauuuccagagaaucaugguccuacauuguagaaaaaccaaauccugagaauggaacauguuacccagggcauuucgccgacuaugaggaacugagggagcaauugaguucaguaucuucauuugagagguucgaaauauuccccaaagaaagcucauggcccaaccacaccguaaccggaguaucagcaucaugcucccauaaugggaaaagcaguuuuuacaaaaauuugcuauggcugacggggaagaaugguuuguacccaaaccugagcaaguccuaugcaaacaacaaagagaaagaaguccuuguacuaugggguguucaucacccgccuaacauaggugaccaaaaggcccucuaucauacagaaaaugcuuaugucucuguagugucuucacauuauagcagaaaauucaccccagaaauagccaaaagacccaaaguaagagaucaagaaggaagaaucaacuacuacuggacucugcuugaacccggggauacaauaauauuugaggcaaauggaaaucuaauagcgccaagauaugcuuucgcacugaguagaggcuuuggaucuggaaucaucaacucaaaugcaccaauggaugaaugugaugcgaagugccaaacaccucagggagcuauaaacagcagucuuccuuuccagaauguacacccagucacaauaggagaguguccaaaguaugucaggagugcaaaauuaaggaugguuacaggacuaaggaacaucccauccauucaauccagagguuuguuuggagccauugccgguuucauugaagggggguggacuggaaugguagaugguugguaugguuaucaucaucagaaugagcaaggaucuggcuaugcugcagaucaaaaaagcacacaaaaugccauuaaugggauuacaaacaaggugaauucuguaauugagaaaaugaacacucaauucacagcuguggacaaagaauucaacaaauuggaaagaaggauggaaaacuuaaauaaaaaaguugaugauggguuuauagacauuuggacauauaaugcagaauuguugguucuacuggaaaaugaaaggacuuuggauuuccaugacuccaaugugaagaaucuguaugagaaaguaaaaagccaauuaaagaauaaugccaaagaaauaggaaauggguguuuugaauucuaucacaaguguaacgaugaaugcauggagaguguaaaaaauggaacuuaugacuauccaaaauauuccgaagaaucaaaguuaaacagggagaaaauugauggagugaaauuggaaucaaugggagucuaucagauucuggcgaucuacucaacagucgccaguucucugguucuuuuggucucccugggggcaaucagcuucuggauguguuccaaugggucuuugcaguguagaauaugcaucuaa

SEQ ID NO: 40916 - RNA, 1698 nt, Artificial Sequence
  derived and/or modified CDS sequence (wt) from hemagglutinin__InfluenzaA__AFJ78452
augaaaguaaaacuacugguccuguuaugcacauuuacagcuacauaugcagacacaauauguauaggcuaccaugccaacaacucaaccgacacuguugacacaguacuugaaaagaaugugacagugacacacucugucaaccugcuugaggacagucacaauggaaaacuaugucuauuaaaaggaauagccccacuacaauuggguaauugcagcguugccggguggaucuuaggaaacccagaaugcgaauuacugauuuccaaggagucaugguccuacauuguagaaaaaccaaauccugagaauggaacauguuacccagggcacuucgcugacuaugaggaacugagggagcaauugaguucaguaucuucauuugagagguucgaaauauuccccaaagaaagcucauggcccaaccacaccguaaccggaguaucagcaucaugcucccauaaugggaaaagcaguuuuuacaaaaauuugcuauggcugacggggaagaaugguuuguacccaaaccugagcaaguccuaugcaaacaacaaagagaaagaaguccuuguacuaugggguguucaucacccgccaaacauaggugaccaaaaggcccucuaucauacagaaaaugcuuaugucucuguagugucuucacauuauagcagaaaauucaucccagaaauagccaaaagacccaaaguaagagaucaagaaggaagaaucaacuacuacuggacucugcuugaacccggggauacaauaauauuugaggcaaauggaaaucuaauagcgccaagauaugcuuucgcacugaguagaggcuuuggaucaggaaucauuaacucaaaugcaccaauggaugaaugugaugcgaagugccaaacaccucagggagcuauaaacagcagucuuccuuuccagaauguacacccagucacaauaggagaguguccaaaguaugucaggagugcaaaauuaaggaugguuacaggacuaaggaacaucccauccauucaauccagagguuuguuuggagccauugccgguuucauugaagggggguggacuggaaugguagaugguugguaugguuaucaucaucagaaugagcaaggaucuggcuaugcugcagaucaaaaaagcacacaaaaugccauuaaugggauuacaaacaaggugaauucuguaauugagaaaaugaacacucaauucacagcagugggcaaagaauucaacaaauuggaaagaaggauggaaaacuuaaauaaaaaaguugaugauggguuuauagacauuuggacauauaaugcagaacuguugguucuacuggaaaaugaaaggacuuuggauuuccaugacuccaaugugaagaaucuguaugagaaaguaaaaagccaguuaaagaauaaugccaaagaaauaggaaauggguguuuugaauucuaucacaaguguaacgaugaaugcauggagaguguaaaaaauggaacuuaugacuacccaaaauauuccgaagaaucaaaguuaaacagggagaaaauugauggagugaaauuggaaucaaugggagucuaucagauucuggcgaucuacucaacagucgccaguucucugguucuuuuggucucccugggggcaaucagcuucuggauguguuccaaugggucuuugcaguguagaauaugcaucuaa

SEQ ID NO: 40917 - RNA, 1698 nt, Artificial Sequence
  derived and/or modified CDS sequence (wt) from hemagglutinin__InfluenzaA__AFJ78463
augaaaguaaaacuacugguccuguuaugcacauuuacagcuacauaugcagacacaauauguauaggcuaccaugccaacaacucaaccgacacuguugacacaguacuugaaaagaaugugacagugacacacucugucaaccugcuugaggacagucacaauggaaaacuaugucuauuaaaaggaauagccccacuacaauuggguaauugcagcguugccggguggaucuuaggaaacccagaaugcgaauuacugauuuccaaggagucaugguccuacauuguagaaaaaccaaauccugagaauggaacauguuacccagggcacuucgcugacuaugaggaacugagggagcaauugaguucaguaucuucauuugagagguucgaaauauuccccaaagaaagcucauggcccaaccacaccguaaccggaguaucagcaucaugcucccauaaugggaaaagcaguuuuuacaaaaauuugcuauggcugacggggaagaaugguuuguacccaaaccugggcaaguccuaugcaaacaacaaagagaaagaaguccuuguacuaugggguguucaucacccgccaaacauaggugaccaaaaggcccucuaucauacagaaaaugcuuaugucucuguagugucuucacauuauagcagaaaauucaucccagaaauagccaaaagacccaaaguaagagaucaagaaggaagaaucaacuacuacuggacucugcuugaacccggggauacaauaauauuugaggcaaauggaaaucuaauagcgccaagauaugcuuucgcacugaguagaggcuuuggaucaggaaucauuaacucaaaugcaccaauggaugaaugugaugcgaagugccaaacaccucagggagcuauaaacagcagucuuccuuuccagaauguacacccagucacaauaggagaguguccaaaguaugucaggagugcaaaauuaaggaugguuacaggacuaaggaacaucccauccauucaauccagagguuuguuuggagccauugccgguuucauugaagggggguggacuggaaugguagaugguugguaugguuaucaucaucagaaugagcaaggaucuggcuaugcugcagaucaaaaaagcacacaaaaugccauuaaugggauuacaaacaaggugaauucuguaauugagaaaaugaacacucaauucacagcagugggcaaagaauucaacaaauuggaaagaaggauggaaaacuuaaauaaaaaaguugaugauggguuuauagacauuuggacauauaaugcagaacuguugguucuacuggaaaaugaaaggacuuuggauuuccaugacuccaaugugaagaaucuguaugagaaaguaaaaagccaguuaaagaauaaugccaaagaaauaggaaauggguguuuugaauucuaucacaaguguaacgaugaaugcauggagaguguaaaaaauggaacuuaugacuacccaaaauauuccgaagaaucaaaguuaaacagggagaaaauugauggagugaaauuggaaucaaugggagucuaucagauucuggcgaucuacucaacagucgccaguucucugguucuuuuggucucccugggggcaaucagcuucuggauguguuccaaugggucuuugcaguguagaauaugcaucuaa

SEQ ID NO: 40918 - RNA, 1698 nt, Artificial Sequence
  derived and/or modified CDS sequence (wt) from hemagglutinin__InfluenzaA__AFJ78474
augaaaguaaaacuacugguccuguuaugcacauuuacugcuacauaugcagacacaauauguauaggcuaccaugccaacaacucaaccgacacuguugacacaguacuugagaagaaugugacagugacacacucugucaaccugcuugaggacagucacaauggaaaauuaugucuauuaaaaggaauagccccacuacaauuggguaauugcagcguugccggauggaucuuaggaaacccagaaugcgaauuacugauuuccagggaaucaugguccuacauuguagaaaaaccaaauccugagaauggaacauguuacccagggcauuucgccgacuaugaggaacugagggagcaauugaguucaguaucuucauuugaaagauucgaaauauuccccaaagaaagcucauggcccaaccacaccguaaccggaguaucagcaucaugcuccuauaaugggaaaagcaguuuuuacaaaaauuugcuauggcugacggggaagaaugguuuguacccaaaccugagcaaguccuaugcaaacaacaaagagaaagaaguccuuguacuaugggguguucaucacccgccuaacauaggugaccaaagggcccucuaucauacagaaaaugcuuaugucucuguagugucuucacauuauagcagaaaauucaccccagaaauagccaaaagacccaaaguaagagaucaagaaggaagaaucaacuauuacuggacucugcuugaacccggggauacaauaauauuugaggcaaauggaaaucuaauagcgccaagauaugcuuucgcacugaguagaggcuuuggaucaggaaucaucaacucaaaugcaccaauggaugaaugugaugcgaagugccaaacaccucagggagcuauaaacagcagucuuccuuuccagaauguacacccagucacaauaggagaguguccaaaguaugucaggagugcaaaauuaaggaugguuacaggacuaaggaacaucccauccauucaauccagagguuuguuuggagccauugccgguuucauugaagggggguggacuggaaugguagaugguugguaugguuaucaucaccagaaugagcaaggaucuggcuaugcugcagaucaaaaaagcacacaaaaugccauuaaugggauuacaaacaaggugaauucuguaauugagaaaaugaacacucaauucacagcugugggcaaagaauucaacaaauuggaaagaaggauggaaaacuuaaauaaaaaaguugaugauggguuuauagacauuuggacauauaaugcagaauuguugguucuacuggaaaaugaaaggacuuuggauuuccaugacuccaaugugaagaaucuguaugagaaaguaaaaagccaauuaaagaauaaugccaaagaaauaggaaauggguguuuugaauucuaucacaaguguaacgaugaaugcauggagaguguaaaaaauggaacuuaugacuauccaaaauauuccgaagaaucaaaguuaaacagggagaaaauugauggagugaaauuggaaucaaugggagucuaucagauucuggcgaucuacucaacagucgccaguucucugguccuuuuggucucccugggggcaaucagcuucuggauguguuccaaugggucuuugcaguguagaauaugcaucuaa

SEQ ID NO: 40919 - RNA, 1698 nt, Artificial Sequence
  derived and/or modified CDS sequence (wt) from hemagglutinin__InfluenzaA__AFJ78485
augaaaguaaaacuacugguucuguuaugcacauuuacagcuacauaugcagacacaauauguauaggcuaccaugccaacaacucaaccgacacuguugacacaguacuugagaagaaugugacagugacacacucugucaaccugcuugaggacagucacaauggaaaauuaugucuauuaaaaggaauagccccacuacaauuggguaauugcagcguugccggauggaucuuaggaaacccagaaugcgaauuacugauuuccagggaaucaugguccuacauuguagaaaaaccaaauccugagaauggaacauguuacccagggcauuucgccgacuaugaggaacugagggagcaauugaguucaguaucuucauuugagagauucgaaauauuccccaaagaaagcucauggcccaaccacaccacaaccggaguaucagcaucaugcucccauaauggggaaagcaguuuuuacaaaaauuugcuauggcugacggggaagaaugguuuguacccaaaccugagcaaguccuaugcaaacaacaaagagaaagaaguccuuguacuaugggguguucaucacccgccuaacauaggugaccaaagggcccucuaucauacagaaaaugcuuaugucucuguagugucuucacauuauagcagaaaauucaccccagaaauagccaaaagacccaaaguaagagaucaagaaggaagaaucaacuacuacuggacucuacuugaacccggggauacaauaauauuugaggcaaauggaaaucuaauagcgccaagauaugcuuucgcacugaguagaggcuuuggaucaggaaucaucaacucaaaugcaccaauggaugaaugugaugcgaagugccaaacaccucagggagcuauaaacagcagucuuccuuuccagaauguacacccagucacaauaggagaauguccaaaguaugucaggagugcaaaauuaaggaugguuacaggacuaaggaacaucccauccauucaauccagagguuuguuuggagccauugccgguuucauugaagggggguggacuggaaugguagaugguugguaugguuaucaucaucagaaugagcaaggaucuggcuaugcugcagaucaaaaaagcacacaaaaugccauuaaugggauuacaaacaaggugaauucuguaauugaaaaaaugaacacucaauucacagcugugggcaaagaauucaacaaauuggaaagaaggauggaaaacuuaaauaaaaaaguugaagauggguuuauagacauuuggacauauaaugcagaauuguugguucuacuggaaaaugaaaggacuuuggauuuccaugacuccaaugugaagaaucuguaugagaaaguaaaaagccaauuaaagaauaaugccaaagaaauaggaaauggguguuuugaauucuaucacaaguguaacgaugaaugcauggagaguguaaaaaauggaacuuaugacuauccaaaauauuccgaagaaucaaaguuaaacagggagaaaauugauggagugaaauuggaaucaaugggagucuaucagauucuggcgaucuacucaacagucgccaguucucugguucuuuuggucucccugggggcaaucagcuucuggauguguuccaaugggucuuugcaguguagaauaugcaucuaa

SEQ ID NO: 40920 - RNA, 1698 nt, Artificial Sequence
  derived and/or modified CDS sequence (wt) from hemagglutinin__InfluenzaA__AFJ78496
augaaaguaaaacuacugguccuguuaugcacauuuacagcuacauaugcagacacaauauguauaggcuaccaugccaacaacucaaccgacacuguugacacaguacuugagaagaaugugacagugacacacucugucaaccugcuugaggacagucacaauggaaaauuaugucuauuaaaaggaauagccccacuacaauuggguaauugcagcguugccggauggaucuuaggaaacccagaaugcgaauuacugauuuccagggaaucaugguccuacauuguagaaaaaccaaauccugagaauggaacauguuacccagggcauuucgccgacuaugaggaacugagggagcaauugaguucaguaucuucauuugagagauucgaaauauuccccaaagaaagcucauggcccaaccacaccacaaccggaguaucagcaucaugcucccauaauggggaaagcaguuuuuacaaaaauuugcuauggcugacggggaagaaugguuuguacccaaaccugagcaaguccuaugcaaacaacaaagagaaagaaguccuuguacuaugggguguucaucacccgccuaacauagguggccaaagggcucucuaucauacagaaaaugcuuaugucucuguagugucuucacauuauagcagaaaauucaccccagaaauagccaaaagacccaaaguaagagaucaagaaggaagaaucaacuacuacuggacucuacuugaacccggggauacaauaauauuugaggcaaauggaaaucuaauagcgccaagauaugcuuucgcacugaguagaggcuuuggaucaggaaucaucaacucaaaugcaccaauggaugaaugugaugcgaagugccaaacaccucagggagcuauaaacagcagucuuccuuuccagaauguacacccugucacaauaggagaguguccaaaguaugucaggagugcaaaauuaaggaugguuacaggacuaaggaacaucccauccauucaauccagagguuuguuuggagccauugccgguuucauugaagggggguggacuggaaugguagaugguugguaugguuaucaucaucagaaugagcaaggaucuggcuaugcugcagaucaaaaaagcacacaaaaugccauuaaugggauuacaaacaaggugaauucuguaauugagaaaaugaacacucaauucacagcugugggcaaagaauucaacaaauuggaaagaaggauggaaaacuuaaauaaaaaaguugaugauggguuuauagacauuuggacauauaaugcagaauuguugguucuacuggaaaaugaaaggacuuuggauuuccaugacuccaaugugaagaaucuguaugagaaaguaaaaagccaauuaaagaauaaugccaaagaaauaggaaauggguguuuugaauucuaucacaaguguaacgaugaaugcauggagaguguaaaaaauggaacuuaugacuauccaaaauauuccgaagaaucaaaguuaaacagggagaaaauugauggagugaaauuggaaucaaugggagucuaucagauucuggcgaucuacucaacagucgccaguucucugguucuuuuggucucccugggggcaaucagcuucuggauguguuccaaugggucuuugcaguguagaauaugcaucuaa

SEQ ID NO: 40921 - RNA, 1698 nt, Artificial Sequence
  derived and/or modified CDS sequence (wt) from hemagglutinin__InfluenzaA__AFJ78518
augaaaguaaaacuacugguccuguuaugcacauuuacagcuacauaugcagacacaauauguauaggcuaccaugccaacaacucaaccgacacuguugacacaguacuugagaagaaugugacagugacacacucugucaaccugcuugaggacagucacaauggaaaauuaugucuauuaaaaggaauagccccacuacaauuggguaauugcagcguugccggauggaucuuaggaaacccagaaugcgaauuacugauuuccagggaaucaugguccuacauuguagaaaaaccaaauccugagaauggaacauguuacccagggcauuucgccgacuaugaggaacugagggagcaauugaguucaguaucuucauuugagagauucgaaauauuccccaaagaaagcucauggcccaaccacaccacaaccggaguaucagcaucaugcucccauaauggggaaagcaguuuuuacaaaaauuugcuauggcugacggggaagaaugguuuguacccaaaccugagcaaguccuaugcaaacaacaaagagaaagaaguccuuguacuaugggguguucaucacccgccuaacauaggugaccaaagggcucucuaucauacagaaaaugcuuaugucucuguagugucuucacauuauagcagaaaauucaccccagaaauagccaaaagacccaaaguaagagaucaagaaggaagaaucaacuacuacuggacucuacuugaacccggggauacaauaauauuugaggcaaauggaaaucuaauagcgccaagauaugcuuucgcacugaguagaggcuuuggaucaggaaucaucaacucaaaugcaccaauggaugaaugugaugcgaagugccaaacaccucagggagcuauaaacagcagucuuccuuuccagaauguacacccugucacaauaggagaguguccaaaguaugucaggagugcaaaauuaaggaugguuacaggacuaaggaacaucccauccauucaauccagagguuuguuuggagccauugccgguuucauugaagggggguggacuggaaugguagaugguugguaugguuaucaucaucagaaugagcaaggaucuggcuaugcugcagaucaaaaaagcacacaaaaugccauuaaugggauuacaaacaaggugaauucuguaauugagaaaaugaacacucaauucacagcugugggcaaagaauucaacaaauuggaaagaaggauggaaaacuuaaauaaaaaaguugaugauggguuuauagacauuuggacauauaaugcagaauuguugguucuacuggaaaaugaaaggacuuuggauuuccaugacuccaaugugaagaaucuguaugagaaaguaaaaagccaauuaaagaauaaugccaaagaaauaggaaauggguguuuugaauucuaucacaaguguaacgaugaaugcauggagaguguaaaaaauggaacuuaugacuauccaaaauauuccgaagaaucaaaguuaaacagggagaaaauugauggagugaaauuggaaucaaugggagucuaucagauucuggcgaucuacucaacagucgccaguucucugguucuuuuggucucccugggggcaaucagcuucuggauguguuccaaugguucuuugcaguguagaauaugcaucuaa

SEQ ID NO: 40922 - RNA, 1698 nt, Artificial Sequence
  derived and/or modified CDS sequence (wt) from hemagglutinin__InfluenzaA__AFJ78529
augaaaguaaaacuacugguccuauuaugcacauuuacagcuacauaugcagacacaauauguaucggcuaccaugccaacaacucaaccgacacuguugacacaguacuugaaaagaaugugacagugacacacucugucaaccugcuugaggacaaccacaauggaaaacuaugucuauuaaaaggaauagccccauuacaauuggguaacugcagcguugccggguggaucuuaggaaacccagaaugcgaauuacugauuuccaaggagucaugguccuacauuguagaaagaccaaauccugagaauggaacauguuacccagggcauuucgccgacuaugaggaacugagggagcaauugaguucaguaucuucauuugagagguucgaaauauuccccaaagaaagcucauggcccaaccacaccguaaccggaguaucagcaucaugcucccauaacggggaaagcagcuuuuacaaaaauuugcuauggcugacgggaaagaaugguuuguacccaaaccugagcaaguccuaugcaaacaacaaagagaaagaaguccucguacuaugggguguucaucacccgccaaacauaggugaccaaaugacccucuaucauaaagaaaaugcuuaugucucuguagugucuucacauuauagcagaaaauucaccccagaaauagccaaaagacccaaaguaagagaucaagaaggaagaaucaacuacuacuggacucugcuugaacccggggauacaauaauauuugaggcaaaugggaaucuaauagcgccaagauaugcuuucgcacugaguagaggcuuuggaucaggaaucaucaacucaaaugcaccaauggaugaaugugaugcgaagugccaaacaccucagggagcuauaaacagcagucuuccuuuccagaauguacacccagucacaauaggagaauguccaaaguaugucaggagugcaaaauuaaggaugguuacaggacuaaggaacaucccauccauucaauccagagguuuguuuggagccauugccgguuucauugaagggggguggacuggaaugguagaugguugguaugguuaucaucaccagaaugagcaaggaucuggcuaugcugcagaucaaaaaagcacacaaaaugccauuaaugggauuacaaacaaggugaacucuguaauugagaagaugaacacucaauucacagcugugggcaaagaauucaacaaauuggaaagaaggauggaaaacuuaaauaaaaaaguugaugacggguuuauagacguuuggacauauaaugcagaacuguugguucuacuggaaaaugaaaggacuuuggauuuccaugacuccaaugugaagaauuuguaugagaaaguaaaaaaccaauuaaagaauaaugccaaagaaauaggaaauggguguuuugaauuuuaucacaaguguaacgaugaaugcauggagaguguaaaaaauggaacuuaugauuauccaaaauauuccgaagaaucaaaguuaagcagggagaaaauugauggagugaaauuggaaucaaugggagucuaucagauucuggcgaucuacucaacagucgccaguucucugguucuuuuggucucccugggggcaaucagcuucuggauguguuccaaugggucuuugcaguguagaauaugcaucuaa

SEQ ID NO: 40923 - RNA, 1698 nt, Artificial Sequence; identical to SEQ ID NO: 40922
  derived and/or modified CDS sequence (wt) from hemagglutinin__InfluenzaA__AFJ78540

SEQ ID NO: 40924 - RNA, 1698 nt, Artificial Sequence; identical to SEQ ID NO: 40922
  derived and/or modified CDS sequence (wt) from hemagglutinin__InfluenzaA__AFJ78551

SEQ ID NO: 40925 - RNA, 1698 nt, Artificial Sequence
  derived and/or modified CDS sequence (wt) from hemagglutinin__InfluenzaA__AFJ78562
augaaaguaaaacuacugguccuauuaugcacauucacagcuacauaugcagacacaauauguaucggcuaccaugccaacaacucaaccgacacuguugacacaguacuugaaaagaaugugacagugacacacucugucaaccugcuugaggacaaccacaauggaaaacuaugucuauuaaaaggaauagccccauuacaauuggguaacugcagcguugccggguggaucuuaggaaacccagaaugcgaauuacugauuuccaaggagucaugguccuacauuguagaaagaccaaauccugagaauggaacauguuacccagggcauuucgccgacuaugaggaacugagggagcaauugaguucaguaucuucauuugagagguucgaaauauuccccaaagaaagcucauggcccaaccacaccguaaccggaguaucagcaucaugcucccauaacggggaaagcagcuuuuacaaaaauuugcuauggcugacgggaaagaaugguuuguacccaacccugagcaaguccuaugcaaacaacaaagagaaagaaguccucguacuaugggguguucaucacccgccaaacauaggugaccaaaugacccucuaucauaaagaaaaugcuuaugucucuguagugucuucacauuauagcagaaaauucaccccagaaauagccaaaagacucaaaguaagagaucaagaaggaagaaucaacuacuacuggacucugcuugaacccggggauacaauaauauuugaggcaaaugggaaucuaauagcgccaagauaugcuuucgcacugaguagaggccuuggaucaggaaucaucaacucaaaugcaccaauggaugaaugugaugcgaagugccaaacaccucagggagcuauaaacagcagucuuccuuuccagaauguacacccagucacaauaggagaauguccaaaguaugucaggagugcaaaauuaaggaugguuacaggacuaaggaacaucccauccauucaauccagagguuuguuuggagccauugccgguuucauugaagggggguggacuggaaugguagaugguugguaugguuaucaucaccagaaugagcaaggaucuggcuaugcugcagaucaaaaaagcacacaaaaugccauuaaugggauuacaaacaaggugaacucuguaauugagaagaugaacacucaauucacagcugugggcaaagaauucaacaaauuggaaagaaggauggaaaacuuaaauaaaaaaguugaugacggguuuauagacguuuggacauauaaugcagaacuguugguucuacuggaaaaugaaaggacuuuggauuuccaugacuccaaugugaagaauuuguaugagaaaguaaaaaaccaauuaaagaauaaugccaaagaaauaggaaauggguguuuugaauuuuaucacaaguguaacgaugaaugcauggagaguguaaaaaauggaacuuaugauuauccaaaauauuccgaagaaucaaaguuaagcagggagaaaauugauggagugaaauuggaaucaaugggagucuaucagauucuggcgaucuacucaacagucgccaguucucugguucuuuuggucucccugggggcaaucagcuucuggauguguuccaaugggucuuugcaguguagaauaugcaucuaa

SEQ ID NO: 40926 - RNA, 1698 nt, Artificial Sequence
  derived and/or modified CDS sequence (wt) from hemagglutinin__InfluenzaA__AFJ78573
augaaaguaaaacuacugguccuauuaugcacauuuacagcuacauaugcagacacaauauguaucggcuaccaugccaacaacucaaccgacacuguugacacaguacuugaaaagaaugugacagugacacacucugucaaccugcuugaggacaaccacaauggaaaacuaugucuauuaaaaggaauagccccauuacaauuggguaacugcagcguugccggguggaucuuaggaaacccagaaugcgaauuacugauuuccaaggagucaugguccuacauuguagaaagaccaaauccugagaauggaacauguuacccagggcauuucgccgacuaugaggaacugagggagcaauugaguucaguaucuucauuugagagguucgaaauauuccccaaagaaagcucauggcccaaccacaccguaaccggaguaucagcaucaugcucccauaacggggaaagcagcuuuuacaaaaauuugcuauggcugacgggaaagaaugguuuguacccaaaccugagcaaguccuaugcaaacaacaaagagaaagaaguccucguacuaugggguguucaucacccgccaaacauaggugaccaaaugacccucuaucauaaagaaaaugcuuaugucucuguagugucuucacauuauagcagaaaauucaccccagaaauagccaaaagacccaaaguaagagaucaagaaggaagaaucaacuacuacuggacucugcuugaacccggggauacaauaauauuugaggcaaaugggaaucuaauagcgccaagauaugcuuucgcacugaguagaggcuuuggaucaggaaucaucaacucaaaugcaucaauggaugaaugugaugcgaagugccaaacaccucagggagcuauaaacagcagucuuccuuuccagaauguacacccagucacaauaggagaauguccaaaguaugucaggagugcaaaauuaaggaugguuacaggacuaaggaacaucccauccauucaauccagagguuuguuuggagccauugccgguuucauugaagggggguggacuggaaugguagaugguugguaugguuaucaucaccagaaugagcaaggaucuggcuaugcugcagaucaaaaaagcacacaaaaugccauuaaugggauuacaaacaaggugaacucuguaauugagaagaugaacacucaauucacagcugugggcaaagaauucaacaaauuggaaagaaggauggaaaacuuaaauaaaaaaguugaugacggguuuauagacguuuggacauauaaugcagaacuguugguucuacuggaaaaugaaaggacuuuggauuuccaugacuccaaugugaagaauuuguaugagaaaguaaaaaaccaauuaaagaauaaugccaaagaaauaggaaauggguguuuugaauuuuaucacaaguguaacgaugaaugcauggagaguguaaaaaauggaacuuaugauuauccaaaauauuccgaagaagcaaaguuaagcagggagaaaauugauggagugaaauuggaaucaaugggagucuaucagauucuggcgaucuacucaacagucgccaguucucugguucuuuuggucucccugggggcaaucagcuucuggauguguuccaaugggucuuugcaguguagaauaugcaucuaa

SEQ ID NO: 40927 - RNA, 1698 nt, Artificial Sequence
  derived and/or modified CDS sequence (wt) from hemagglutinin__InfluenzaA__AFJ78584
augaaaguaaaacuacugguccuguuaugcacauuuacagcuacauaugcagacacaauauguauaggcuaccaugcuaacaacucgaccgacacuguugacacaguacuugaaaagaaugugacagugacacacucugucaaccugcuugagaacagucacaauggaaaacuaugucuauuaaaaggaauagccccacuacaauuggguaauugcagcguugccggguggaucuuaggaaacccagaaugcgaauuacugauuuccaaggagucaugguccuacauuguagaaaaaccaaauccugagaauggaacauguuacccagggcauuucgcugacuaugaggaacugagggagcaauugaguucaguaucuucauuugagagguucgaaauauuccccaaagaaagcucauggcccaaccacaccguaaccggagugucagcaucaugcucccauaauggggaaaacaguuuuuacagaaauuugcuauggcugacgaggaagaaugguuuguacccaaaccugagcaaguccuaugcaaacaacaaagaaaaagaaguccuuguacuaugggguguucaucacccgccaaacauaggugaccaaaaggcccucuaucauacagaaaaugcuuaugucucuguagugucuucacauuauagcagaaaauucaccccagaaauagccaaaagacccaaaguaagagaucaagaaggaagaaucaacuacuacuggacucugcuugaacccggggauacaauaauauuugaggcaaauggaaaucuaauagcgccaagauaugcuuucgcacugaguagaggcuuuggaucaggaaucaucaacucaaaugcaccaauggauaaaugugaugcgaagugccaaacaccucagggagcuauaaacagcagucuuccuuuccagaacguacacccagucgcaauaggagaguguccaaaguaugucaggagugcaaaauuaaggaugguuacaggacuaaggaacaucccauccauucaauccagagguuuguuuggagccauugccgguuucauugaagggggguggacuggaaugguagaugguugguaugguuaucaucaucagaaugagcaaggaucuggcuaugcugcagaucaaaaaagcacacaaaaugccauuaaugggauuacaaacaaggugaauucuguaauugagaaaaugaacacucaauucacagcagugggcaaagaauucaacaaauuggaaagaaggauggaaaacuugaauaaaaaaguugaugauggguuuauagacauuuggacauauaaugcagaacuguugguucuacuggaaaaugaaaggacuuuggauuuccaugacuccaaugugaagaaucuguaugagaaaguaaaaagccaguuaaagaauaaugcuaaagaaauaggaaauggguguuuugaauucuaucacaaguguaacgaugaaugcauggagaguguaaagaauggaacuuaugacuauccaaaauauuccgaagaaucaaaguuaaacagggagaaaauugauggagugaaauuggaaucaaugggagucuaucagauucuggcgaucuacucaacagucgccaguucucugguucuuuuggucucccugggggcaaucagcuucuggauguguuccaaugggucuuugcaguguagaauaugcaucuaa

SEQ ID NO: 40928 - RNA, 1698 nt, Artificial Sequence
  derived and/or modified CDS sequence (wt) from hemagglutinin__InfluenzaA__AFJ78595
augaaaguaaaacuacugguccuguuaugcacauuuacagcuacauaugcagacacaauauguauaggcuaccaugcuaacaacucgaccgacacuguugacacaguacuugaaaagaaugugacagugacacacucugucaaccugcuugagaacagucacaauggaaaacuaugucuauuaaaaggaauagccccacuacaauuggguaauugcagcguugccggguggaucuuaggaaacccagaaugcgaauuacugauuuccaaggagucaugguccuacauuguagaaaaaccaaauccugagaauggaacauguuacccagggcauuucgcugacuaugaggaacugagggagcaauugaguucaguaucuucauuugagagguucgaaauauuccccaaagaaagcucauggcccaaccacaccguaaccggagugucagcaucaugcucccauaauggggaaagcaguuuuuacagaaauuugcuauggcugacggggaagaaugguuuguacccaaaccugagcaaguccuaugcaaacaacagagaaaaagaaguccuuguacuaugggguguucaucacccgccaaacauaggugaccaaaaggcccucuaucauacagaaaaugcuuaugucucuguagugucuucacauuauagcagaaaauucaccccagaaauagccaaaagacccaaaguaagagaucaagaaggaagaaucaacuacuacuggacucugcuugaacccggggauacaauaauauuugaggcaaauggaaaucuaauagcgccaagauaugcuuucgcacugaguagaggcuuuggaucaggaaucaucaacucaaaugcaccaauggauaaaugugaugcgaagugccaaacaccucagggagcuauaaacagcagucuuccuuuccagaacguacacccagucacaauaggagaguguccaaaguaugucaggagugcaaaauuaaggaugguuacaggacuaaggaacaucccauccauucaauccagagguuuguuuggagccauugccgguuucauugaagggggguggacuggaaugguagaugguugguaugguuaucaucaucagaaugagcaaggaucuggcuaugcugcagaucaaaaaagcacacaaaaugccauuaaugggauuacaaacaaggugaauucuguaauugagaaaaugaacacucaauucacagcagugggcaaagaauucaacaaauuggaaagaaggauggaaaacuugaauaaaaaaguugaugauggguuuauagacauuuggacauauaaugcagaacuguugguucuacuggaaaaugaaaggacuuuggauuuccaugacuccaaugugaagaaucuguaugagaaaguaaaaagccaguuaaagaauaaugcuaaagaaauaggaaauggguguuuugaauucuaucacaaguguaacgaugaaugcauggagaguguaaagaauggaacuuaugacuauccaaaauauuccgaagaaucaaaguuaaacagggagaaaauugauggagugaaauuggaaucaaugggagucuaucagauucuggcgaucuacucaacagucgccaguucucugguucuuuuggucucccugggggcaaucagcuucuggauguguuccaaugggucuuugcaguguagaauaugcaucuaa

SEQ ID NO: 40929 - RNA, 1698 nt, Artificial Sequence
  derived and/or modified CDS sequence (wt) from hemagglutinin__InfluenzaA__AFJ78617
augaaaguaaaacuacugguccuguuaugcacauuuacagcuacauaugcagacacaauauguauaggcuaccaugcuaacaacucgaccgacacuguugacacaguacuugaaaagaaugugacagugacacacucugucaaccugcuugagaacagucacaauggaaaacuaugucuauuaaaaggaauagccccacuacaauuggguaacugcagcguugccggguggaucuuaggaaacccagaaugcgaauuacugauuuccaaggagucaugguccuacauuguagaaaaaccaaauccugagaauggaacauguuacccagggcauuucgcugacuaugaggaacugagggagcaauugaguucaguaucuucauuugagagguucgaaauauuccccaaagaaagcucauggcccaaccacaccguaaccggagugucagcaucaugcucccaugauggggaaagcaguuuuuacagaaauuugcuauggcugacggggaagaaugguuuguacccaaaccugagcaaguccuaugcaaacaacaaagaaaaagaaguccuuguacuaugggguguucaucacccgccaagcauaagugaccaaaagacccucuaucauacagaaaaugcucauguuucuguagugucuucacauuauagcagaaaauucaccccagaaauagccaaaagacccaaaguaagagaucaagaaggaagaaucaacuacuacuggacucugcuugaacccggggauacaauaauauuugaggcaaauggaaaucuaauagcgccaagguaugcuuucgcacugaguagaggcuuuggaucaggaaucaucaacucgaaugcaccaauggauaaaugugaugcgaagugccaaacaccucagggagcuauaaacagcagucuuccuuuccagaacguacacccagucacaauaggagaguguccaaaguaugucaggagugcaaaauuaaggaugguuacaggacuaaggaacaucccauccauucaauccagagguuuguuuggagccauugccgguuucauugaagggggguggacuggaaugguagaugguugguaugguuaucaucaucagaaugagcaaggaucuggcuaugcugcagaucaaaaaagcacacaaaaugccauuaaugggauuacaaacaaggugaauucuguaauugagaaaaugaacacucaauucacagcagugagcaaagaauucaacaaauuggaaagaaggauggaaaacuugaauaaaaaaguugaugauggguuuauagacauuuggacauauaaugcagaacuguugguucuacuggaaaaugaaaggacuuuggauuuccaugacuccaaugugaagaaucuguaugaaaaaguaaaaagccaguuaaagaauaaugcuaaagaaauaggaaauggguguuuugaauucuaucacaaguguaaugaugaaugcauggagaguguaaagaauggaacuuaugacuauccaaaauauuccgaagaaucgaaguuaaacagggagaaaauugauggagugaaauuggaaucaaugggagucuaucagauucuggcgaucuacucaacagucgccaguucucugguucuuuuggucucccugggggcaaucagcuucuggauguguuccaaugggucuuugcaguguagaauaugcaucuaa

SEQ ID NO: 40930 - RNA, 1698 nt, Artificial Sequence
  derived and/or modified CDS sequence (wt) from hemagglutinin__InfluenzaA__AFJ78628
augaaaguaaaacuacugguccuauuaugcacauuuacagcuacauaugcagacacaauauguaucggcuaccaugccaacaacucaaccgacacuguugacacaguacuugaaaagaaugugacagugacacacucugucaaccugcuugaggacaaccacaauggaaaacuaugucuauuaaaaggaauagccccauuacaauuggguaacugcagcguugccggguggaucuuaggaaacccagaaugcgaauuacugauuuccaaggagucaugguccuacauuguagaaagaccaaauccugagaauggaacauguuacccaggacauuucgccgacuaugaggaacugagggagcaauugaguucaguaucuucauuugagagguucgaaauauuccccaaagaaagcucauggcccaaccacaccguaaccggaguaucagcaucaugcucccauaacggggaaagcagcuuuuacaaaaauuugcuauggcugacgggaaagaaugguuuguacccaaaccugagcaaguccuaugcaaacaacaaagagaaagaaguccucguacuaugggguguucaucacccgccaaacauagguaaccaaaugacccucuaucauaaagaaaaugcuuaugucucuguagugucuucacauuauagcagaaaauucaccccagaaauagccaaaagacccaaaguaagagaucaagaaggaagaaucaacuacuacuggacucugcuugaacccggggauacaauaauauuugaggcaaaugggaaucuaauagcgccaagauaugcuuucgcacugaguagaggcuuuggaucaggaaucaucaacucaaaugcaccaauggaugaaugugaugcgaagugccaaacaccucagggagcuauaaacagcagucuuccuuuccagaauguacacccagucacaauaggagaauguccaaaguaugucaggagugcaaaauuaaggaugguuacaggacuaaggaacaucccauccauucaauccagagguuuguuuggagccauugccgguuucauugaagggggguggacuggaaugguagaugguugguaugguuaucaucaccagaaugagcaaggaucuggcuaugcugcagaucaaaaaagcacacaaaaugccauuaaugggauuacaaacaaggugaacucuguaauugagaagaugaacacucaauucacagcugugggcaaagaauucaacaaauuggaaagaaggauggaaaacuuaaauaaaaaaguugaugacggguuuauagacguuuggacauauaaugcagaacuguugguucuacuggaaaaugaaaggacuuuggauuuccaugacuccaaugugaagaauuuguaugagaaaguaaaaaaccaauuaaagaauaaugccaaagaaauaggaaauggguguuuugaauuuuaucacaaguguaacgaugaaugcauggagaguguaaaaaauggaacuuaugauuauccaaaauauuccgaagaaucaaaguuaagcagggagaaaauugauggagugaaauuggaaucaaugggagucuaucagauucuggcgaucuacucaacagucgccaguucucugguucuuuuggucucccugggggcaaucagcuucuggauguguuccaaugggucuuugcaguguagaauaugcaucuaa

SEQ ID NO: 40931 - RNA, 1698 nt, Artificial Sequence
  derived and/or modified CDS sequence (wt) from hemagglutinin__InfluenzaA__AFJ78639
augaaaguaaaacuacugguccuguuaugcacauuuacagcuacauaugcagacacaauauguauaggcuaccaugcuaacaacucgaccgacacuguugacacaguacuugaaaagaaugugacagugacacacucugucaaccugcuugagaacagucacaauggaaaacuaugucuauuaaaaggaauagccccacuacaauuggguaacugcagcguugccggguggaucuuaggaaacccagaaugcgaauuacugauuuccaaggagucaugguccuacauuguagaaaaaccaaauccugagaauggaacauguuacccagggcauuucgcugacuaugaggaacugagggagcaauugaguucaguaucuucauuugagagguucgaaauauuccccaaagaaagcucauggcccaaccacaccguaaccggagugucagcaucaugcucccauaauggggaaagcaguuuuuacagaaauuugcuauggcugacggggaagaaugguuuguacccaaaccugagcaaguccuaugcaaacaacaaagaaaaagaaguccuuguacuaugggguguucaucacccgccaagcauaaguaaccaaaagacccucuaucauacagaaaaugcuuauguuucuguagugucuucacauuauagcagaaaauucaccccagaaauagccaaaagacccaaaguaagagaucaagaaggaagaaucaacuacuacuggacucugcuugaacccggggauacaauaauauuugaggcaaauggaaaucuaauagcgccaagguaugcuuucgcacugaguagaggcuuuggaucaggaaucaucaacucaaaugcaccaauggauaaaugugaugcgaagugccaaacaccucagggagcuauaaacagcagucuuccuuuccagaacguacacccagucacaauaggagaguguccaaaguaugucaggagugcaaaauuaaggaugguuacagggcuaaggaacaucccauccauucaauccagagguuuguuuggagccauugccgguuucauugaagggggguggacuggaaugguagaugguugguaugguuaucaucaucagaaugagcaaggaucuggcuaugcugcagaucaaaaaagcacacaaaaugccauuaaugggauuacaaacaaggugaauucuguaauugagaaaaugaacacucaauucacagcagugggcaaagaauucaacaaauuggaaagaaggauggaaaacuugaauaaaaaaguugaugauggguuuauagacauuuggacauauaaugcagaacuguugguucuacuggaaaaugaaaggacuuuggauuuccaugacuccaaugugaagaaucuguaugagaaaguaaaaagccaguuaaagaauaaugcuaaagaaauaggaaauggguguuuugaauucuaucacaaguguaacgaugaaugcauggagaguguaaagaauggaacuuaugacuauccaaaauauuccgaagaaucgaaguuaaacagggagaaaauugauggagugaaauuggaaucaaugggagucuaucagauucuggcgaucuacucaacagucgccaguucucugguucuuuuggucucccugggggcaaucagcuucuggauguguuccaaugggucuuugcaguguagaauaugcaucuaa

SEQ ID NO: 40932 - RNA, 1698 nt, Artificial Sequence
  derived and/or modified CDS sequence (wt) from hemagglutinin__InfluenzaA__AFJ78650
augaaaguaaaacuacugguccuguuaugcacauuuacagcuacauaugcagacacaauauguauaggcuaccaugcuaacaacucgaccgacacuguugacacaguacuugaaaagaaugugacagugacacacucugucaaccugcuugagaacagucacaauggaaaacuaugucuauuaaaaggaauagccccacuacaauuggguaacugcagcguugccggguggaucuuaggaaacccagaaugcgaauuacugauuuccaaggagucaugguccuacauuguagaaaaaccaaauccugagaauggaacauguuacccagggcauuucgcugacuaugaggaacugagggagcaauugaguucaguaucuucauuugagagguucgaaauauuccccaaagaaagcucauggcccaaccacaccguaaccggagugucagcaucaugcucccauaauggggaaagcaguuuuuacagaaauuugcuauggcugacggggaagaaugguuuguacccaaaccugagcaaguccuaugcaaacaacaaagaaaaagaaguccuuguacuaugggguguucaucacccgccaagcauaaguaaccaaaagacccucuaucauacagaaaaugcuuauguuucuguagugucuucacauuauagcagaaaauucaccccagaaauagccaaaagacccaaaguaagagaucaagaaggaagaaucaacuacuacuggacucugcuugaacccggggauacaauaauauuugaggcaaauggaaaucuaauagcgccaagguaugcuuucgcacugaguagaggcuuuggaucaggaaucaucaacucaaaugcaccaauggauaaaugugaugcgaagugccaaacaccucagggagcuauaaacagcagucuuccuuuccagaacguacacccagucacaauaggagaguguccaaaguaugucaggagugcaaaauuaaggaugguuacaggacuaaggaacaucccauccauccaauccagagguuuguuuggagccauugccgguuucauugaagggggguggacuggaaugguagaugguugguaugguuaucaucaucagaaugagcaaggaucuggcuaugcugcagaucaaaaaagcacacaaaaugccauuaaugggauuacaaacaaggugaauucuguaauugagaaaaugaacacucaauucacagcagugggcaaagaauucaacaaauuggaaagaaggauggaaaacuugaauaaaaaaguugaugauggguuuauagacauuuggacauauaaugcagaacuguugguucuacuggaaaaugaaaggacuuuggauuuccaugacuccaaugugaagaaucuguaugagaaaguaaaaagccaguuaaagaauaaugcuaaagaaauaggaaauggguguuuugaauucuaucacaaguguaaugaugaaugcauggagaguguaaagaauggaacuuaugacuauccaaaauauuccgaagaaucgaaguuaaacagggagaaaauugauggagugaaauuggaaucaaugggagucuaucagauucuggcgaucuacucaacagucgccaguucucugguucuuuuggucucccugggggcaaucagcuucuggauguguuccaaugggucuuugcaguguagaauaugcaucuaa

SEQ ID NO: 40933 - RNA, 1701 nt, Artificial Sequence; identical to SEQ ID NO: 35309
  derived and/or modified CDS sequence (wt) from hemagglutinin__InfluenzaA__AFJ78661

SEQ ID NO: 40934 - RNA, 1701 nt, Artificial Sequence
  derived and/or modified CDS sequence (wt) from hemagglutinin__InfluenzaA__AFJ78681
augaaggcaauacuaguaguucugcuauauacauuugcaaccguaaaugcagacacauuauguauagguuaucaugcgaacaauucaacagacacuguagacacaguacuagaaaagaauguaacaguaacacacucuguuaaccuucuagaagacaagcauaacgggaaacuaugcaaacuaagagggguagccccauugcauuuggguaaauguaacauugcuggcuggauccugggaaauccagagugugaaucacucuccacagcaagcucaugguccuacauuguggaaacaucuaguucagacaauggaacguguuacccaggagauuucaucgauuaugaggagcuaagagagcaauugagcucagugucaucauuugaaagguuugagauauuccccaagacaaguucauggcccaaucaugacucgaacaaagguguaacggcagcauguccucaugcuggagcaaaaagcuucuacaaaaauuuaauauggcuaguuaaaaaaggaaauucauacccaaagcucagcaaauccuacauuaaugauaaagggaaagaaguccucgugcuauggggcauucaccauccaucuacuagugcugaccaacaaagucucuaucagaaugcagaugcauauguuuuuguggggacaucaagauacagcaagaaguucaagccggaaauagcaauaagacccaaagugagggaucaagaagggagaaugaauuauuacuggacacuaguagagccgggagacaaaauaacauucgaagcaacuggaaaucuagugguaccgagauaugcauucgcaauggaaagaaaugcuggaucugguauuaucauuucagauacaccaguccacgauugcaauacaacuugucagacacccaagggugcuauaaacaccagccucccauuucagaauauacauccgaucacaauuggaaaaugucccaaauauguaaaaagcacaaaauugagacuggccacaggauugaggaaugucccuucuauucaaucuagaggccuauuuggggccauugccgguuucauugaagggggguggacagggaugguagauggaugguacgguuaucaccaucaaaaugagcaggggucaggauaugcagccgaccugaagagcacacagaaugccauugacgagauuacuaacaaaguaaauucuguuauugaaaagaugaauacacaguucacagcaguagguaaagaguucaaccaccuggaaaaaagaauagagaauuuaaauaaaaaaguugaugaugguuuccuggacauuuggacuuacaaugccgaacuguugguucuauuggaaaaugaaagaacuuuggacuaccacgauucaaaugugaagaacuuauaugaaaagguaagaagccaguuaaaaaacaaugccaaggaaauuggaaacggcugcuuugaauuuuaccacaaaugcgauaacacgugcauggaaagugucaaaaaugggacuuaugacuacccaaaauacucagaggaagcaaaauuaaacagagaagaaauagaugggguaaagcuggaaucaacaaggauuuaccagauuuuggcgaucuauucaacugucgccaguucauugguacugguagucucccugggggcaaucaguuucuggaugugcucuaaugggucucuacaguguagaauauguauuuaa

SEQ ID NO: 40935 - RNA, 1701 nt, Artificial Sequence; identical to SEQ ID NO: 34681
  derived and/or modified CDS sequence (wt) from hemagglutinin__InfluenzaA__AFJ78691

SEQ ID NO: 40936 - RNA, 1701 nt, Artificial Sequence
  derived and/or modified CDS sequence (wt) from hemagglutinin__InfluenzaA__AFJ78701
augaaggcaauacuaguaguucugcuauauacauuugcaaccgcaaaugcagacacauuauguauagguuaucaugcgaacaauucaacagacacuguagacacaguacuagaaaagaauguaacaguaacacacucuguuaaccuucuagaagacaagcauaacgggaaacuaugcaaacuaagagggguagccccauugcauuuggguaaauguaacauugcuggcuggauccugggaaauccagagugugaaucacucuccacagcaagcucaugguccuacauuguggaaacaucuaguucagacaauggaacguguuacccaggagauuucaucgauuaugaggagcuaagagagcaauugagcucagugucaucauuugaaagguuugagauauuccccaagacaaguucauggcccaaucaugacucgaacaaagguguaacggcagcauguccucaugcuggagcaaaaagcuucuacaaaaauuuaauauggcuaguuaaaaaaggaaauucauacccaaagcucagcaaauccuacauuaaugauaaagggaaagaaguccucgugcuauggggcauucaccauccaucuacuagugcugaccaacaaagucucuaucaaaaugcagaugcauauguuuuuguggggacaucaagauacagcaagaaguucaagccggaaauagcaauaagacccaaagugagggaucaagaagggagaaugaacuauuacuggacacuaguagagccgggagacaaaauaacauucgaagcaacuggaaaucuagugguaccgagauaugcauucgcaauggaaagaaaugcuggaucugguauuaucauuucagauacaccaguccacgauugcaauacaacuugucagacacccaagggugcuauaaacaccagccucccauuucagaauauacauccgaucacaauuggaaaaugucccaaauauguaaaaagcacaaaauugagacuggccacaggauugaggaaugucccuucuauucaaucuagaggccuauuuggggccauugccgguuucauugaagggggguggacagggaugguagauggaugguacgguuaucaccaucaaaaugagcaggggucaggauaugcagccgaccugaagagcacacagaaugccauugacgagauuacuaacaaaguaaauucuguuauugaaaagaugaauacacaguucacagcaguagguaaagaguucaaccaccuggaaaaaagaauagagaauuuaaauaaaaaaguugaugaugguuuccuggacauuuggacuuacaaugccgaacuguugguucuauuggaaaaugaaagaacuuuggacuaccacgauucaaaugugaagaacuuauaugaaaagguaagaagccaguuaaaaaacaaugccaaggaaauuggaaacggcugcuuugaauuuuaccacaaaugcgauaacacgugcauggaaagugucaaaaaugggacuuaugacuacccaaaauacucagaggaagcaaaauuaaacagagaagaaauagaugggguaaagcuggaaucaacaaggauuuaccagauuuuggcgaucuauucaacugucgccaguucauugguacugguagucucccugggggcaaucaguuucuggaugugcucuaaugggucucuacaguguagaauauguauuuaa

SEQ ID NO: 40937 - RNA, 1701 nt, Artificial Sequence
  derived and/or modified CDS sequence (wt) from hemagglutinin__InfluenzaA__AFJ78711
augaaggcaauacuaguaguucugcuauauacauuugcaaccgcaaaugcagacacauuauguauagguuaucaugcgaacaauucaacagacacuguagacacaguacuagaaaagaauguaacaguaacacacucuguuaaccuucuagaagacaagcauaacgggaaacuaugcaaacuaagagggguagccccauugcauuuggguaaauguaacauugcuggcuggauccugggaaauccagagugugaaucacucuccacagcaagcucaugguccuacauuguggaaacaucuaguucagacaauggaacguguuacccaggagauuucaucgauuaugaggagcuaagagagcaauugagcucagugucaucauuugaaagguuugagauauuccccaagacaaguucauggcccaaucaugacucgaacaaagguguaacggcagcauguccucaugcuggagcaaaaagcuucuacaaaaauuuaauauggcuaguuaaaaaaggaaauucauacccaaagcucagcaaauccuacauuaaugauaaagggaaagaaguccucgugcuauggggcauucaccauccaucuacuagugcugaccaacaaagucucuaucagaaugcagaugcauauguuuuuguggggacaucaagauacagcaagaaguucaagccggaaauagcaauaagacccaaagugagggaucaagaagggagaaugaacuauuacuggacacuaguagagccgggagacaaaauaacauucgaagcaacuggaaaucuagugguaccgagauaugcauucgcaauggaaagaaaugcuggaucugguauuaucauuucagauacaccaguccacgauugcaauacaacuugucagacacccaagggugcuauaaacaccagccucccauuucagaauauacauccgaucacaauuggaaaauguccaaaauauguaaaaagcacaaaauugagacuggccacaggauugaggaaugucccgucuauucaaucuagaggccuauuuggggccauugccgguuucauugaagggggguggacagggaugguagauggaugguacgguuaucaccaucaaaaugagcaggggucaggauaugcagccgaccugaagagcacacagaaugccauugacgagauuacuaacaaaguaaauucuguuauugaaaagaugaauacacaguucacagcaguagguaaagaguucaaccaccuggaaaaaagaauagagaauuuaaauaaaaagguugaugaugguuuccuggauauuuggacuuacaaugccgaacuguugguucuauuggaaaaugaaagaacuuuggacuaccacgauucaaaugugaagaacuuauaugaaaggguaagaagccaguuaaaaaacaaugccaaggaaauuggaaacggcugcuuugaauuuuaccacaaaugcgauaacacgugcauggaaagugucaaaaaugggacuuaugacuacccaaaauacucagaggaagcaaaauuaaacagagaagaaauagaugggguaaagcuggaaucaacaaggauuuaccagauuuuggcgaucuauucaacugucgccaguucauugguacugguagucucccugggggcaaucaguuucuggaugugcucuaaugggucucuacaguguagaauauguauuuaa

SEQ ID NO: 40938 - RNA, 1701 nt, Artificial Sequence; identical to SEQ ID NO: 34681
  derived and/or modified CDS sequence (wt) from hemagglutinin__InfluenzaA__AFJ78721

SEQ ID NO: 40939 - RNA, 1701 nt, Artificial Sequence
  derived and/or modified CDS sequence (wt) from hemagglutinin__InfluenzaA__AFJ78731
augaaggcaauacuaguaguucugcuauauacauuugcaaccgcaaaugcagacacauuauguauagguuaucaugcgaacaauucaacagacacuguagacacaguacuagaaaagaauguaacaguaacacacucuguuaaccuucuagaagacaagcauaacgggaaacuaugcaaacuaagagggguagccccauugcauuuggguaaauguaacauugcuggcuggauccugggaaauccagagugugaaucacucuccacagcaagcucaugguccuacauuguggaaacaucuaguucagacaauggaacguguuacccaggagauuucaucgauuaugaggagcuaagagagcaauugagcucagugucaucauuugaaagguuugagauauuccccaagacaaguucauggcccaaucaugacucgaacaaagguguaacggcagcauguccucaugcuggagcaaaaagcuucuacaaaaauuuaauauggcuaguuaaaaaaggaaauucauacccaaagcucagcaaauccuacauuaaugauaaagggaaagaaguccucgugcuauggggcauucaccauccaucuacuagugcugaccaacaaagucucuaucagaaugcagaugcauauguuuuuguggggacaucaagauacagcaagaaguucaagccggaaauagcaauaagacccaaagugagggaucaagaagggagaaugaacuauuacuggacacuaguagagccgggagacaaaauaacauucgaagcaacuggaaaucuagugguaccgagauaugcauucgcaauggaaagaaaugcuggaucugguauuaucauuucagauacaccaguccacgauugcaauacaacuugucagacacccaaggguucuauaaacaccagccucccauuucagaauauacauccgaucacaauuggaaaauguccaaaauauguaaaaagcacaaaauugagacuggccacaggauugaggaaugucccuucuauucaaucuagaggccuauuuggggccauugccgguuucauugaagggggguggacagggaugguagauggaugguacgguuaucaccaucaaaaugagcaggggucaggauaugcagccgaccugaagagcacacagaaugccauugacgagauuacuaacaaaguaaauucuguuauugaaaagaugaauacacaguucacagcaguagguaaagaguucaaccaccuggaaaaaagaauagagaauuuaaauaaaaaaguugaugaugguuuccuggacauuuggacuuacaaugccgaacuguugguucuauuggaaaaugaaagaacuuuggacuaccacgauucaaaugugaagaacuuauaugaaaagguaagaagccaguuaaaaaacaaugccaaggaaauuggaaacggcugcuuugaauuuuaccacaaaugcgauaacacgugcauggaaagugucaaaaaugggacuuaugacuacccaaaauacucagaggaagcaaaauuaaacagagaagaaauagaugggguaaagcuggaaucaacaaggauuuaccagauuuuggcgaucuauucaacugucgccaguucauugguacugguagucucccugggggcaaucaguuucuggaugugcucuaaugggucucuacaguguagaauauguauuuaa

SEQ ID NO: 40940 - RNA, 1701 nt, Artificial Sequence; identical to SEQ ID NO: 35845
  derived and/or modified CDS sequence (wt) from hemagglutinin__InfluenzaA__AFJ78741

SEQ ID NO: 40941 - RNA, 1701 nt, Artificial Sequence; identical to SEQ ID NO: 34681
  derived and/or modified CDS sequence (wt) from hemagglutinin__InfluenzaA__AFJ78751

SEQ ID NO: 40942 - RNA, 1701 nt, Artificial Sequence; identical to SEQ ID NO: 34681
  derived and/or modified CDS sequence (wt) from hemagglutinin__InfluenzaA__AFJ78761

SEQ ID NO: 40943 - RNA, 1701 nt, Artificial Sequence; identical to SEQ ID NO: 34681
  derived and/or modified CDS sequence (wt) from hemagglutinin__InfluenzaA__AFJ78771

SEQ ID NO: 40944 - RNA, 1701 nt, Artificial Sequence; identical to SEQ ID NO: 34681
  derived and/or modified CDS sequence (wt) from hemagglutinin__InfluenzaA__AFJ78781

SEQ ID NO: 40945 - RNA, 1701 nt, Artificial Sequence; identical to SEQ ID NO: 35309
  derived and/or modified CDS sequence (wt) from hemagglutinin__InfluenzaA__AFJ78791

SEQ ID NO: 40946 - RNA, 1701 nt, Artificial Sequence
  derived and/or modified CDS sequence (wt) from hemagglutinin__InfluenzaA__AFJ78801
augaaggcaauacuaguaguucugcuauauacauuugcaaccgcaaaugcagacacauuauguauagguuaucaugcgaacaauucaacagacacuguagacacaguacuagaaaagaauguaacaguaacacacucuguuaaccuucuagaagacaagcauaacgggaaacuaugcaaacuaagagggguagccccauugcauuuggguaaauguaacauugcuggcuggauccugggaaauccagagugugaaucacucuccacagcaagcucaugguccuacauuguggaaacaucuaguucagacaauggaacguguuacccaggagauuucaucgauuaugaggagcuaagagagcaauugagcucagugucaucauuugaaagguuugagauauuccccaagacaaguucauggcccaaucaugacucgaacaaagguguaacggcagcauguccucaugcuggagcaaaaagcuucuacaaaaauuuaauauggcuaguuaaaaaaggaaauucauacccaaagcucagcaaauccuacauuaaugauaaagggaaagaaguccucgugcuauggggcauucaccauccaucuacuagugcugaccaacaaagucucuaucagaaugcagaugcauauguuuuuguggggacaucaagauacagcaagaaguucaagccggaaauagcaauaagacccaaagugagggaucaagaagggagaaugaacuauuacuggacacuaguagagccgggagacaaaauaacauucgaagcaacuggaaaucuagugguaccgagauaugcauucgcaauggaaagaaaugcuggaucugguauuaucauuucagauacaccaguccacgauugcaauacaacuugucagacacccaagggugcuauaaacaccagucucccauuucagaauauacauccgaucacaauuggaaaauguccaaaauauguaaaaagcacaaaauugagacuggccacaggauugaggaaugucccuucuauucaaucuagaggccuauuuggggccauugccgguuucauugaagggggguggacagggaugguagauggaugguacgguuaucaccaucaaaaugagcaggggucaggauaugcagccgaccugaagagcacacagaaugccauugacgagauuacuaacaaaguaaauucuguuauugaaaagaugaauacacaguucacagcaguagguaaagaguucaaccaccuggaaaaaagaauagagaauuuaaauaaaaaaguugaugaugguuuccuggacauuuggacuuacaaugccgaacuguugguucuauuggaaaaugaaagaacuuuggacuaccacgauucaaaugugaagaacuuauaugaaaagguaagaagccaguuaaaaaacaaugccaaggaaauuggaaacggcugcuuugaauuuuaccacaaaugcgauaacacgugcauggaaagugucaaaaaugggacuuaugacuacccaaaauacucagaggaagcaaaauuaaacagagaagaaauagaugggguaaagcuggaaucaacaaggauuuaccagauuuuggcgaucuauucaacugucgccaguucauugguacugguagucucccugggggcaaucaguuucuggaugugcucuaaugggucucuacaguguagaauauguauuuaa

SEQ ID NO: 40947 - RNA, 1701 nt, Artificial Sequence; identical to SEQ ID NO: 35542
  derived and/or modified CDS sequence (wt) from hemagglutinin__InfluenzaA__AFJ78811

SEQ ID NO: 40948 - RNA, 1701 nt, Artificial Sequence; identical to SEQ ID NO: 35309
  derived and/or modified CDS sequence (wt) from hemagglutinin__InfluenzaA__AFJ78821

SEQ ID NO: 40949 - RNA, 1701 nt, Artificial Sequence; identical to SEQ ID NO: 35309
  derived and/or modified CDS sequence (wt) from hemagglutinin__InfluenzaA__AFJ78831

SEQ ID NO: 40950 - RNA, 1701 nt, Artificial Sequence; identical to SEQ ID NO: 35879
  derived and/or modified CDS sequence (wt) from hemagglutinin__InfluenzaA__AFJ78841

SEQ ID NO: 40951 - RNA, 1701 nt, Artificial Sequence
  derived and/or modified CDS sequence (wt) from hemagglutinin__InfluenzaA__AFJ78851
augaaggcaauacuaguaguucugcuauauacauuugcaaccgcaaaugcagacacauuauguauagguuaucaugcgaacaauucaacagacacuguagacacaguacuagaaaagaauguaacaguaacacacucuguuaaccuucuagaagacaagcauaacgggaaacuaugcaaacuaagagggguagccccauugcauuuggguaaauguaacauugcuggcuggauccugggaaauccagagugugaaucacucuccacagcaagcucaugguccuacauuguggaaacaucuaguucagacaauggaacguguuacccaggagauuucaucgauuaugaggagcuaagagagcaauugagcucagugucaucauuugaaagguuugagauauuccccaagacaaguucauggcccaaucaugacucgaacaaagguguaacggcagcauguccucaugcuggagcaaaaagcuucuacaaaaauuuaauauggcuaguuaaaaaaggaaauucauacccaaagcucagcaaauccuacauuaaugauaaagggaaagaaguccucgugcuauggggcauucaccauccaucuacuagugcugaccaacaaagucucuaucagaaugcagaugcauauguuuuuguggggacaucaagauacagcaagaaguucaagccggaaauagcaauaagacccaaagugagggaucaagaagggagaaugaacuauuacuggacacuaguagagccgggagacaaaauaacauucgaagcaacuggaaaucuagugguaccgagauaugcauucgcaauggaaagaaaugcuggaucugguauuaucauuucagauacaccaguccacgauugcaauacaacuugucagacacccaagggugcuauaaacaccagccucccauuucagaauauacauccgaucacaauuggaaaauguccaaaauauguaaaaagcacaaaauugagacuggccacaggauugaggaaugucccgucuauucaaucuagaggccuauuuggggccauugccgguuucauugaagggggguggacaggaaugguagauggaugguacgguuaucaccaucaaaaugagcaggggucaggauaugcagccgaccugaagagcacacagaaugccauugacgagauuacuaacaaaguaaauucuguuauugaaaagaugaauacacaguucacagcaguagguaaagaguucaaccaccuggaaaaaagaauagagaauuuaaauaaaaaaguugaugaugguuuccuggacauuuggacuuacaaugccgaacuguugguucuauuggaaaaugaaagaacuuuggacuaccacgauucaaaugugaagaacuuauaugaaaagguaagaagccaguuaaaaaacaaugccaaggagauuggaaacggcugcuuugaauuuuaccacaaaugcgauaacacgugcauggaaagugucaaaaaugggacuuaugacuacccaaaauacucagaggaagcaaaauuaaacagagaagaaauagaugggguaaagcuggaaucaacaaggauuuaccagauuuuggcgaucuauucaacugucgccaguucauugguacugguagucucccugggggcaaucaguuucuggaugugcucuaaugggucucuacaguguagaauauguauuuaa

SEQ ID NO: 40952 - RNA, 1701 nt, Artificial Sequence
  derived and/or modified CDS sequence (wt) from hemagglutinin__InfluenzaA__AFJ78861
augaaggcaauacuaguaguucugcuauauacauuugcaaccgcaaaugcagacacauuauguauagguuaucaugcgaacaauucaacagacacuguagacacaguacuagaaaagaauguaacaguaacacacucuguuaaccuucuagaagacaagcauaacgggaaacuaugcagacuaagagggguagccccauugcauuuggguaaauguaacauugcuggcuggauccugggaaauccagagugugaaucacucuccacagcaagcucaugguccuacauuguggaaacaucuaguucagacaauggaacguguuacccaggagauuucaucgauuaugaggagcuaagagagcaauugagcucagugucaucauuugaaagguuugagauauuccccaagacaaguucauggcccaaucaugacucgaacaaagguguaacggcagcauguccucaugcuggagcaaaaagcuucuacaaaaauuuaauauggcuaguuaaaaaaggaaauucauacccaaagcucagcaaauccuacauuaaugauaaagggaaagaaguccucgugcuauggggcauucaccauccaucuacuagugcugaccaacaaagucucuaucagaaugcagaugcauauguuuuuguggggacaucaagauacagcaagaaguucaagccggaaauagcaauaagacccaaagugagggaucaagaagggagaaugaacuauuacuggacacuaguagagccgggagacaagauaacauucgaagcaacuggaaaucuagugguaccgagauaugcauucgcaauggaaagaaaugcuggaucugguauuaucauuucagauacaccaguccacgauugcaauacaacuugucagacacccaagggugcuauaaacaccagccucccauuucagaauauacauccgaucacaauuggaaaauguccaaaauauguaaaaagcacaaaauugagacuggccacaggauugaggaaugucccuucuauucaaucuagaggccuauuuggggccauugccgguuucauugaagggggguggacagggaugguagauggaugguacgguuaucaccaucaaaaugagcaggggucaggauaugcagccgaccugaagagcacacagaaugccauugacgagauuacuaacaaaguaaauucuguuauugaaaagaugaauacacaguucacagcaguagguaaagaguucaaccaccuggaaaaaagaauagagaauuuaaauaaaaaaguugaugaugguuuccuggacauuuggacuuacaaugccgaacuguugguucuauuggaaaaugaaagaacuuuggacuaccacgauucaaaugugaagaacuuauaugaaaagguaagaagccaguuaaaaaacaaugccaaggaaauuggaaacggcugcuuugaauuuuaccacaaaugcgauaacacgugcauggaaagugucaaaaaugggacuuaugacuacccaaaauacucagaggaagcaaaauuaaacagagaagaaauagaugggguaaagcuggaaucaacaaggauuuaccagauuuuggcgaucuauucaacugucgccaguucauugguacugguagucucccugggggcaaucaguuucuggaugugcucuaaugggucucuacaguguagaauauguauuuaa

SEQ ID NO: 40953 - RNA, 1701 nt, Artificial Sequence
  derived and/or modified CDS sequence (wt) from hemagglutinin__InfluenzaA__AFJ78881
augaaggcaauacuaguaguucugcuauauacauuugcaaccgcaaaugcagacacauuauguauagguuaucaugcgaacaauucaacagacacuguagacacaguacuagaaaagaauguaacaguaacacacucuguuaaccuucuagaagacaagcauaacgggaaacuaugcaaacuaagagggguagccccauugcauuuggguaaauguaacauugcuggcuggauccugggaaauccagagugugaaucacucuccacaucaaguucaugguccuacauuguggaaacaucuaguucagacaauggaacguguuacccaggagauuucaucgauuaugaggagcuaagagagcaauugagcucagugucaucauuugaaagguuugagauauuccccaagacaaguucauggcccaaucaugacucgaacaaagguguaacggcagcauguccucaugcuggagcaaaaagcuucuacaaaaauuuaauauggcuaguuaaaaaaggaaauucauacccaaagcucagcaaauccuacauuaaugauaaagggaaagaaguccucgugcuauggggcauucaccauccaucuacuagugcugaccaacaaagucucuaucagaaugcagaugcauauguuuuuguggggacaucaagauacagcaagaaguucaagccggaaauagcaauaagacccaaagugagggaucaagaagggagaaugaacuauuacuggacacuaguagagccgggagacaaaauaacauucgaagcaacuggaaaucuagugguaccgagauaugcauucgcaauggaaagaaaugcuggaucugguauuaucauuucagauacaccaguccacgauugcaauacaacuugucagacacccaagggugcuauaaacaccagccucccauuucagaauauacauccgaucacaauuggaaaauguccaaaauauguaaaaagcacaaaauugagacuggccacaggauugaggaaugucccgucuauucaaucuagaggccuauuuggggccauugccgguuucauugaagggggguggacagggaugguagauggaugguacgguuaucaccaucaaaaugagcaggggucaggauaugcagccgaccugaagagcacacagaaugccauugacgagauuacuaacaaaguaaauucuguuauugaaaagaugaauacacaguucacagcaguagguaaagaguucaaccaccuggaaaaaagaauagagaauuuaaauaaaaaaguugaugaugguuuccuggacauuuggacuuacaaugccgaacuguugguucuauuggaaaaugaaagaacuuuggacuaccacgauucaaaugugaagaacuuauaugaaaagguaagaagccaguuaaaaaacaaugccaaggaaauuggaaacggcugcuuugaauuuuaccacaaaugcgauaacacgugcauggaaagugucaaaaaugggacuuaugacuacccaaaauacucagaggaagcaaaauuaaacagagaagaaauaaaugggguaaagcuggaaucaacaaggauuuaccagauuuuggcgaucuauucaacugccgccaguucauugguacugguagucucccugggggcaaucaguuucuggaugugcucuaaugggucucuacaguguagaauauguauuuaa

SEQ ID NO: 40954 - RNA, 1701 nt, Artificial Sequence; identical to SEQ ID NO: 34681
  derived and/or modified CDS sequence (wt) from hemagglutinin__InfluenzaA__AFJ78891

SEQ ID NO: 40955 - RNA, 1701 nt, Artificial Sequence; identical to SEQ ID NO: 36139
  derived and/or modified CDS sequence (wt) from hemagglutinin__InfluenzaA__AFJ78901

SEQ ID NO: 40956 - RNA, 1701 nt, Artificial Sequence; identical to SEQ ID NO: 34681
  derived and/or modified CDS sequence (wt) from hemagglutinin__InfluenzaA__AFJ78911

SEQ ID NO: 40957 - RNA, 1701 nt, Artificial Sequence
  derived and/or modified CDS sequence (wt) from hemagglutinin__InfluenzaA__AFJ78921
augaaggcaauacuaguaguucugcuauauacauuugcaaccgcaaaugcagacacauuauguauagguuaucaugcgaacaauucaacagacacuguagacacaguacuagaaaagaauguaacaguaacacacucuguuaaccuucuagaagacaagcauaacgggaaacuaugcaaacuaagagggguagccccauugcauuuggguaaauguaacauugcuggcuggauccugggaaauccagagugugaaucacucuccacagcaagcucaugguccuacauuguggaaacaucuaguucagacaauggaacguguuacccaggagauuucaucgauuaugaggagcuaagagagcaauugagcucagugucaucauuugaaagguuugagauauuccccaagacaaguucauggcccaaucaugacucgaacaaagguguaacggcagcauguccucaugcuggagcaaaaagcuucuacaaaaauuuaauauggcuaguuaaaaaaggaaauucauacccaaagcucagcaaauccuacauuaaugauaaagggaaagaaguccucgugcuauggggcauucaccauccaucuacuagugcugaccaacaaagucucuaucagaaugcagaugcauacguuuuuguggggacaucaagauacagcaagaaguucaagccggaaauagcaauaagacccaaagugagggaucaagaagggagaaugaacuauuacuggacacuaguagagccgggagacaaaauaacauucgaagcaacuggaaaucuagugguaccgagauaugcauucgcaauggaaagaaaugcuggaucugguauuaucauuucagauacaccaguccacgauugcaauacaacuugucagacacccaagggugcuauaaacaccagccucccauuucagaauauacauccgaucacaauuggaaaaugucccaaauauguaaaaagcacaaaauugagacuggccacaggauugaggaaugucccuucuauucaaucuagaggccuauuuggggccauugccgguuucauugaagggggguggacagggaugguagauggaugguacgguuaucaccaucaaaaugagcaggggucaggauaugcagccgaccugaagagcacacagaaugccauugacgagauuacuaacaaaguaaauucuguuauugaaaagaugaauacacaguucacagcaguagguaaagaguucaaccaccuggaaaaaagaauagagaauuuaaauaaaaaaguugaugaugguuuccuggacauuuggacuuacaaugccgaacuguugguucuauuggaaaaugaaagaacuuuggacuaccacgauucaaaugugaagaacuuauaugaaaagguaagaagccaguuaaaaaacaaugccaaggaaauuggaaacggcugcuuugaauuuuaccacaaaugcgauaacacgugcauggaaagugucaaaaaugggacuuaugacuacccaaaauacucagaggaagcaaaauuaaacagagaagaaauagauggaguaaagcuggaaucaacaaggauuuaccagauuuuggcgaucuacucaacugucgccaguucauugguacugguagucucccugggggcaaucaguuucuggaugugcucuaaugggucucuacaguguagaauauguauuuaa

SEQ ID NO: 40958 - RNA, 1701 nt, Artificial Sequence
  derived and/or modified CDS sequence (wt) from hemagglutinin__InfluenzaA__AFJ97567
augaaggcaauacuaguaguucugcuauauacauuugcaaccgcaaaugcagacacauuauguauagguuaucaugcgaacaauucaacagacacuguagacacaguacuagaaaagaauguaacaguaacacacucuguugaccuucuagaagacaagcauaacgggaaacuaugcaaacuaagagggguagccccauugcauuuggguaaauguaacauugcuggcuggauccugggaaauccagagugugaaucacucuccacagcaagcucaugguccuacauuguggaaacaucuaguucagacaauggaacguguuacccaggagauuucaucgauuaugaggagcuaagagagcaauugagcucagugucaucauuugaaagguuugagauauuccccaagacaaguucauggcccaaucaugacucgaacaaagguguaacggcagcauguccucaugcuggagcaaaaagcuucuacaaaaauuuaauauggcuaguuaaaaaaggaaauucauacccaaagcucaacaaauccuacauuaaugauaaagggaaagaaguccucgugcuauggggcauucaccauccaucuacuaguacugaccaacaaagucucuaucagaaugcagaugcauauguuuuuguggggacaucaagauacagcaagaaguuuaagccggaaauagcaauaagacccaaagugagggaucaagaagggagaaugaacuauuacuggacacuaguagagccgggagacaaaauaacauucgaagcaacuggaaaucuagugguaccgagauaugcauucacaauggaaagaaaugcuggaucugguauuaucauuucagauacaccaguccacgauugcaauacaacuugucagacacccaagggugcuauaaacaccagcuucccauuucagaauauacauccgaucacaauuggaaaguguccaaaauauguaaaaagcacaaaauugagacuggccacaggauugaggaaugucccgucuauucaaucuagaggccuauuuggggccauugccgguuucauugaagggggguggacaggaaugguagauggaugguacgguuaucaccaucaaaaugagcaggggucaggauaugcagccgaccugaagagcacacagaaugccauugacgagauuacuaacaaaguaaauucuguuauugaaaagaugaauacacaguucacagcaguagguaaagaguucaaccaccuggaaaaaagaauagagaauuuaaauaaaaaaguugaugaugguuuccuggacauuuggacuuacaaugccgaacuguugguucuauuggaaaaugaaagaacuuuggacuaccacgauucaaaugugaagaacuuauaugaaaagguaagaagccaguuaaaaaacaaugccaaggaaauuggaaacggcugcuuugaauuuuaccacaaaugcgauaacacgugcauggaaagugucaaaaaugggacuuaugacuacccaaaauacucagaggaagcaaaauuaaacagagaagaaauagaugggguaaagcuggaaucaacaaggauuuaccagauuuuggcgaucuauucaacugucgccaguucauugguacugguagucucccugggggcaaucaguuucuggaugugcucuaaugggucucuacaguguagaauauguauuuaa

SEQ ID NO: 40959 - RNA, 1701 nt, Artificial Sequence
  derived and/or modified CDS sequence (wt) from hemagglutinin__InfluenzaA__AFK14115
augaaggcaauacuaguaguucugcuauauacauuugcaaccgcaaaugcagacacauuauguauagguuaucaugcgaacaauucaacagacacuguagacacaguacuagaaaagaauguaacaguaacacacucuguuaaccuucuagaagacaagcauaacgggaaacuaugcaaacuaagagggguagccccauugcauuuggguaaauguaacauugcuggcuggauccugggaaauccagagugugaaucacucuccacagcaagcucaugguccuacauuguggaaacaucuaguucagacaauggaacguguuacccaggagauuucaucgauuaugaggagcuaagagagcaauugagcucagugucaucauuugaaagguuugagauauuccccaagacaaguucauggcccaaucaugacucgaacaaagguguaacggcagcauguccucaugcuggagcaaaaagcuucuacaaaaauuuaauauggcuaguuaaaaaaggaaauucauacccaaagcucagcaaauccuauauuaaugauaaagggaaagaaguccucgugcuauggggcauucaccauccaucuacuagugcugaccaacaaagucucuaucagaaugcagaugcauauguuuuuguggggacaucaagauacagcaagaaguucaagccggaaauagcaauaagaccuaaagugagggaucaagaagggagaaugaacuauuacuggacacuaguagagccgggagacaaaauaacauucgaagcaacuggaaaucuagugguaccgagauaugcauucgcaauggaaagaaaugcuggaucugguauuaucauuucagauacaccaguccacgauugcaauacaacuugucagacacccaagggugcuauaaacaccagccucccauuucagaauauacauccgaucacaauuggaaaauguccaaaauauguaaaaagcacaaaauugagacuggccacaggauugaggaaugucccgucuauucaaucuagaggccuauuuggggccauugccgguuucauugaagggggguggacagggaugguagauggaugguacgguuaucaccaucaaaaugagcaggggucaggauaugcagccgaccugaagagcacacagaaugccauugacgagauuacuaacaaaguaaauucuguuauugaaaagaugaauacacaguucacagcaguagguaaagaguucaaccaccuggaaaaaagaauagagaauuuaaauaaaaaaguugaugaugguuuccuggacauuuggacuuacaaugccgaacuguugguucuauuggaaaaugaaagaacuuuggacuaccacgauucaaaugugaagaacuuauaugaaaagguaagaagccaguuaaaaaacaaugccaaggaaauuggaaacggcugcuuugaauuuuaccacaaaugcgauaacacgugcauggaaagugucaaaaaugggacuuaugacuacccaaaauacucagaggaagcaaaauuaaacagagaagaaauagaugggguaaagcuggaaucaacaaggauuuaccagauuuuggcgaucuauucaacugucgccaguucauugguacugguagucucccugggggcaaucaguuucuggaugugcucuaaugggucucuacaguguagaauauguauuuaa

SEQ ID NO: 40960 - RNA, 1701 nt, Artificial Sequence; identical to SEQ ID NO: 34980
  derived and/or modified CDS sequence (wt) from hemagglutinin__InfluenzaA__AFK14131

SEQ ID NO: 40961 - RNA, 1701 nt, Artificial Sequence
  derived and/or modified CDS sequence (wt) from hemagglutinin__InfluenzaA__AFK14139
augaaggcaauacuaguaguucugcuauauacauuugcaaccgcaaaugcagacacauuauguauagguuaucaugcgaacaauucaacagacacuguagacacaguacuagaaaagaauguaacaguaacacacucuguuaaccuuuuagaagacaagcauaacgggaaacuaugcaaacuaagagggguagccccauugcauuuggguaaauguaacauugcuggcuggauccugggaaauccagagugugaaucacucuccacagcaagcucaugguccuacauuguggaaacaucuaguucagacaauggaacguguuacccaggagauuucaucgauuaugaggagcuaagagagcaauugagcucagugucaucauuugaaagguuugagauauuucccaagacaaguucauggcccaaucaugacucgaacaaagguguaacggcagcauguccucaugcuggagcaaaaagcuucuacaaaaauuuaauauggcuaguuaaaaaaggaaauucauacccaaagcucagcaaauccuacauuaaugauaaagggaaagaaguccucgugcuauggggcauucaccauccaucuacuagugcugaccaacaaagucucuaucagaaugcagaugcauauguuuuuguggggacaucaagauacagcaagaaguucaagccggaaauagcaauaagacccaaagugagggaucaagaagggagaaugaacuauuacuggacacuaguagagccgggagacaaaauaacauucgaagcaacuggaaaucuagugguaccgagauaugcauucgcaauggaaagaaaugcuggaucugguauuaucauuucagauacaccaguccacgauugcaauacaacuugucagacacccaagggugcuauaaacaccagccucccauuucagaauauacauccgaucacaauuggaaaauguccaaaauauguaaaaagcacaaaauugagaauggccacaggauugaggaaugucccgucuauucaaucuagaggccuauuuggggccauugccgguuucauugaagggggguggacagggaugguagauggaugguacgguuaucaccaucaaaaugagcaggggucaggauaugcagccgaccugaagagcacacagaaugccauugacgagauuacuaacaaaguaaauucuguuauugaaaagaugaauacacaguucacagcaguagguaaagaguucaaccaccuggaaaaaagaauagagaauuuaaauaaaaaaguugaugaugguuuccuggacauuuggacuuacaaugccgaacuguugguucuauuggaaaaugaaagaacuuuggacuaccacgauucaaaugugaagaacuuauaugaaaagguaagaagccaguuaaaaaacaaugccaaggaaauuggaaacggcugcuuugaauuuuaccacaaaugcgauaacacgugcauggaaagugucaaaaaugggacuuaugacuacccaaaauacucagaggaagcaaaauuaaacagagaagaaauagaugggguaaagcuggaaucaacaaggauuuaccagauuuuggcgaucuauucaacugucgccaguucauugguacugguagucucccugggggcaaucaguuucuggaugugcucuaaugggucucuacaguguagaauauguauuuaa

SEQ ID NO: 40962 - RNA, 1701 nt, Artificial Sequence
  derived and/or modified CDS sequence (wt) from hemagglutinin__InfluenzaA__AFK14148
augaaggcaauacuaguaguucugcuauauacauuugcaaccgcaaaugcagacacauuauguauagguuaucaugcgaacaauucaacagacacuguagacacaguacuagaaaagaauguaacaguaacacacucuguuaaccuucuagaagacaagcauaacgggaaacuaugcaaacuaagagggguagccccauugcauuuggguaaauguaacauugcuggcuggauccugggaaauccagagugugaaucacucuccacagcaagcucaugguccuacauuguggaaacaucuaguucagacaauggaacguguuacccaggagauuucaucgauuaugaggagcuaagagagcaauugagcucagugucaucauuugaaagguuugagauauuccccaagacaaguucauggcccaaucaugacucgaacaaagguguaacggcagcauguccucaugcuggagcaaaaagcuucuacaaaaauuuaauauggcuaguuaaaaaaggaaauucauacccaaagcucagcaaauccuacauuaaugauaaagggaaagaaguccucgugcuauggggcauucaccauccaucuacuagugcugaccaacaaagucucuaucagaaugcagaugcauauguuuuuguggggacaucaagauacagcaagaaguucaagccggaaauagcaauaagacccaaagugagggaucaagaagggagaaugaacuauuacuggacacuaguagagccgggagacaaaauaacauucgaagcaacuggaaaucuagugguaccgagauaugcauucgcaauggaaagaaaugcuggaucugguauuaucauuucagauacaccaguccacgauugcaauacaacuugucagacacccaagggugcuauaaacaccagccucccauuucagaauauacauccgaucacaauuggaaaauguccaaaauauguaaaaagcacaaaauugagacuggccacaggauugaggaaugucccgucuauucaaucuagaggccuauuuggggccauugccgguuucauugaagggggguggacagggaugguagauggaugguacgguuaucaccaucaaaaugagcaggggucaggauaugcagccgaccugaagagcacacagaaugccauugacaagauuacuaacaaaguaaauucuguuauugaaaagaugaauacacaguucacagcaguagguaaagaguucaaccaccuggaaaaaagaauagagaauuuaaauaaaaagguugaugaugguuuccuggacauuuggacuuacaaugccgaacuguugguucuauuggaaaaugaaagaacuuuggacuaccacgauucaaaugugaagaacuuauaugaaaagguaagaaaccaguuaaaaaacaaugccaaggaaauuggaaacggcugcuuugaauuuuaccacaaaugcgauaacacgugcauggaaagugucaaaaaugggacuuaugacuacccaaaauacucagaggaagcaaaauuaaacagagaagaaauagaugggguaaagcuggaaucaacaaggauuuaccagauuuuggcgaucuauucaacugucgccaguucauugguacugguagucucccugggggcaaucaguuucuggaugugcucuaaugggucucuacaguguagaauauguauuuaa

SEQ ID NO: 40963 - RNA, 1701 nt, Artificial Sequence; identical to SEQ ID NO: 39609
  derived and/or modified CDS sequence (wt) from hemagglutinin__InfluenzaA__AFK14157

SEQ ID NO: 40964 - RNA, 1701 nt, Artificial Sequence
  derived and/or modified CDS sequence (wt) from hemagglutinin__InfluenzaA__AFK14166
augaaggcaauacuaguaguucugcuauauacauuugcaaccgcaaaugcagacacauuauguauagguuaucaugcgaacaauucaacagacacuguagacacaguacuagaaaagaauguaacaguaacacacucuguuaaccuccuagaagacaagcauaacgggaaacuaugcaaacuaagagggguagccccauugcauuuggguaaauguaacauugcuggcuggauccugggaaauccagagugugaaucacucuccacagcaagcucaugguccuacauuguggaaacaucuaguucagacaauggaacguguuacccaggagauuucaucgauuaugaggagcuaagagagcaauugagcucagugucaucauuugaaagguuugagauauuccccaagacaaguucauggcccaaucaugacucgaacaaagguguaacggcagcauguccucaugcuggagcaaaaagcuucuacaaaaauuuaauauggcuaguuaaaaaaggaaauucauacccaaagcucagcaaauccuacauuaaugauaaagggaaagaaguccucgugcuauggggcauucaccauccaucuacuagugcugaccaacaaagucucuaucagaaugcagaugcauauguuuuuguggggacaucaagauacagcaagaaguucaagccggaaauagcaauaagacccaaagugagggaucaagaagggagaaugaacuauuacuggacacuaguagagccgggagacaaaauaacauucgaagcaacuggaaaucuagugguaccgagauaugcauucgcaauggaaagaaaugcuggaucugguauuaucauuucagauacaccaguccacgauugcaauacaacuugucagacacccaagggugcuauaaacaccagccucccauuucagaauauacauccgaucacaauuggaaaauguccaaaauauguaaaaagcacaaaauugagacuggccacaggauugaggaaugucccgucuauucaaucuagaggccuauuuggggccauugccgguuucauugaagggggguggacagggaugguagauggaugguacgguuaucaccaucaaaaugagcaggggucaggauaugcagccgaccugaagagcacacagaaugccauugacgagauuacuaacaaaguaaauucuguuauugaaaagaugaauacacaguucacagcaguagguaaagaguucaaccaccuggaaaaaagaauagagaauuuaaauaaaaaaguugaugaugguuuccuggacauuuggacuuacaaugccgaacuguugguucuauuggaaaaugaaagaacuuuggacuaccacgauucaaaugugaagaacuuauaugaaaagguaagaagccaguuaaaaaacaaugccaaggaaauuggaaacggcugcuuugaauuuuaccacaaaugcgauaacacgugcauggaaagugucaaaaaugggacuuaugacuacccaaaauacucagaggaagcaaaauuaaacagagaagaaauagaugggguaaagcuggaaucaacaaggauuuaccagauuuuggcgaucuauucaacugucgccaguucauugguacugguagucucccugggggcaaucaguuucuggaugugcucuaaugggucucuacaguguagaauauguauuuaa

SEQ ID NO: 40965 - RNA, 1701 nt, Artificial Sequence; identical to SEQ ID NO: 36009
  derived and/or modified CDS sequence (wt) from hemagglutinin__InfluenzaA__AFK14175

SEQ ID NO: 40966 - RNA, 1701 nt, Artificial Sequence; identical to SEQ ID NO: 39608
  derived and/or modified CDS sequence (wt) from hemagglutinin__InfluenzaA__AFK14184

SEQ ID NO: 40967 - RNA, 1701 nt, Artificial Sequence
  derived and/or modified CDS sequence (wt) from hemagglutinin__InfluenzaA__AFK14193
augaaggcaauacuaguaguucugcuauauacauuugcaaccgcaaaugcagacacauuauguauagguuaucaugcgaacaauucaacagacacuguagacacaguacuagaaaagaauguaacaguaacacacucuguuaaccuucuagaagacaagcauaacgggaaacuaugcaaacuaagagggguagccccauugcauuuggguaaauguaacauugcuggcuggauccugggaaauccagagugugaaucacucuccacagcaagcucaugguccuacauuguggaaacaucuaguucagacaauggaacguguuacccaggagauuucaucgauuaugaggagcuaagagagcaauugagcucagugucaucauuugaaagguuugagauauuccccaagacaaguucauggcccaaucaugacucgaacaaagguguaacggcagcauguccucaugcgggagcaaaaagcuucuacaaaaauuuaauauggcuaguuaaaaaaggaaauucauacccaaagcucagcaaauccuacauuaaugauaaagggaaagaaguccucgugcuauggggcauucaccauccaucuacuagugcugaccaacaaagucucuaucagaaugcagaugcauauguuuuuguggggacaucaagauacagcaagaaguucaagccggaaauagcaauaagacccaaagugagggaacaagaagggagaaugaacuauuacuggacacuaguagagccgggagacaaaauaacauucgaagcaacuggaaaucuagugguaccgagauaugcauucgcaauggaaagaaaugcuggaucugguauuaucauuucagauacaccaguccacgauugcaauacaacuugucagacacccaagggugcuauaaacaccagccucccauuucagaauauacauccgaucacaauuggaaaauguccaaaauauguaaaaagcacaaaauugagacuggccacaggauugaggaaugucccgucuauucaaucuagaggccuauuuggggccauugccgguuucauugaagggggguggacagggaugguagauggaugguacgguuaucaccaucaaaaugagcagggaucaggauaugcagccgaccugaagagcacacagaaugccauugacgagauuacuaacaaaguaaauucuguuauugaaaagaugaauacacaguucacagcaguagguaaagaguucaaccaccuggaaaaaagaauagagaauuuaaauaaaaaaguugaugaugguuuccuggacauuuggacuuacaaugccgaacuguugguucuauuggaaaaugaaagaacuuuggacuaccacgauucaaaugugaagaacuuauaugaaaagguaagaagccaguuaaaaaacaaugccaaggaaauuggaaacggcugcuuugaauuuuaccacaaaugcgauaacacgugcauggaaagugucaaaaaugggacuuaugacuacccaaaauacucagaggaagcaaaauuaaacagagaagaaauagaugggguaaagcuggaaucaacaaggauuuaccagauuuuggcgaucuauucaacugucgccaguucauugguacugguagucucccugggggcaaucaguuucuggaugugcucuaaugggucucuacaguguagaauauguauuuaa

SEQ ID NO: 40968 - RNA, 1701 nt, Artificial Sequence; identical to SEQ ID NO: 39408
  derived and/or modified CDS sequence (wt) from hemagglutinin__InfluenzaA__AFK14202

SEQ ID NO: 40969 - RNA, 1701 nt, Artificial Sequence
  derived and/or modified CDS sequence (wt) from hemagglutinin__InfluenzaA__AFK14211
augaaggcaauacuaguaguucugcuauauacauuugcaaccgcaaaugcagacacauuauguauagguuaucaugcgaacaauucaacagacacuguagacacaguacuagaaaagaauguaacaguaacacacucuguuaaccuucuagaagacaagcauaacgggaaacuaugcaaacuaagagggguagccccauugcauuuggguaaauguaacauugcuggcuggauccugggaaauccagagugugaaucacucuccacagcaagcucaugguccuacauuguggaaacaucuaguucagacaauggaacguguuacccaggagauuucaucgauuaugaggagcuaagggagcaauugagcucagugucaucauuugaaagguuugagauauuccccaagacaaguucauggcccaaucaugacucgaacaaagguguaacggcagcauguccucaugcgggagcaaaaagcuucuacaaaaauuuaauauggcuaguuaaaaaaggaaauucauacccaaagcucagcaaauccuacauuaaugauaaagggaaagaaguccucgugcuauggggcauucaccauccaucuacuagugcugaccaacaaagucucuaucagaaugcagaugcauauguuuuuguggggacaucaagauacagcaagaaguucaagccggaaauagcaauaagacccaaagugagggaacaagaagggagaaugaacuauuacuggacacuaguagagccgggagacaaaauaacauucgaagcaacuggaaaucuagugguaccgagauaugcauucgcaauggaaagaaaugcuggaucugguauuaucauuucagauacaccaguccacgauugcaauacaacuugucagacacccaagggugcuauaaacaccagccucccauuucagaauauacauccgaucacaauuggaaaauguccaaaauauguaaaaagcacaaaauugagacuggccacaggauugaggaaugucccgucuauucaaucuagaggccuauuuggggccauugccgguuucauugaagggggguggacagggaugguagauggaugguacgguuaucaccaucaaaaugagcagggaucaggauaugcagccgaccugaagagcacacagaaugccauugacgagauuacuaacaaaguaaauucuguuauugaaaagaugaauacacaguucacagcaguagguaaagaguucaaccaccuggaaaaaagaauagagaauuuaaauaaaaaaguugaugaugguuuccuggacauuuggacuuacaaugccgaacugcugguucuauuggaaaaugaaagaacuuuggacuaccacgauucaaaugugaagaacuuauaugaaaagguaagaagccaguuaaaaaacaaugccaaggaaauuggaaacggcugcuuugaauuuuaccacaaaugcgauaacacgugcauggaaagugucaaaaaugggacuuaugacuacccaaaauacucagaggaagcaaaauuaaacagagaagaaauagaugggguaaagcuggaaucaacaaggauuuaccagauuuuggcgaucuauucaacugucgccaguucauugguacugguagucucccugggggcaaucaguuucuggaugugcucuaaugggucucuacaguguagaauauguauuuaa

SEQ ID NO: 40970 - RNA, 1701 nt, Artificial Sequence
  derived and/or modified CDS sequence (wt) from hemagglutinin__InfluenzaA__AFK14220
augaaggcaauacuaguaguucugcuauauacauuugcaaccgcaaaugcagacacauuauguauagguuaucaugcgaacaauucaacagacacuguagacacaguacuagaaaagaauguaacaguaacacacucuguuaaccuucuagaagacaagcauaacgggaaacuaugcaaacuaagagggguagccccauugcauuuggguaaauguaacauugcuggcuggauccugggaaauccagagugugaaucacucuccacagcaagcucaugguccuacauuguggaaacaucuaguucagacaauggaacguguuacccaggagauuucaucgauuaugaggagcuaagagagcaauugagcucagcgucaucauuugaaagguaugagauauuccccaagacaaguucauggcccaaucaugacucgaacaaagguguaacggcagcauguccucaugcuggagcaaaaagcuucuacaaaaauuuaauauggcuaguuaaaaaaggaaauucauacccaaagcucagcaaauccuacauuaaugauaaagggaaagaaguccucgugcuauggggcauucaccauccaucuacuagugcugaccaacaaagucucuaucagaaugcagaugcauauguuuuuguggggacaucaagauacagcaagaaguucaagccggaaauagcaauaagacccaaagugagggaucaagaagggagaaugaacuauuacuggacacuaguagagccgggagacaaaauaacauucgaagcaacuggaaaucuagugguaccgagauaugcauucgcaauggaaagaaaugcuggaucugguauuaucauuucagauacaccaguccacgauugcaauacaacuugucagacacccaagggugcuauaaacaccagccucccauuucagaauauacauccgaucacaauuggaaaauguccaaaauauguaaaaagcacaaaauugagacuggccacaggauugaggaaugucccgucuauucaaucuagaggccuauuuggggccauugccgguuucauugaagggggguggacagggaugguagauggaugguacgguuaucaccaucaaaaugagcaggggucaggauaugcagccgaccugaagagcacacagaaugccauugacaagauuacuaacaaaguaaauucuguuauugaaaagaugaauacacaguucacagcaguagguaaagaguucaaccaccuggaaaaaagaauagagaauuuaaauaaaaagguugaugaugguuuccuggacauuuggacuuacaaugccgaacuguugguucuauuggaaaaugaaagaacuuuggacuaccacgauucaaaugugaagaacuuauaugaaaagguaagaaaccaguuaaaaaacaaugccaaggaaauuggaaacggcugcuuugaauuuuaccacaaaugcgauaacacgugcauggaaagugucaaaaaugggacuuaugacuacccaaaauacucagaggaagcaaaauuaaacagagaagaaauagaugggguaaagcuggaaucaacaaggauuuaccagauuuuggcgaucuauucaacugucgccaguucauugguacugguagucucccugggggcaaucaguuucuggaugugcucuaaugggucucuacaguguagaauauguauuuaa

SEQ ID NO: 40971 - RNA, 1701 nt, Artificial Sequence; identical to SEQ ID NO: 39609
  derived and/or modified CDS sequence (wt) from hemagglutinin__InfluenzaA__AFK14229

SEQ ID NO: 40972 - RNA, 1701 nt, Artificial Sequence
  derived and/or modified CDS sequence (wt) from hemagglutinin__InfluenzaA__AFK14238
augaaggcaauacuaguaguucugcuauauacauuugcaaccgcaaaugcagacacauuauguauagguuaucaugcgaacaauucaacagacacuguagacacaguacuagaaaagaauguaacaguaacacacucuguuaaccuucuagaagacaagcauaacgggaaacuaugcaaacuaagagggguagccccauugcauuuggguaaauguaacauugcuggcuggauccugggaaauccagagugugaaucacucuccacagcaagcucaugguccuacauuguggaaacaucuaauucagacaauggaacguguuacccaggagauuucaucgauuaugaggagcuaagagagcaauugagcucagugucaucauuugaaagguuugagauauuccccaagacaaguucauggcccaaucaugacucgaacaaagguguaacggcagcauguccucaugcuggagcaaaaagcuucuacaaaaauuuaauauggcuaguuaaaaaaggaaauucauacccaaagcucagcaaauccuacauuaaugauaaagggaaagaaguccucgugcuauggggcauucaccauccaucuacuagugcugaccaacaaagucucuaucagaaugcagaugcauauguuuuuguggggacaucaagauacagcaagaaguucaagccggaaauagcaauaagacccaaagugagggaucaagaagggagaaugaacuauuacuggacacuaguagagccgggagacaaaauaacauucgaagcaacuggaaaucuagugguaccgagauaugcauucgcaauggaaagaaaugcuggaucugguauuaucauuucagauacaccaguccacgauugcaauacaacuugucagacacccaagggugcuauaaacaccagccucccauuucagaauauacacccgaucacaauuggaaaauguccaaaauauguaaaaagcacaaaauugagacuggccacaggauugaggaaugucccgucuauucaaucuagaggccuauuuggggccauugccgguuucauugaagggggguggacagggaugguagauggaugguacgguuaucaccaucaaaaugagcaggggucaggauaugcagccgaccugaagagcacacagaaugccauugacaagauuacuaacaaaguaaauucuguuauugaaaagaugaauacacaguucacagcaguagguaaagaguucaaccaccuggaaaaaagaauagagaauuuaaauaaaaaaguugaugaugguuuccuggacauuuggacuuacaaugccgaacuguugguucuauuggaaaaugaaagaacuuuggacuaccacgauucaaaugugaagaacuuauaugaaaagguaagaagccaguuaaaaaacaaugccaaggaaauuggaaacggcugcuuugaauuuuaccacaagugcgauaacacgugcauggaaagugucaaaaaugggacuuaugacuacccaaaauacucagaggaagcaaaauuaaacagagaagaaauagaugggguaaagcuggaaucaacaaggauuuaccagauuuuggcgaucuauucaacugucgccaguucauugguacugguagucucccugggggcaaucaguuucuggaugugcucuaaugggucucuacaguguagaauauguauuuaa

SEQ ID NO: 40973 - RNA, 1701 nt, Artificial Sequence
  derived and/or modified CDS sequence (wt) from hemagglutinin__InfluenzaA__AFK14247
augaaggcaauacuaguaguucugcuauauacauuugcaaccgcaaaugcagacacauuauguauagguuaucaugcgaacaauucaacagacacuguagacacaguacuagaaaagaauguaacaguaacacacucuguuaaccuuuuagaagacaagcauaacgggaaacuaugcaaacuaagagggguagccccauugcauuuggguaaauguaacauugcuggcuggauccugggaaauccagagugugaaucacucuccacagcaagcucaugguccuacauuguggaaacaucuaguucagacaauggaacguguuacccaggagauuucaucgauuaugaggagcuaagagagcaauugagcucagugucaucauuugaaagguuugagauauuucccaagacaaguucauggcccaaucaugacucgaacaaagguguaacggcagcauguccucaugcuggagcaaaaagcuucuacaaaaauuuaauauggcuaguuaaaaaaggaaauucauacccaaagcucagcaaauccuacauuaaugauaaagggaaagaaguccucgugcuauggggcauucaccauccaucuacuagugcugaccaacaaagucucuaucagaaugcagaugcauauguuuuuguggggacaucaagauacagcaagaaguucaagccggaaauagcaauaagacccaaagugagggaucaagaagggagaaugaacuauuacuggacacuaguagagccgggagacaaaauaacauucgaagcaacuggaaaucuagugguaccgagauaugcauucgcaauggaaagaaaugcuggaucugguauuaucauuucagauacaccaguccacgauugcaauacaacuugucagacacccaagggugcuaugaacaccagccucccauuucagaauauacauccgaucacaauuggaaaauguccaaaauauguaaaaagcacaaaauugagaauggccacaggauugaggaaugucccgucuauucaaucuagaggccuauuuggggccauugccgguuucauugaagggggguggacagggaugguagauggaugguacgguuaucaccaucaaaaugagcaggggucaggauaugcagccgaccugaagagcacacagaaugccauugacgagauuacuaacaaaguaaauucuguuauugaaaagaugaauacacaguucacagcaguagguaaagaguucaaccaccuggaaaaaagaauagagaauuuaaauaaaaaaguugaugaugguuuccuggacauuuggacuuacaaugccgaacuguugguucuauuggaaaaugaaagaacuuuggacuaccacgauucaaaugugaagaacuuauaugaaaagguaagaagccaguuaaaaaacaaugccaaggaaauuggaaacggcugcuuugaauuuuaccacaaaugcgauaacacgugcauggaaagugucaaaaaugggacuuaugacuacccaaaauacucagaggaagcaaaauuaaacagagaagaaauagaugggguaaagcuggaaucaacaaggauuuaccagauuuuggcgaucuauucaacugucgccaguucauugguacugguagucucccugggggcaaucaguuucuggaugugcucuaaugggucucuacaguguagaauauguauuuaa

SEQ ID NO: 40974 - RNA, 1701 nt, Artificial Sequence
  derived and/or modified CDS sequence (wt) from hemagglutinin__InfluenzaA__AFK14272
augaaggcaauacuaauaguucugcuauauacauuugcaacugcaaaugcagacacauuauguauagguuaucaugcgaacaauucaacagacacuguagacacaguacuagaaaagaauguaacaguaacacacucuguuaaccuucuagaagacaagcauaacgggaaacuaugcaaacuaacagggguagccccauugcauuuggguaaaugugacauugcuggcuggauccugggaaauccagagugugaaucacucuccacagcaagcucaugguccuacauuguggaaacaucuaguucagacaauggaacguguuacccaggagauuucaucgauuaugaggagcuaagagagcaauugagcucagugucaucauuugaaagguuugagauauuccccaagacaaguucauggcccaaucaugacucgaacaaagguguaacggcagcauguccucaugcuggagcaaaaagcuucuacaaaaauuuaauauggcuaguuaaaaaaggaaauucauacccaaagcucagcaaauccuacauuaaugauaaagggaaagaaguccucgugcuauggggaauucaccauccaucuacuagugcugaccaacaaagucucuaucagaaugcagaugcauauguuuuuguggggacaucaagauacagcaagaaguucaagccggaaauagcaauaagacccaaagugagggaucaagaagggagaaugaacuauuacuggacacuaguagagccgggagacaaaauaacauucgaagcaacuggaaaucuagugguaccgagauaugcauucgcaauggaaagaaaugcuggaucugguauuaucauuucagauacaccaguccacgauugcaauacaacuugucagacacccaagggugcuauaaacaccagccucccauuucagaauauacauccgaucacaauuggaaaauguccaaaauauguaaaaagcacaaaauugagacuggccacaggauugaggaaugucccgucuauucaaucuagaggccuauuuggggccauugccgguuucauugaagggggguggacagggaugguagauggaugguacgguuaucaccaucaaaaugagcaggggucaggauaugcagccgaccugaagagcacacagcaugccauugacgagauuacuaacaaaguaaauucuguuauugaaaagaugaauacacaguucacagcaguagguaaagaguucaaccaccuggaaaaaagaauagagaauuuaaauaaaaaaguugaugaugguuuccuggacauuuggacuuacaaugccgaacuguugguucuauuggaaaaugaaagaacuuuggacuaccacgauucaaaugugaagaacuuauaugaaaagguaagaagccaguuaaaaaacaaugccaaggaaauuggaaacggcugcuuugaauuuuaccacaaaugcgauaacacgugcauggaaagugucaaaaaugggacuuaugacuacccaaaauacucagaggaagcaaaauuaaacagagaagaaauagaugggguaaagcuggaaucaacaaggauuuaccagauuuuggcgaucuauucaacugucgccaguucauugguacugguagucucccugggggcaaucaguuucuggaugugcucuaaugggucucuacaguguagaauauguauuuaa

SEQ ID NO: 40975 - RNA, 1701 nt, Artificial Sequence; identical to SEQ ID NO: 40967
  derived and/or modified CDS sequence (wt) from hemagglutinin__InfluenzaA__AFK14314

SEQ ID NO: 40976 - RNA, 1701 nt, Artificial Sequence
  derived and/or modified CDS sequence (wt) from hemagglutinin__InfluenzaA__AFK14323
augaaggcaauacuaguaguucugcuauauacauuugcaaccgcaaaugcagacacauuauguauagguuaucaugcgaacaauucaacagacacuguagacacaguacuagaaaagaauguaacaguaacacacucuguuaaccuucuagaagacaagcauaacgggaaacuaugcaaacuaagagggguagccccauugcauuuggguaaauguaacauugcuggcuggauccugggaaauccagagugugaaucacucuccacagcaagcucaugguccuacauuguggaaacaucuaauucagacaauggaacguguuacccaggagauuucaucaauuaugaggagcuaagagagcaauugagcucagugucaucauuugaaagguuugagauauuccccaagacaaguucauggcccaaucaugacucgaacaaagguguaacggcagcauguccucaugcuggagcaaaaagcuucuacaaaaauuuaauauggcuaguuaaaaaaggaaauucauacccaaagcucagcaaauccuacauuaaugauaaagggaaagaaguccucgugcuauggggcauucaccauccaucuacuagugcugaccaacaaagucucuaucagaaugcagaugcauauguuuuuguggggacaucaagauacagcaagaaguucaagccggaaauagcaauaagacccaaagugagggaucaagaagggagaaugaacuauuacuggacacuaguagagccgggagacaaaauaacauucgaagcaacuggaaaucuagugguaccgagauaugcauucgcaauggaaagaaaugcuggaucugguauuaucauuucagauacaccaguccacgauugcaauacaacuugucagacacccaagggugcuauaaacaccagccucccauuucagaauauacauccgaucacaauuggaaaauguccaaaauauguaaaaagcacaaaauugagacuggccacaggauugaggaaugucccgucuauucaaucuagaggccuauuuggggccauugccgguuucauugaagggggguggacagggaugguagauggaugguacgguuaucaccaucaaaaugagcaggggucaggauaugcagccgaccugaagagcacacagaaugccauugacaagauuacuaacaaaguaaauucuguuauugaaaagaugaauacacaguucacagcaguagguaaagaguucaaccaccuggaaaaaagaauagagaauuuaaauaaaaaaguugaugaugguuuccuggacauuuggacuuacaaugccgaacuguugguucuauuggaaaaugaaagaacuuuggacuaccacgauucaaaugugaagaacuuauaugaaaagguaagaagucaguuaaaaaacaaugccaaggaaauuggaaacggcugcuuugaauuuuaccacaagugcgauaacacgugcauggaaagugucaaaaaugggacuuaugacuacccaaaauacucagaggaagcaaaauuaaacagagaagaaauagaugggguaaagcuggaaucaacaaggauuuaccagauuuuggcgaucuauucaacugucgccaguucauugguacugguagucucccugggggcaaucaguuucuggaugugcucuaaugggucucuacaguguagaauauguauuuaa

SEQ ID NO: 40977 - RNA, 1701 nt, Artificial Sequence
  derived and/or modified CDS sequence (wt) from hemagglutinin__InfluenzaA__AFK14332
augaaggcaauacuaguaguucugcuauauacauuugcaaccgcaaaugcagacacauuauguauagguuaucaugcgaacaauucaacagacacuguagacacaguacuagaaaagaauguaacaguaacacacucuguuaaccuucuagaagacaagcauaacgggaaacuaugcaaacuaagagggguagccccauugcauuuggguaaauguaacauugcuggcuggauccugggaaauccagagugugaaucacucuccacagcaagcucaugguccuacauuguggaaacaucuaauucagacaauggaacguguuacccaggagauuucaucgauuaugaggagcuaagagagcaauugagcucagugucaucauuugaaagguuugagauauuccccaagacaaguucauggcccaaucaugacucgaacaaagguguaacggcagcauguccucaugcuggagcaaaaagcuucuacaaaaauuuaauauggcuaguuaaaaaaggaaauucauacccaaagcucagcaaauccuacauuaaugauaaagggaaagaaguccucgugcuauggggcauucaccauccaucuacuagugcugaccaacaaagucucuaucagaaugcagaugcauauguuuuugugggaacaucaagauacagcaagaaguucaagccggaaauagcaauaagacccaaagugagggaucaagaagggagaaugaacuauuacuggacacuaguagagccgggagacaaaauaacauucgaagcaacuggaaaucuagugguaccgagauaugcauucgcaauggaaagaaaugcuggaucugguauuaucauuucagauacaccaguccacgauugcaauacaacuugucagacacccaagggugcuauaaacaccagccucccauuucagaauauacauccgaucacaauuggaaaauguccaaaauauguaaaaagcacaaaauugagacuggccacaggauugaggaaugucccgucuauucaaucuagaggccuauuuggggccauugccgguuucauugaagggggguggacagggaugguagauggaugguacgguuaucaccaucaaaaugagcaggggucaggauaugcagccgaccugaagagcacacagaaugccauugacaagauuacuaacaaaguaaauucuguuauugaaaagaugaauacacaguucacagcaguagguaaagaguucaaccaccuggaaaaaagaauagagaauuuaaauaaaaaaguugaugaugguuuccuggacauuuggacuuacaaugccgaacuguugguucuauuggaaaaugaaagaacuuuggacuaccacgauucaaaugugaagaacuuauaugaaaagguaagaagccaguuaaaaaacaaugccaaggaaauuggaaacggcugcuuugaauuuuaccacaagugcgauaacacgugcauggaaagugucaaaaaugggacuuaugacuacccaaaauacucagaggaagcaaaauuaaacagagaagaaauagaugggguaaagcuggaaucaacaaggauuuaccagauuuuggcgaucuauucaacugucgccaguucauugguacugguagucucccugggggcaaucaguuucuggaugugcucuaaugggucucuacaguguagaauauguauuuaa

SEQ ID NO: 40978 - RNA, 1701 nt, Artificial Sequence
  derived and/or modified CDS sequence (wt) from hemagglutinin__InfluenzaA__AFK14341
augaaggcaauacuaguaguucugcuauauacauuugcaaccgcaaaugcagacacauuauguauagguuaucaugcgaacaauucaacagacacuguagacacaguacuagaaaagaauguaacaguaacacacucuguuaaccuucuagaagacaagcauaacgggaaacuaugcaaacuaagagggguagccccauugcauuuggguaaauguaacauugcuggcuggauccugggaaauccagagugugaaucacucuccacagcaagcucaugguccuacauuguggaaacaucuaguucagacaauggaacguguuacccaggagauuucaucgauuaugaggagcuaagagagcaauugagcucagugucaucauuugaaagguuugagauauuccccaagacaaguucauggcccaaucaugacucgaacaaagguguaacggcagcauguccucaugcuggagcaaaaagcuucuacaaaaauuuaauauggcuaguuaaaaaaggaaauucauacccaaagcucagcaaauccuacauuaaugauaaagggaaagaaguccucgugcuauggggcauucaccauccaucuacuagugcugaccaacaaagucucuaucagaaugcagaugcauauguuuuuguggggacaucaagauacagcaagaaguucaagccggaaauagcaauaagacccaaagugagggaacaagaagggagaaugaacuauuacuggacacuaguagagccgggagacaaaauaacauucgaagcaacuggaaaucuagugguaccgagauaugcauucgcaauggaaagaaaugcuggaucugguauuaucauuucagauacaccaguccacgauugcaauacaacuugucagacacccaagggugcuauaaacaccagccucccauuucagaauauacauccgaucacaauuggaaaauguccaaaauauguaaaaagcacaaaauugagacuggccacaggauugaggaaugucccgucuauucaaucuagaggccuauuuggggccauugccgguuucauugaagggggguggacagggaugguagauggaugguacgguuaucaccaucaaaaugagcaggggucaggauaugcagccgaccugaagagcacacagaaugccauugacgagauuacuaacaaaguaaauucuguuauugaaaagaugaauacacaguucacagcaguagguaaagaguucaaccacuuggaaaaaagaauagagaauuuaaauaaaaaaguugaugaugguuuccuggacauuuggacuuacaaugccgaacuguugguucuauuggaaaaugaaaaaacuuuggacuaccacgauucaaaugugaagaacuuauaugaaaagguaagaagccaguuaaaaaacaaugccaaggaaauuggaaacggcugcuuugaauuuuaccacaaaugcgauaacacgugcauggaaagugucaaaaaugggacuuaugacuacccaaaauacucagaggaagcaaaauuaaacagagaagaaauagaugggguaaagcuggaaucaacaaggauuuaccagauuuuggcgaucuauucaacugucgccaguucauugguacugguagucucccugggggcaaucaguuucuggaugugcucuaaugggucucuacaguguagaauauguauuuaa

SEQ ID NO: 40979 - RNA, 1701 nt, Artificial Sequence
  derived and/or modified CDS sequence (wt) from hemagglutinin__InfluenzaA__AFK14350
augaaggcaauacuaguaguucugcuauauacauuugcaaccgcaaaugcagacacauuauguauagguuaucaugcgaacaauucaacagacacuguagacacaguacuagaaaagaauguaacaguaacacacucuguuaaccuucuagaagacaagcauaacgggaaacuaugcaaacuaagagggguagccccauugcauuuggguaaauguaacauugcuggcuggauccugggaaauccagagugugaaucacucuccacagcaagcucaugguccuacauuguggaaacaucuaguucagacaauggaacguguuacccaggagauuucaucgauuaugaggagcuaagagagcaauugagcucagugucaucauuugaaagguuugagauauuccccaagacaaguucauggcccaaucaugacucgaacaaagguguaacggcagcauguccucaugcuggagcaaaaagcuucuacaaaaauuuaauauggcuaguuaaaaaaggaaauucauacccaaagcucagcaaauccuacauuaaugauaaagggaaagaaguccucgugcuauggggaauucaccauccaucuacuagugcugaccaacaaagucucuaucagaaugcagaugcauauguuuuuguggggacaucaagauacagcaagaaguucaagccggaaauagcaauaagacccaaagugagggaucaagaagggagaaugaacuauuacuggacacuaguagagccgggagacaaaauaacauucgaagcaacuggaaaucuagugguaccgagauaugcauucgcaauggaaagaaaugcuggaucugguauuaucauuucagauacaccaguccacgauugcaauacaacuugucagacacccaagggugcuauaaacaccagccucccauuucagaacauacauccgaucacaauuggaaaauguccaaaauauguaaaaagcacaaaauugagacuggccacaggauugaggaaugucccgucuauucaaucuagaggccuauuuggggccauugccgguuucauugaagggggguggacagggaugguagauggaugguacgguuaucaccaucaaaaugagcaggggucaggauaugcagcugaccugaagagcacacagcaugccauugacgagauuacuaacaaaguaaauucuguuauugaaaagaugaauacacaguucacagcaguagguaaagaguucaaccaccuggaaaaaagaauagagaauuuaaauaaaaaaguugaugaugguuuccuggacauuuggacuuacaaugccgaacuguugguucuauuggaaaaugaaagaacuuuggacuaccacgauucaaaugugaagaacuuauaugaaaagguaagaagccaguuaaaaaacaaugccaaggaaauuggaaacggcugcuuugaauuuuaccacaaaugcgauaacacgugcauggaaagugucaaaaaugggacuuaugacuacccaaaauacucagaggaagcaaaauuaaacagagaagaaauagaugggguaaagcuggaaucaacaaggauuuaccagauuuuggcgaucuauucaacugucgccaguucauugguacugguagucucccugggggcaaucaguuucuggaugugcucuaaugggucucuacaguguagaauauguauuuaa

SEQ ID NO: 40980 - RNA, 1701 nt, Artificial Sequence
  derived and/or modified CDS sequence (wt) from hemagglutinin__InfluenzaA__AFK14358
augaaggcaauacuaguaguucugcuauauacauuugcaaccgcaaaugcagacacauuauguauagguuaucaugcgaacaauucaacagacacuguagacacaguacuagaaaagaauguaacaguaacacacucuguuaaccuucuagaagacaagcauaacgggaaacuaugcaaacuaagagggguagccccauugcauuuggguaaauguaacauugcuggcuggauccugggaaauccagagugugaaucacucuccacagcaagcucaugguccuacauuguggaaacaucuaguucagacaauggagcguguuacccaggagauuucaucgauuaugaggagcuaagagagcaauugagcucagugucaucauuugaaagguuugagaucuuccccaagacaaguucauggcccaaucaugacucgaacaaagguguaacggcagcauguccucaugcuggagcaaaaagcuucuacaaaaauuuaauauggcuaguuaaaaaaggaaauucauacccaaagcucagcaaauccuacauuaaugauaaagggaaagaaguccucgugcuauggggcauucaccauccaucuacuagugcugaccaacaaagucucuaucagaaugcagaugcauauguuuuuguggggacaucaagauacagcaagaaguucaagccggaaauagcaauaagacccaaagugagggaacaagaagggagaaugaacuauuacuggacacuaguagagccgggagacaaaauaacauucgaagcaacuggaaaucuagugguaccgagauaugcauucgcaauggaaagaaaugcuggaucugguauuaucauuucagauacaccaguccacgauugcaauacaacuugucagacacccaagggugcuauaaacaccagccucccauuucagaauauacauccgaucacaauuggaaaauguccaaaauauguaaaaagcacaaaauugagacuggccacaggauugaggaaugucccgucuauucaaucuagaggccuauuuggggccauugccgguuucauugaagggggguggacagggaugguagauggaugguacgguuaucaccaucaaaaugagcaggggucaggauaugcagccgaccugaagagcacacagaaugccauugacgagauuacuaacaaaguaaauucuguuauugaaaagaugaauacacaguucacagcaguagguaaagaguucaaccacuuggaaaaaagaauagagaauuuaaauaaaaaaguugaugaugguuuccuggacauuuggacuuacaaugccgaacuguugguucuauuggaaaaugaaaaaacuuuggacuaccacgauucaaaugugaagaacuuauaugaaaagguaagaagccaguuaaaaaacaaugccaaggaaauuggaaacggcugcuuugaauuuuaccacaaaugcgauaacacgugcauggaaagugucaaaaaugggacuuaugacuacccaaaauacucagaggaagcaaaauuaaacagagaagaaauagaugggguaaagcuggaaucaacaaggauuuaccagauuuuggcgaucuauucaacugucgccaguucauugguacugguagucucccugggggcaaucaguuucuggaugugcucuaaugggucucuacaguguagaauauguauuuaa

SEQ ID NO: 40981 - RNA, 1701 nt, Artificial Sequence
  derived and/or modified CDS sequence (wt) from hemagglutinin__InfluenzaA__AFK14395
augaaggcaauacuaguaguucugcuauauacauuugcaaccgcaaaugcagacacauuauguauagguuaucaugcgaacaauucaacagacacuguagacacaguacuagaaaagaauguaacaguaacacacucuguuaacauucuagaagacaagcauaacgggaaacuaugcaaacuaagagggguagccccauugcauuuggguaaauguaacauugcuggcuggauccugggaaauccagagugugaaucacucuccacagcaagcucaugguccuacauuguggaaacaucuaguucagaaaauggaauguguugcccaagagauuucaucgauuaugaggagcuaagagagcaauugagcucagucucaucauuugaaagguuugagauauuccccaagacaagcucauggcccaaucaugacucgaacaaagguguaacggcagcauguccucaugcuggagcaaaaagcuucuacaaaaauuuaauuuggcuaguuaaaaaaggaaauucauacccaaagcucagcaaauccuacauuaaugauaaagggaaagaaguccucgugcuauggggcauucaccauccaucuacuagugcugaccaacaaagucucuaucagaaugcagaugcauauguuuuuguggggucaucaagauacagcaagaaguucaagccggaaauagcaauuagacccaaagugagggaucaagaagggagaaugaacuauuacuggacacuaguagagccgggagacaaaauaacauucgaagcaacuggaaaucuagugguaccaagauaugcauucgcaauggaaagaaaugcuggaucugguauuaucauuucagauacaccaguccaugauugcaauacaacuugucagacacccaagggugcuauaaacaccagccucccauuucagaauauacauccgaucacaauuggaaaauguccaaaauauguaaaaagcacaaaauugagacuggccacaggauugaggaaugucccgucuauucaaucuagaggccuauuuggggccauugccgguuucauugaagggggguggacagggaugguagauggaugguacgguuaucaccaucaaaaugagcaggggucaggauaugcagccgaccugaagagcacacagaaugccauugacgagauuacuaacaaaguaaauucuguuauugaaaagaugaauacacaguucacagcaguagguaaagaguucaaccaccuggaaaaaagaauagagaauuuaaauaaaaaaguugaugaugguuuccuggacauuuggacuuacaaugccgaacuguugguucuauuggaaaaugaaagaacuuuggacuaccacgauucaaaugugaagaacuuauaugaaaagguaagaagccagcuaaaaaacaaugccaaggaaguuggaaacggcugcuuugaauuuuaccacaaaugcgauaacacgugcauggaaagugucaaaaaugggacuuaugacuacccaaaauacucagaggaagcaaaauuaaacagagaagaaauagaugggguaaagcuggaaucaacaaggauuuaccagauuuuggcgaucuauucaacugccgccaguucauugguacugguagucucccugggggcaaucaguuucuggaugugcucuaaugggucucuacaguguagaauauguauuuaa

SEQ ID NO: 40982 - RNA, 1701 nt, Artificial Sequence
  derived and/or modified CDS sequence (wt) from hemagglutinin__InfluenzaA__AFK14431
augaaggcaauacuaguaguucugcuauauacauuugcaaccgcaaaugcagacacauuauguauagguuaucaugcgaacaauucaacagacacuguagacacaguacuagaaaagaauguaacaguaacacacucuguuaaccuucuagaagacaagcauaacgggaaacuaugcaaacuaagagggguagccccauugcauuuggguaaauguaacauugcuggcuggauccugggaaauccagagugugaaucacucuccacagcaagcucaugguccuacauuguggaaacaucuaauucagacaauggaacguguuacccaggagauuuccucgauuaugaagagcuuagaaagcaauugagcucagugucaucauuugaaaggguugagauauuccccaagacaaguucauggcccaaucaugacucgaacaaagguguaacggcagcauguccucaugcuggagcaaaaagcuucuacaaaaauuuaauauggcuaguuaaaaaaggaaauucauacccaaagcucagcaaauccuacauuaaugauaaagggaaagaaguccucgugcuauggggcauucaccauccaucuacuagugcugaccaacaaagucucuaucagaaugcagaugcauauguuuuuguggggacaucaagauacagcaagaaguucaagccggaaauagcaauaagacccaaagugagggaucaagaagggagaaugaacuauuacuggacacuaguagagccgggagacaaaauaacauucgaagcaacuggaaaucuagugguaccgagauaugcauucgcaauggaaagaaaugcuggaucugguauuaucauuucagauacaccaguccacgauugcaauacaacuugucagacacccaagggugcuauaaacaccagccucccauuucagaauauacauccgaucacaauuggaaaauguccaaaauauguaaaaagcacaaaauugagacuggccacaggauugaggaaugucccgucuauucaaucuagaggccuauuuggggccauugccgguuucauugaagggggguggacagggaugguagauggaugguacgguuaucaccaucaaaaugagcaggggucaggauaugcagccgaccugaagagcacacagaaugccauugacaagauuacuaacaaaguaaauucuguuauugaaaagaugaauacacaguucacagcaguagguaaagaguucaaccaccuggaaaaaagaauagagaauuuaaauaaaaaaguugaugaugguuuccuggacauuuggacuuacaaugccgaacuguugguucuauuggaaaaugaaagaacuuuggacuaccacgauucaaaugugaagaacuuauaugaaaagguaagaagccaguuaaaaaacaaugccaaggaaauuggaaacggcugcuuugaauuuuaccacaaaugcgauaacacgugcauggaaagugucaaaaaugggacuuaugacuacccaaaauacucagaggaagcaaaauuaaacagagaagaaauagaugggguaaagcuggaaucaacaaggauuuaccagauuuuggcgaucuauucaacugucgccaguucauugguacugguagucucccugggggcaaucaguuucuggaugugcucuaaugggucucuacaguguagaauauguauuuaa

SEQ ID NO: 40983 - RNA, 1701 nt, Artificial Sequence; identical to SEQ ID NO: 34681
  derived and/or modified CDS sequence (wt) from hemagglutinin__InfluenzaA__AFK14456

SEQ ID NO: 40984 - RNA, 1701 nt, Artificial Sequence
  derived and/or modified CDS sequence (wt) from hemagglutinin__InfluenzaA__AFK14465
augaaggcaauacuaguaguucugcuauauacauuugcaaccgcaaaugcagacacauuauguauagguuaucaugcgaacaauucaacagacacuguagacacaguacuagaaaagaauguaacaguaacacacucuguuaaccuucuagaagacaaacauaacgggaaacuaugcaaacuaagagggguagccccauugcauuuggguaaauguaacauugcuggcuggauccugggaaauccagagugugaaucacucuccacagcaagcucaugguccuacauuguggaaacaucuaguucagacaauggaacguguuacccaggagauuucaucgauuaugaggagcuaagagagcaauugagcucagugucaucauuugaaagguuugagauauuccccaagacaaguucauggcccaaucaugacucgaacaaagguguaacggcagcauguccucaugcuggagcaaaaagcuucuacaaaaauuuaauauggcuaguuaaaaaaggaaauucauacccaaagcucagcaaauccuacauuaaugauaaagggaaagaaguccucgugcuauggggcauucaccauccaucuacuagugcugaccaacaaagucucuaucagaaugcagaugcauauguuuuuguggggacaucaagauacagcaagaaguucaagccggaaauagcaauaagacccaaagugagggaucaagaagggagaaugaacuauuacuggacacuaguagagccgggagacaaaauaacauucgaagcaacuggaaaucuagugguaccgagauaugcauucgcaauggaaagaaaugcuggaucugguauuaucauuucagauacaccaguccacgauugcaauacaacuugucagacacccaagggugcuauaaacaccagccucccauuucagaauauacauccgaucacaauuggaaaauguccaaaauauguaaaaagcacaaaauugagacuggccacaggauugaggaaugucccgucuauucaaucuagaggccuauuuggggccauugccgguuucauugaagggggguggacagggaugguagauggaugguacgguuaucaccaucaaaaugagcaggggucaggauaugcagccgaccugaagagcacacagaaugccauugacgagauuacuaacaaaguaaauucuguuauugaaaagaugaauacacaguucacagcaguagguaaagaguucaaccaccuggaaaaaagaauagagaauuuaaauaaaaaaguugaugaugguuuccuggacauuuggacuuacaaugccgaacuguugguucuauuggaaaaugaaagaacuuuggacuaccacgauucaaaugugaagaacuuauaugaaaagguaagaagccaguuaaaaaacaaugccaaggaaauuggaaacggcugcuuugaauuuuaccacaaaugcgauaacacgugcauggaaagugucaaaaaugggacuuaugacuacccaaaauacucagaggaagcaaaauuaaacagagaagaaauagaugggguaaagcuggaaucaacaaggauuuaccagauuuuggcgaucuauucaacugucgccaguucauugguacugguagucucccugggggcaaucaguuucuggaugugcucuaaugggucucuacaguguagaauauguauuuaa

SEQ ID NO: 40985 - RNA, 1701 nt, Artificial Sequence
  derived and/or modified CDS sequence (wt) from hemagglutinin__InfluenzaA__AFK14536
augaaggcaauacuaguaguucugcuauauacauuugcaaccgcaaaugcagacacauuauguauagguuaucaugcgaacaauucaacagacacuguagacacaguacuagaaaagaauguaacaguaacacacucuguuaaccuucuagaagacaagcauaacgggaaacuaugcaaacuaagagggguagccccauugcauuuggguaaauguaacauugcuggcuggauccugggaaauccagagugugaaucacucuccacagcaagcucaugguccuacauuguggaaacauauaguucagacaauggaacguguuacccaggagauuucaucgauuaugaggagcuaagagagcaauugagcucagugucaucauuugaaagguuugagauauuccccaagacaaguucauggcccaaucaugacucgaacaaagguguaacggcagcauguccucaugcuggagcaaaaagcuucuacaaaaauuuaauauggcuaguuaaaaaaggaaauucauacccaaagcucagcaaauccuacauuaaugauaaagggaaagaaguccucgugcuauggggaauucaccauccaucuacuagugcugaccaacaaagucucuaucagaaugcagaugcauauguuuuuguggggacaucaagauacagcaagaaguucaagccggaaauagcaauaagacccaaagugagggaucaagaagggagaaugaacuauuacuggacacuaguagagccgggagacaaaauaacauucgaagcaacuggaaaucuagugguaccgagauaugcauucgcaauggaaagaaaugcuggaucugguauuaucauuucagauacaccaguccacgauugcaauacaacuugucagacacccaagggugcuauaaacacuagccucccauuucagaauauacauccgaucacaauuggaaaauguccaaaauauguaaaaagcacaaaauugagacuggccacaggauugaggaaugucccgucuauucaaucuagaggccuauuuggggccauugccgguuucauugaagggggguggacagggaugguagauggaugguacgguuaucaccaucaaaaugagcaggggucaggauaugcagccgaccugaagagcacacagcaugccauugacgagauuacuaacaaaguaaauucuguuauugaaaagaugaauacacaguucacagcaguagguaaagaguucaaccaccuggaaaaaagaauagagaauuuaaauaaaaaaguugaugaugguuuccuggacauuuggacuuacaaugccgaacuguugguucuauuggaaaaugaaagaacuuuggacuaccacgauucaaaugugaagaacuuauaugaaaagguaagaagccaguuaaaaaacaaugccaaggaaauuggaaacggcugcuuugaauuuuaccacaaaugcgauaacacgugcauggaaagugucaaaaaugggacuuaugacuacccaaaauacucagaggaagcaaaauuaaacagagaagaaauagaugggguaaagcuggaaucaacaaggauuuaccagauuuuggcgaucuauucaacugucgccaguucauugguacugguagucucccugggggcaaucaguuucuggaugugcucuaaugggucucuacaguguagaauaugcauuuaa

SEQ ID NO: 40986 - RNA, 1701 nt, Artificial Sequence; identical to SEQ ID NO: 40959
  derived and/or modified CDS sequence (wt) from hemagglutinin__InfluenzaA__AFK14571

SEQ ID NO: 40987 - RNA, 1701 nt, Artificial Sequence; identical to SEQ ID NO: 39190
  derived and/or modified CDS sequence (wt) from hemagglutinin__InfluenzaA__AFK14586

SEQ ID NO: 40988 - RNA, 1701 nt, Artificial Sequence
  derived and/or modified CDS sequence (wt) from hemagglutinin__InfluenzaA__AFK14595
augaaggcaauacuaguaguucugcuauauacauuugcaaccgcaaaugcagacacauuauguauagguuaucaugcgaacaauucaacagacacuguagacacaguacuagaaaagaauguaacaguaacacacucuguuaaccuucuagaagacaagcauaacgggaaacuaugcaaacuaaaagggguagccccauugcauuuggguaaauguaacauugcuggcuggauccugggaaauccaaagugugaaucacucuccacagcaagcucaugguccuacauuggggaaacaucuaguucaaacaauggaacguguuacccaggaaauuucaucgauuuugaggagcuaaaaaagcaauugagcucagugucaucauuugaaagguuugagauauuccccaagacaaguucauggcccaaucaugacucgaacaaagguguaacggcagcauguccucaugcuggagcaaaaagcuucuacaaaaauuuaauauggcuaguuaaaaaaggaaauucauacccaaagcucagcaaauccuauauuaaugauaaagggaaagaaguccucgugcuauggggcauucaccauccaucuacuagugcugaccaacaaagucucuaucagaaugcagaugcauauguuuuuguggggacaucaagauacagcaagaaguucaagccggaaauagcaauaagaccuaaagugagggaucaagaagggagaaugaacuauuacuggacacuaguagagccgggagacaaaauaacauucgaagcaacuggaaaucuagugguaccgagauaugcauucgcaauggaaagaaaugcuggaucugguauuaucauuucagauacaccaguccacgauugcaauacaacuugucagacacccaagggugcuauaaacaccagccucccauuucagaauauacauccgaucacaauuggaaaauguccaaaauauguaaaaagcacaaaauugagacuggccacaggauugaggaaugucccgucuauucaaucuagaggccuauuuggggccauugccgguuucauugaagggggguggacagggaugguagauggaugguacgguuaucaccaucaaaaugagcaggggucaggauaugcagccgaccugaagagcacacagaaugccauugacgagauuacuaacaaaguaaauucuguuauugaaaagaugaauacacaguucacagcaguagguaaagaguucaaccaccuggaaaaaagaauagagaauuuaaauaaaaaaguugaugaugguuuccuggacauuuggacuuacaaugccgaacuguugguucuauuggaaaaugaaagaacuuuggacuaccacgauucaaaugugaagaacuuauaugaaaagguaagaagccaguuaaaaaacaaugccaaggaaauuggaaacggcugcuuugaauuuuaccacaaaugcgauaacacgugcauggaaagugucaaaaaugggacuuaugacuacccaaaauacucagaggaagcaaaauuaaacagagaagaaauagaugggguaaagcuggaaucaacaaggauuuaccagauuuuggcgaucuauucaacugucgccaguucauugguacugguagucucccugggggcaaucaguuucuggaugugcucuaaugggucucuacaguguagaauauguauuuaa

SEQ ID NO: 40989 - RNA, 1701 nt, Artificial Sequence
  derived and/or modified CDS sequence (wt) from hemagglutinin__InfluenzaA__AFK14612
augaaggcaauacuaguaguucugcuauauacauuugcaaccgcaaaugcagacacauuauguauagguuaucaugcgaacaauucaacagacacuguagacacaguacuagaaaagaauguaacaguaacacacucuguuaaccuucuagaagacaagcauaacgggaaacuaugcaaacuaagagggguagccccauugcauuuggguaaauguaacauugcuggcuggauccuaggaaauccagagugugaaucacucuccacagcaagcucaugguccuacauuguggaaacaucuaguucagacaauggaacguguuacccaggagauuucaucgauuaugaggagcuaagagagcaauugagcucagugucaucauuugaaagguuugagauauuccccaagacaaguucauggcccaaucaugacucgaacaaagguguaacggcagcauguccucaugcuggagcaaaaagcuucuacaaaaauuuaauauggcuaguuaaaaaaggaaauucauacccaaagcucagcaaauccuacauuaaugauaaagggaaagaaguccucgugcuauggggcauucaccauccaucuacuagugcugaccaacaaagucucuaucagaaugcagaugcauauguuuuuguggggacaucaagauacagcaagaaguucaaaccggaaauagcaauaagacccaaaguaagggaucaagaagggagaaugaacuauuacuggacacuaguagagccgggagacaaaauaacauucgaagcaacuggaaaucuagugguaccgagauaugcauucgcaauggaaagaaaugcuggaucugguauuaucauuucagauacaccaguccacgauugcaauacaacuugucagacacccaagggugcuguaaacaccagccucccauuucagaauauacauccgaucacaauuggaaaauguccaaaauauguaaaaagcacaaaauugagacuggccacaggauugaggaaugucccgucuauucaaucuagaggccuauuuggggccauugccgguuucauugaagggggguggacagggaugguagauggaugguacgguuaucaccaucaaaaugagcaggggucaggauaugcagccgaccugaagagcacacagaaugccauugacgagauuacuaacaaaguaaauucuguuauugaaaagaugaauacacaguucacagcaguagguaaagaguucaaccaccuggaaaaaagaauagagaauuuaaauaaaaaaguugaugaugguuuccuggacauuuggacuuacaaugccgaacuguugguucuauuggaaaaugaaagaacuuuggacuaccacgauucaaaugugaagaacuuauaugaaaagguaagaagccaguuaaaaaacaaugccaaggaaauuggaaacggcugcuuugaauuuuaccacaaaugcgauaacacgugcauggaaagugucaaaaaugggacuuaugacuacccaaaauacucagaggaagcaaaauuaaacagagaagaaauagaugggguaaagcuggaaucaacaaggauuuaccagauuuuggcgaucuauucaacugucgccaguucauugguacugguagucucccugggggcaaucaguuucuggaugugcucuaaugggucucuacaguguagaauauguauuuaa

SEQ ID NO: 40990 - RNA, 1701 nt, Artificial Sequence
  derived and/or modified CDS sequence (wt) from hemagglutinin__InfluenzaA__AFK14621
augaaggcaauacuaguaguucugcuauauacauuugcaaccgcaaaugcagacacauuauguauagguuaucaugcgaacaauucaacagacacuguagacacaguacuagaaaagaauguaacaguaacacacucuguuaaccuucuagaagacaagcauaacgggaaacuaugcaaacuaagagggguagccccauugcauuuggguaaauguaacauugcuggcuggauccugggaaauccagagugugaaucacucuccacagcaagcucaugguccuacauuguggaaacaucuaguucagacaauggaacguguuacccaggagauuucaucgauuaugaggagcuaagagagcaauugagcucagugucaucauuugaaagguuugagauauuccccaagacaaguucauggcccaaucaugacucgaacaaagguguaacggcagcauguccucaugcuggagcaaaaagcuucuacaaaaauuuaauauggcuaguuaaaaaaggaaauucauacccaaagcucagcaaauccuacauuaaugauaaaggaaaagaaguccucgugcuauggggcauucaccauccaucuacuagugcugaccaacaaagucucuaucagaaugcagaugcauauguuuuuguggggacaucaagauacagcaagaaguucaagccggaaauagcaauaagacccaaagugagggaucaagaagggagaaugaacuauuacuggacacuaguagagccgggagacaaaauaacauucgaagcaacuggaaaucuagugguaccgagauaugcauucgcaauggaaagaaaugcuggaucugguauuaucauuucagauacaccaguccacgauugcaauacaacuugucagacacccaagggugcuauaaacaccagccucccauuucagaauauacauccgaucacaauuggaaaauguccaaaauauguaaaaagcacaaaauugagacuggccacaggauugaggaaugucccgucuauucaaucuagaggccuauuuggggccauugccgguuucauugaagggggguggacagggaugguagauggaugguacgguuaucaccaucaaaaugagcaggggucaggauaugcagccgaccugaagagcacacagaaugccauugacgagauuacuaacaaaguaaauucuguuauugaaaagaugaauacacaguucacagcaguagguaaagaguucaaccaccuggaaaaaagaauagagaauuuaaauaaaaaaguugaugaugguuuccuggacauuuggacuuacaaugccgaacuguugguucuauuggaaaaugaaagaacuuuggacuaccacgauucaaaugugaagaacuuauaugaaaagguaagaagccaguuaaaaaacaaugccaaggaaauuggaaacggcugcuuugaauuuuaccacaaaugcgauaacacgugcauggaaagugucaaaaaugggacuuaugacuacccaaaauacucagaggaagcaaaauuaaacagagaagaaauagaugggguaaagcuggaaucaacaaggauuuaccagauuuuggcgaucuauucaacugucgccaguucauugguacugguagucucccugggggcaaucaguuucuggaugugcucuaaugggucucuacaguguagaauauguauuuaa

SEQ ID NO: 40991 - RNA, 1701 nt, Artificial Sequence
  derived and/or modified CDS sequence (wt) from hemagglutinin__InfluenzaA__AFK14630
augaaggcaauacuaguaguucugcuauauacauuugcaaccgcaaaugcagacacauuauguauagguuaucaugcgaacaauucaacagacacuguagacacaguacuagaaaagaauguaacaguaacacacucuguuaaccuucuagaagacaagcauaacgggaaacuaugcaaacuaagagggguagccccauugcauuuggguaaauguaacauugcuggcuggauccugggaaauccagagugugaaucacucuccacagcaagcucaugguccuacauuguggaaacaucuaguucagacaauggaacguguuacccaggagauuucaucgauuaugaggagcuaagagagcaauugagcucagugucaucauuugaaagguuugagauauuccccaagacaaguucauggcccaaucaugacucgaacaaagguguaacggcagcauguccucaugcuggagcaaaaagcuucuacaaaaauuuaauauggcuaguuaaaaaaggaaauucauacccaaagcucagcaaauccuacauuaaugauaaagggaaagaaguccucgugcuauggggcauucaccauccaucuacuagggcugaccuacaaaguaucaaucagaaugcagaugcauauguuuuuguggggacaucaagauacagcaagaaguucaagccggaaauagcaauaagacccaaagugagggaucaagaagggagaaugaacuauuacuggacacuaguagagccgggagacaaaauaacauucgaagcaacuggaaaucuagugguaccgagauaugcauucgcaauggaaagaaaugcuggaucugguauuaucauuucagauacaccaguccacgauugcaauacaacuugucagacacccaagggugcuauaaacaccagccucccauuucagaauauacauccgaucacaauuggaaaauguccaaaauauguaaaaagcacaaaauugagacuggccacaggauugaggaaugucccgucuauucaaucuagaggccuauuuggggccauugccgguuucauugaagggggguggacagggaugguagauggaugguacgguuaucaccaucaaaaugagcaggggucaggauaugcagccgaccugaagagcacacagaaugccauugacgagauuacuaacaaaguaaauucuguuauugaaaagaugaauacacaguucacagcaguagguaaagaguucaaccaccuggaaaaaagaauagagaauuuaaauaaaaaaguugaugaugguuuccuggacauuuggacuuacaaugccgaacuguugguucuauuggaaaaugaaagaacuuuggacuaccacgauucaaaugugaagaacuuauaugaaaagguaagaagccaguuaaaaaacaaugccaaggaaauuggaaacggcugcuuugaauuuuaccacaaaugcgauaacacgugcauggaaagugucaaaaaugggacuuaugacuacccaaaauacucagaggaagcaaaauuaaacagagaagaaauagaugggguaaagcuggaaucaacaaggauuuaccagauuuuggcgaucuauucaacugucgccaguucauugguacugguagucucccugggggcaaucaguuucuggaugugcucuaaugggucucuacaguguagaauauguauuuaa

SEQ ID NO: 40992 - RNA, 1701 nt, Artificial Sequence
  derived and/or modified CDS sequence (wt) from hemagglutinin__InfluenzaA__AFK14639
augaaggcaauacuaguaguucugcuauauacauuugcaaccgcaaaugcagacacauuauguauagguuaucaugcgaacaauucaacagacacuguagacacaguacuagaaaagaauguaacaguaacacacucuguuaacauucuagaagacaagcauaacgggaaacuaugcaaacuaagagggguagccccauugcauuuggguaaauguaacauugcuggcuggauccugggaaauccagagugugaaucacucuccacagcaagcucaugguccuacauuguggaaacaucuaguucagacaauggaacguguuacccaggagauuucaucgauuaugaggagcuaagagagcaauugagcucagugucaucauuugaaagguuugagauauuccccaagacaaguucauggcccaaucaugacucgaacaaagguguaacggcagcauguccucaugcuggagcaaaaagcuucuacaaaaauuuaauauggcuaguuaaaaaaggaaauucauacccaaagcucagcaaauccuacauuaaugauaaagggaaagaaguccucgugcuauggggcauucaccauccaucuacuagugcugaccaacaaagucucuaucagaaugcagaugcauauguuuuuguagggucaucaagauacagcaagaaguucaagccggaaauagcaauaagacccaaagugagggaucaagaagggagaaugaacuauuacuggacacuaguagagccgggagacaaaauaacauucgaagcaacuggaaaucuagugguaccgagauaugcauucgcaauggaaagaaaugcuggaucugguauuaucauuucagauacaccaguccacgauugcaauacaacuugucagacacccaagggugcuauaaacaccagccucccauuucagaauauacauccgaucacaauuggaaaauguccaaaauauguaaaaagcacaaaauugagacuggccacaggauugaggaaugucccgucuauucaaucuagaggccuauuuggggccauugccgguuucauugaagggggguggacagggaugguagauggaugguacgguuaucaccaucaaaaugagcaggggucaggauaugcagccgaccugaagagcacacagaaugccauugacgagauuacuaacaaaguaaauucuguuauugaaaagaugaauacacaguucacagcaguagguaaagaguucaaccaccuggaaaaaagaauagagaauuuaaauaaaaaaguugaugaugguuuccuggacauuuggacuuacaaugccgaacuguugguucuauuggaaaaugaaagaacuuuggacuaccacgauucaaaugugaagaacuuauaugaaaagguaagaggccagcuaaaaaacaaugccaaggaaauuggaaacggcugcuuugaauuuuaccacaaaugcgauaacacgugcauggaaagugucaaaaaugggacuuaugacuacccaaaauacucagaggaagcaaaauuaaacagagaagaaauagaugggguaaagcuggaaucaacaaggauuuaccagauuuuggcgaucuauucaacugucgccaguucauugguacugguagucucccugggggcaaucaguuucuggaugugcucuaaugggucucuacaguguagaauauguauuuaa

SEQ ID NO: 40993 - RNA, 1701 nt, Artificial Sequence; identical to SEQ ID NO: 40959
  derived and/or modified CDS sequence (wt) from hemagglutinin__InfluenzaA__AFK14661

SEQ ID NO: 40994 - RNA, 1701 nt, Artificial Sequence; identical to SEQ ID NO: 39190
  derived and/or modified CDS sequence (wt) from hemagglutinin__InfluenzaA__AFK14670

SEQ ID NO: 40995 - RNA, 1701 nt, Artificial Sequence; identical to SEQ ID NO: 39190
  derived and/or modified CDS sequence (wt) from hemagglutinin__InfluenzaA__AFK14678

SEQ ID NO: 40996 - RNA, 1701 nt, Artificial Sequence
  derived and/or modified CDS sequence (wt) from hemagglutinin__InfluenzaA__AFK14688
augaaggcaauacuaguaguucugcuauauacauuugcaaccgcaaaugcagacacauuauguauagguuaucaugcgaacaauucaacagacacuguagacacaguacuagaaaagaauguaacaguaacacacucuguuaaccuucuagaagacaagcauaacgggaaacuaugcaaacuaagagggguagccccauugcauuuggguaaauguaacauugcuggcuggauccuaggaaauccagagugugaaucacucuccacagcaagcucaugguccuacauuguggaaacaucuaguucagacaauggaacguguuacccaggagauuucauccaugaugaagagcuaagaaagcaauugagcucagugucaucauuugaaagguuugagauauuccccaagacaaguucauggcccaaucaugacucgaacaaagguguaacggcagcauguccucaugcuggagcaaaaagcuucuacaaaaauuuaauauggcuaguuaaaaaaggaaauucauacccaaagcucagcaaauccuacauuaaugauaaagggaaagaaguccucgugcuauggggcauucaccauccaucuacuagugcugaccaacaaagucucuaucagaaugcagaugcauauguuuuuguggggacaucaagauacagcaagaaguucaagccggaaauagcaauaagacccaaagugagggaucaagaagggagaaugaacuauuacuggacacuaguagagccgggagacaaaauaacauucgaagcaacuggaaaucuagugguaccgagauaugcauucgcaauggaaagaaaagcuggaucugguauuaucauuuuagauacaccaguccacgauuggaauacaacuugugagacacccaagggugcuguaaacaccagccucccauuucagaauauacauccgaucacaauuggaaaauguccaaaauauguaaaaagcacaaaauugagacuggccacaggauugaggaaugucccgucuauucaaucuagaggccuauuuggggccauugccgguuucauugaagggggguggacagggaugguagauggaugguacgguuaucaccaucaaaaugagcaggggucaggauaugcagccgaccugaagagcacacagaaugccauugacgagauuacuaacaaaguaaauucuguuauugaaaagaugaauacacaguucacagcaguagguaaagaguucaaccaccuggaaaaaagaauagagaauuuaaauaaaaaaguugaugaugguuuccuggacauuuggacuuacaaugccgaacuguugguucuauuggaaaaugaaagaacuuuggacuaccacgauucaaaugugaagaacuuauaugaaaagguaagaagccaguuaaaaaacaaugccaaggaaauuggaaacggcugcuuugaauuuuaccacaaaugcgauaacacgugcauggaaagugucaaaaaugggacuuaugacuacccaaaauacucagaggaagcaaaauuaaacagagaagaaauagaugggguaaagcuggaaucaacaaggauuuaccagauuuuggcgaucuauucaacugucgccaguucauugguacugguagucucccugggggcaaucaguuucuggaugugcucuaaugggucucuacaguguagaauauguauuuaa

SEQ ID NO: 40997 - RNA, 1701 nt, Artificial Sequence; identical to SEQ ID NO: 39190
  derived and/or modified CDS sequence (wt) from hemagglutinin__InfluenzaA__AFK14697

SEQ ID NO: 40998 - RNA, 1701 nt, Artificial Sequence
  derived and/or modified CDS sequence (wt) from hemagglutinin__InfluenzaA__AFK14713
augaaggcaauacuaguaguucugcuauauacauuugcaaccgcaaaugcagacacauuauguauagguuaucaugcgaacaauucaacagacacuguagacacaguacuagaaaagaauguaacaguaacacacucuguuaaccuucuagaagacaagcauaacgggaaacuaugcaaacuaagagggguagccccauugcauuuggguaaauguaacauugcuggcuggauccuaggaaauccagagugugaaucacucuccacagcaagcucaugguccuacauuguggaaacaucuaguucagacaauggaacguguuacccaggagauuucaucgauuaugaggagcuaagagagcaauugagcucagugucaucauuugaaagguuugagauauuccccaagacaaguucauggcccaaucaugacucgaacaaagguguaacggcagcauguccucaugcuggagcaaaaagcuucuacaaaaauuuaauauggcuaguuaaaaaaggaaauucauacccaaagcucagcaaauccuacauuaaugauaaagggaaagaaguccucgugcuauggggcauucaccauccaucuacuagugcugaccaacaaagucucuaucagaaugcagaugcauauguuuuuguggggacaucaagauacagcaagaaguucaagccggaaauagcaauaagacccaaagugagggaucaagaagggagaaugaacuauuacuggacacuaguagagccgggagacaaaauaacauucgaagcaacuggaaaucuagugguaccgagauaugcauucgcaauggaaagaaaugcuggaucugguauuaucauuucagauacaccaguccacgauugcaauacaacuugucagacacccaagggugcuguaaacaccagccucccauuucagaauauacauccgaucacaauuggaaaauguccaaaauauguaaaaagcacaaaauugagacuggccacaggauugaggaaugucccgucuauucaaucuagaggccuauuuggggccauugccgguuucauugaagggggguggacagggaugguagauggaugguacgguuaucaccaucaaaaugagcaggggucaggauaugcagccgaccugaagagcacacagaaugccauugacgagauuacuaacaaaguaaauucuguuauugaaaagaugaauacacaguucacagcaguagguaaagaguucaaccaccuggaaaaaagaauagagaauuuaaauaaaaaaguugaugaugguuuccuggacauuuggacuuacaaugccgaacuguugguucuauuggaaaaugaaagaacuuuggacuaccacgauucaaaugugaagaacuuauaugaaaagguaagaagccaguuaaaaaacaacgccaaggaaauuggaaacggcugcuuugaauuuuaccacaaaugcgauaacacgugcauggaaagugucaaaaaugggacuuaugacuacccaaaauacucagaggaagcaaaauuaaacagagaagaaauagaugggguaaagcuggaaucaacaaggauuuaccagauuuuggcgaucuauucaacugucgccaguucauugguacugguagucucccugggggcaaucaguuucuggaugugcucuaaugggucucuacaguguagaauauguauuuaa

SEQ ID NO: 40999 - RNA, 1701 nt, Artificial Sequence; identical to SEQ ID NO: 39190
  derived and/or modified CDS sequence (wt) from hemagglutinin__InfluenzaA__AFK14722

SEQ ID NO: 41000 - RNA, 1701 nt, Artificial Sequence
  derived and/or modified CDS sequence (wt) from hemagglutinin__InfluenzaA__AFK14731
augaaggcaauacuaguaguucugcuauauacauuugcaaccgcaaaugcagacacauuauguauagguuaucaugcgaacaauucaacagacacuguagacacaguacuagaaaagaauguaacaguaacacacucuguuaaccuucuagaagacaagcauaacgggaaacuaugcaaacuaagagggguagccccauugcauuuggguaaauguaacauugcuggcuggauccuaggaaauccagagugugaaucacucuccacagcaagcucaugguccuacauuguggaaacaucuaguucagacaauggaacguguuacccaggagauuucaucgauuaugaagagcuaagaaagcaauugagcucagugucaucauuugaaaggguugagauauuccccaagacaaguucauggcccaaucaugacucgaacaaagguguaacggcagcauguccucaugcuggagcaaaaagcuucuacaaaaauuuaauauggcuaguuaaaaaaggaaauucauacccaaagcucagcaaauccuacauuaaugauaaagggaaagaaguccucgugcuauggggcauucaccauccaucuacuagugcugaccaacaaagucucuaucagaaugcagaugcauauguuuuuguggggacaucaagauacagcaagaaguucaagccggaaauagcaauaagacccaaagugagggaucaagaagggagaaugaacuauuacuggacacuaguagagccgggagacaaaauaacauucgaagcaacuggaaaucuagugguaccgagauaugcauucgcaauggaaagaaaugcuggaucugguauuaucauuucagauacaccaguccacgauugcaauacaacuugucagacacccaagggugcuguaaacaccagccucccauuucagaauauacauccgaucacaauuggaaaauguccaaaauauguaaaaagcacaaaauugagacuggccacaggauugaggaaugucccgucuauucaaucuagaggccuauuuggggccauugccgguuucauugaagggggguggacagggaugguagauggaugguacgguuaucaccaucaaaaugagcaggggucaggauaugcagccgaccugaagagcacacagaaugccauugacgagauuacuaacaaaguaaauucuguuauugaaaagaugaauacacaguucacagcaguagguaaagaguucaaccaccuggaaaaaagaauagagaauuuaaauaaaaaaguugaugaugguuuccuggacauuuggacuuacaaugccgaacuguugguucuauuggaaaaugaaagaacuuuggacuaccacgauucaaaugugaagaacuuauaugaaaagguaagaagccaguuaaaaaacaaugccaaggaaauuggaaacggcugcuuugaauuuuaccacaaaugcgauaacacgugcauggaaagugucaaaaaugggacuuaugacuacccaaaauacucagaggaagcaaaauuaaacagagaagaaauagaugggguaaagcuggaaucaacaaggauuuaccagauuuuggcgaucuauucaacugucgccaguucauugguacugguagucucccugggggcaaucaguuucuggaugugcucuaaugggucucuacaguguagaauauguauuuaa

SEQ ID NO: 41001 - RNA, 1701 nt, Artificial Sequence; identical to SEQ ID NO: 39190
  derived and/or modified CDS sequence (wt) from hemagglutinin__InfluenzaA__AFK14740

SEQ ID NO: 41002 - RNA, 1701 nt, Artificial Sequence; identical to SEQ ID NO: 39190
  derived and/or modified CDS sequence (wt) from hemagglutinin__InfluenzaA__AFK14749

SEQ ID NO: 41003 - RNA, 1701 nt, Artificial Sequence
  derived and/or modified CDS sequence (wt) from hemagglutinin__InfluenzaA__AFK14756
augaaggcaauacuaguaguucugcuauauacauuugcaaccgcaaaugcagacacauuauguauagguuaucaugcgaacaauucaacagacacuguagacacaguacuagaaaagaauguaacaguaacacacucuguuaaccuucuagaagacaagcauaacgggaaacuaugcaaacuaagagggguagccccauugcauuuggguaaauguaacauugcuggcuggauccuaggaaauccagagugugaaucacucuccacagcaagcucaugguccuacauuguggaaacaucuaguucagacaauggaacguguuacccaggagauuucaucgauuaugaggagcuaagagagcaauugagcucagugucaucauuugaaagguuugagauauuccccaagacaaguucauggcccaaucaugacucgaacaaagguguaacggcagcauguccucaugcuggagcaaaaagcuucuacaaaaauuuaauauggcuaguuaaaaaaggaaauucauacccaaagcucagcaaauccuacauuaaugauaaagggaaagaaguccucgugcuauggggcauucaccauccaucuacuagugcugaccaacaaagucucuaucagaaugcagaugcauauguuuuuguggggacaucaagauacagcaagaaguucaagccggaaauagcaauaagacccaaagugagggaucaagaagggagaaugaacuauuacuggacacuaguagagccgggagacaaaauaacauucgaagcaacuggaaaucuagugguaccgagauaugcauucgcaauggaaagaaaugcuggaucugguauuaucauuucagauacaccaguccacgauugcaauacaacuugucagacacccaagggugcuguaaacaccagccucccauuucagaauauacauccgaucacaauuggaaaauguccaaaauauguaaaaagcacaaaauugagacuggccacaggauugaggaaugucccgucuauucaaucuagaggccuauuuggggccauugccgguuucauugaagggggguggacagggaugguagauggaugguacgguuaucaccaucaaaaugagcaggggucaggauaugcagccgaccugaagagcacacagaaugccauugacgagauuacuaacaaaguaaauucuguuauugaaaagaugaauacacaguucacagcaguagguaaagaguucaaccaccuggaaaaaagaauagagaauuuaaauaaaaaaguugaugaugguuuccuggacauuuggacuuacaaugccgaacuguugguucuauuggaaaaugaaagaacuuuggacuaccacgauucaaaugugaagaacuuauaugagaagguaagaagccaguuaaaaaacaaugccaaggaaauuggaaacggcugcuuugaauuuuaccacaaaugcgauaacacgugcauggaaagugucaaaaaugggacuuaugacuacccaaaauacucagaggaagcaaaauuaaacagagaagaaauagaugggguaaagcuggaaucaacaaggauuuaccagauuuuggcgaucuauucaacugucgccaguucauugguacugguagucucccugggggcaaucaguuucuggaugugcucuaaugggucucuacaguguagaauauguauuuaa

SEQ ID NO: 41004 - RNA, 1701 nt, Artificial Sequence; identical to SEQ ID NO: 39190
  derived and/or modified CDS sequence (wt) from hemagglutinin__InfluenzaA__AFK14764

SEQ ID NO: 41005 - RNA, 1701 nt, Artificial Sequence
  derived and/or modified CDS sequence (wt) from hemagglutinin__InfluenzaA__AFK14779
augaaggcaauacuaguaguucugcuauauacauuugcaaccgcaaaugcagacacauuauguauagguuaucaugcgaacaauucaacagacacuguagacacaguacuagaaaagaauguaacaguaacacacucuguuaaccuucuagaagacaagcauaacgggaaacuaugcaaacuaggagggguagccccauugcauuuggguaaauguaacauugcuggcuggauccugggaaauccagagugugaaucacucuccacagcaagcucaugguccuacauuguggaaacaucuaguucagacaauggaacguguuacccaggaaauuucaucgauuaugaggagcuaagagagcaauugagcucagugucaucauuugaaagguuugagauauuccccaagacaaguucauggcccaaucaugacucgaacaaagguguaacggcagcauguccucaugcuggagcaaaaagcuucuacaaaaauuuaauauggcuaguuaaaaaaggaaauucauacccaaagcucagcaaauccuacauuaaugauaaagggaaagaaguccuugugcuauggggcauucaccauccaucuacuagugcugaccaacaaagucucuaucagaaugcagaugcauauguuuuuguggggacaucaagauacagcaagaaguucaagccggaaauagcaauaagacccaaagugagggaucaagaagggagaaugaacuauuacuggacacuaguagagccgggagacaaaauaacauucgaagcaacuggaaaucuagugguaccgagauaugcauucgcaauggaaagaaaugcuggaucugguauuaucauuucagauacaccaguccacgauugcaauacaacuugucagacacccaagggugcuauaaacaccagccucccauuucagaauauacauccgaucacaauuggaaaauguccaaaauauguaaaaagcacaaaauugagacuggccacaggauugaggaaugucccgucuauucaaucuagaggccuauuuggggccauugccgguuucauugaagggggguggacagggaugguagauggaugguacgguuaucaccaucaaaaugagcaggggucaggauaugcagccgaccugaagagcacacagaaugccauugacgagauuacuaacaaaguaaauucuguuauugaaaagaugaauacacaguucacagcaguagguaaagaguucaaccaccuggaaaaaagaauagagaauuuaaauaaaaaaguugaugaugguuuccuggacauuuggacuuacaaugccgaacuguugguucuauuggaaaaugaaagaacuuuggacuaccacgauucaaaugugaagaacuuauaugaaaagguaagaagccaguuaaaaaacaaugccaaggaaauuggaaacggcugcuuugaauuuuaccacaaaugcgauaacacgugcauggaaagugucaaaaaugggacuuaugacuacccaaaauacucagaggaagcaaaauuaaacagagaagaaauagaugggguaaagcuggaaucaacaaggauuuaccagauuuuggcgaucuauucaacugucgccaguucauugguacugguagucucccugggggcaaucaguuucuggaugugcucuaaugggucucuacaguguagaauauguauuuaa

SEQ ID NO: 41006 - RNA, 1701 nt, Artificial Sequence
  derived and/or modified CDS sequence (wt) from hemagglutinin__InfluenzaA__AFK14788
augaaggcaauacuaguaguucugcuauauacauuugcaaccgcaaaugcagacacauuauguauagguuaucaugcgaacaauucaacagacacuguagacacaguacuagaaaagaauguaacaguaacacacucuguuaacauucuagaagacaagcauaacgggaaacuaugcaagcuaagagggguagccccauugcauuuggguaaauguaacauugcuggcuggauccugggaaauccagagugugaaucacucuccacagcaagcucaugguccuacauuguggaaacaucuaguucagacaauggaacguguuacccaggagauuucaucgauuaugaggagcuaagagagcaauugagcucagugucaucauuugaaagguuugagauauuccccaagacaaguucauggcccaaucaugacucgaacaaagguguaacggcagcauguccucaugcuggagcaaaaagcuucuacaaaaauuuaauuuggcuaguuaaaaaaggaaauucauacccaaagcuccgcaaauccuacauuaaugauaaagggaaagaaguccucgugcuauggggcauucaccauccaucuacuagugcugaccaacaaagucucuaucagaaugcagaugcauauguuuuuguggggucaucaagauacagcaagaaguucaagccggaaauagcaauuagacccaaagugagggaucaagaagggagaaugaacuauuacuggacacuaguagagccgggagacaaaauaacauucgaagcaacuggaaaucuagugguaccgagauaugcauucgcaauggaaagaaaugcuggaucugguauuaucauuucagauacaccaguccaugauugcaauacaacuugucagacacccaagggugcuauaaacaccagccucccauuucagaauauacauccgaucacaauuggaaaauguccaaaauauguaaaaagcacaaaauugagacuggccacaggauugaggaaugucccgucuauucaaucuagaggccuauuuggggccauugccgguuucauugaagggggguggacagggaugguagauggaugguacgguuaucaccaucaaaaugagcaggggucaggauaugcagccgaccugaagagcacacaaaaugccauugacgagauuacuaacaaaguaaauucuguuauugaaaagaugaauacacaguucacagcaguagguaaagaguucaaccaccuggaaaaaagaauagagaauuuaaauaaaaaaguugaugaugguuuccuggacauuuggacuuacaaugccgaacuguugguucuauuggaaaaugaaagaacuuuggacuaccacgauucaaaugugaagaacuuauaugaaaagguaagaagccagcuaaaaaacaaugccaaggaaguuggaaacggcugcuuugaauuuuaccacaaaugcgauaacacgugcauggaaagugucaaaaaugggacuuaugacuacccaaaauacucagaggaagcaaaauuaaacagagaagaaauagaugggguaaagcuggaaucaacaaggauuuaccagauuuuggcgaucuauucaacugccgccaguucauugguacugguagucucccugggggcaaucaguuucuggaugugcucuaaugggucucuacaguguagaauauguauuuaa

SEQ ID NO: 41007 - RNA, 1701 nt, Artificial Sequence
  derived and/or modified CDS sequence (wt) from hemagglutinin__InfluenzaA__AFK14798
augaaggcaauacuaguaguucugcuauauacauuugcaaccgcaaaugcagacacauuauguauagguuaucaugcgaacaauucaacagacacuguagacacaguacuagaaaagaauguaacaguaacacacucuguuaaccuucuagaagacaagcauaacgggaaacuaugcaaacuaagagggguagccccauugcauuuggguaaauguaacauugcuggcuggauccugggaaauccagagugugaaucacucuccacagcaagcucaugguccuacauuguggaaacaucuaguucagacaauggaacguguuacccaggagauuucaucaauuaugaggagcuuagaaagcaauugagcucagugucaucauuugaaaggguugagauauuccccaagacaaguucauggcccaaucaugacucgaacaaagguguaacggcagcauguccucaugcuggagcaaaaagcuucuacaaaaauuuaauauggcuaguuaaaaaaggaaauucauacccaaagcucagcaaauccuacauuaaugauaaagggaaagaaguccucgugcuauggggcauucaccauccaucuacuagugcugaccaacaaagucucuaucagaaugcagaugcauauguuuuuguggggacaucaagauacagcaagaaguucaagccggaaauagcaauaagacccaaagugagggaucaagaagggagaaugaacuauuacuggacacuaguagagccgggagacaaaauaacauucgaagcaacuggaaaucuagugguaccgagauaugcauucgcaauggaaagaaaugcuggaucugguauuaucaucucagauacaccaguccacgauugcaauacaacuugucagacacccaauggugcuauaaacaccagccucccauuucagaauauacauccgaucacaauuggaaaauguccaaaauauguaaaaagcacaaaauugagacuggccacaggauugaggaaugucccgucuauucaaucuagaggccuauuuggggccauugccgguuucauugaagggggguggacagggaugguagauggaugguacgguuaucaccaucaaaaugagcaggggucaggauaugcagccgaccugaagagcacacagaaugccauugacaagauuacuaacaaaguaaauucuguuauugaaaagaugaauacacaguucacagcaguagguaaagaguucaaccaccuggaaaaaagaauagagaauuuaaacaaaaaaguugaugaugguuuccuggacauuuggacuuacaaugccgaacuguugguucuauuggaaaaugaaagaacuuuggacuaccacgauucaaaugugaagaacuuauaugaaaagguaagaagccaguuaaaaaacaaugccaaggaaauuggaaacggcugcuuugaauuuuaccacaaaugcgauaacacgugcauggaaagugucaaaaaugggacuuaugacuacccaaaauacucagaggaagcaaaauuaaacagagaagaaauagaugggguaaagcuggaaucaacaaggauuuaccagauuuuggcgaucuauucaacugucgccaguucauugguacugguagucucccugggggcaaucaguuucuggaugugcucuaaugggucucuacaauguagaauauguauuuaa

SEQ ID NO: 41008 - RNA, 1701 nt, Artificial Sequence
  derived and/or modified CDS sequence (wt) from hemagglutinin__InfluenzaA__AFK14814
augaaggcaauacuaguaguucugcuauauacauuugcaaccgcaaaugcagacacauuauguauagguuaucaugcgaacaauucaacagacacuguagacacaguacuagaaaagaauguaacaguaacacacucuguuaaccuucuagaagacaagcauaacgggaaacuaugcaaacuaagagggguagccccauugcauuuggguaaauguaacauugcuggcuggauccugggaaauccagagugugaaucacucuccacagcaagcucaugguccuacauuguggaaacaucuaguucagacaauggaacguguuacccaggagauuucaucgauuaugaggagcuaagggagcaauugagcucagugucaucauaugaaagguaugagauauuccccaagacaaguucauggcccaaucaugacucgaacaaagguguaacggcagcauguccucaugcgggagcaaaaagcuucuacaaaaauuuaauauggcuaguuaaaaaaggaaauucauacccaaagcucagcaaauccuacauuaaugauaaagggaaagaaguccucgugcuauggggcauucaccauccaucuacuagugcugaccaacaaagucucuaucagaaugcagaugcauauguuuuuguggggacaucaagauacagcaagaaguucaagccggaaauagcaauaagacccaaagugagggaacaagaagggagaaugaacuauuacuggacacuaguagagccgggagacaaaauaacauucgaagcaacuggaaaucuagugguaccgagauaugcauucgcaauggaaagaaaugcuggaucugguauuaucauuucagauacaccaguccacgauugcaauacaacuugucagacacccaagggugcuauaaacaccagccucccauuucagaauauacauccgaucacaauuggaaaauguccaaaauauguaaaaagcacaaaauugagacuggccacaggauugaggaaugucccgucuauucaaucuagaggccuauuuggggccauugccgguuucauugaagggggguggacagggaugguagauggaugguacgguuaucaccaucaaaaugagcagggaucaggauaugcagccgaccugaagagcacacagaaugccauugacgagauuacuaacaaaguaaauucuguuauugaaaagaugaauacacaguucacagcaguagguaaagaguucaaccaccuggaaaaaagaauagagaauuuaaauaaaaaaguugaugaugguuuccuggacauuuggacuuacaaugccgaacuguugguucuauuggaaaaugaaagaacuuuggacuaccacgauucaaaugugaagaacuuauaugaaaagguaagaagccaguuaaaaaacaaugccaaggaaauuggaaacggcugcuuugaauuuuaccacaaaugcgauaacacgugcauggaaagugucaaaaaugggacuuaugacuacccaaaauacucagaggaagcaaaauuaaacagagaagaaauagaugggguaaagcuggaaucaacaaggauuuaccagauuuuggcgaucuauucaacugucgccaguucauugguacugguagucucccugggggcaaucaguuucuggaugugcucuaaugggucucuacaguguagaauauguauuuaa

SEQ ID NO: 41009 - RNA, 1701 nt, Artificial Sequence
  derived and/or modified CDS sequence (wt) from hemagglutinin__InfluenzaA__AFK14831
augaaggcaauacuaguaguucugcuauauacauuugcaaccgcaaaugcagacacauuauguauagguuaucaugcgaacaauucaacagacacuguagacacaguacuagaaaagaauguaacaguaacacacucuguuaaccuucuagaagacaagcauaacgggaaacuaugcaaacuaagagggguagccccauugcauuuggguaaauguaacauugcuggcuggauccugggaaauccagagugugaaucacucuccacagcaagcucaugguccuacauuguggaaacaucuaguucagacaauggaacauguuacccaggagauuucagcgauuaugaggagcuaagagagcaauugagcucagugucaucauuugaaagguuugagauauuccccaagacaaguucauggcccaaucaugacucgaacaaagguguaacggcagcauguccucaugcuggagcaaaaagcuucuacaaaaauuuaauauggcuaguuaaaaaaggaaauucauacccaaagcucagcaaauccuacauuaaugauaaaggaaaagaaguccucgugcuauggggcauucaccauccaucuacuagugcugaccaacaaagucucuaucagaaugcagaugcauauguuuuuguggggacaucaagauacagcaagaaguucaagccggaaauagcaauaagacccaaagugagggaucaagaagggagaaugaacuauuacuggacacuaguagagccgggagacaaaauaacauucgaagcaacuggaaaucuagugguaccgagauaugcauucgcaauggaaagaaaugcuggaucugguauuaucauuucagauacaccaguccacgauugcaauacaacuugucagacacccaagggugcuauaaacaccagccucccauuucagaauauacauccgaucacaauuggaaaauguccaaaauauguaaaaagcacaaaauugagacuggccacaggauugaggaaugucccgucuauucaaucuagaggccuauuuggggccauugccgguuucauugaagggggguggacagggaugguagauggaugguacgguuaucaccaucaaaaugagcaggggucaggauaugcagccgaccugaagagcacacagaaugccauugacgagauuacuaacaaaguaaauucuguuauugaaaagaugaauacacaguucacagcaguagguaaagaguucaaccaccuggaaaaaagaauagagaauuuaaauaaaaaaguugaugaugguuuccuggacauuuggacuuacaaugccgaacuguugguucuauuggaaaaugaaagaacuuuggacuaccacgauucaaaugugaagaacuuauaugaaaagguaagaagccaguuaaaaaacaaugccaaggaaauuggaaacggcugcuuugaauuuuaccacaaaugcgauaacacgugcauggaaagugucaaaaaugggacuuaugacuacccaaaauacucagaggaagcaaaauuaaacagagaagaaauagaugggguaaagcuggaaucaacaaggauuuaccagauuuuggcgaucuauucaacugucgccaguucauugguacugguagucucccugggggcaaucaguuucuggaugugcucuaaugggucucuacaguguagaauauguauuuaa

SEQ ID NO: 41010 - RNA, 1701 nt, Artificial Sequence; identical to SEQ ID NO: 40990
  derived and/or modified CDS sequence (wt) from hemagglutinin__InfluenzaA__AFK14839

SEQ ID NO: 41011 - RNA, 1701 nt, Artificial Sequence
  derived and/or modified CDS sequence (wt) from hemagglutinin__InfluenzaA__AFK14847
augaaggcaauacuaguaguucugcuauauacauuugcaaccgcaaaugcagacacauuauguauagguuaucaugcgaacaauucaacagacacuguagacacaguacuagaaaagaauguaacaguaacacacucuguuaaccuucuagaagacaagcauaacgggaaacuaugcaaacuaagagggguagccccauugcauuuggguaaauguaacauugcuggcuggauccugggaaauccagagugugaaucacucuccacagcaagcucaugguccuacauuguggaaacaucuaguucagacaauggaacguguuacccaggagauuucaucgauuaugaggagcuaagagagcaauugagcucagcgucaucauuugaaagguaugagauauuccccaagacaaguucauggcccaaucaugacucgaacaaagguguaacggcagcauguccucaugcuggagcaaaaagcuucuacaaaaauuuaauauggcuaguuaaaaaaggaaauucauacccaaagcucagcaaauccuacauuaaugauaaagggaaagaaguccucgugcuauggggcauucaccauccaucuacuagugcugaccaacaaagucucuaucagaaugcagaugcauauguuuuuguggggacaucaagauacagcaagaaguucaagccggaaauagcaauaagacccaaagugagggaucaagaagggagaaugaacuauuacuggacacuaguagagccgggagacaaaauaacauucgaagcaacuggaaaucuagugguaccgagauaugcauucgcaauggaaagaaaugcuggaucugguauuaucauuucagauacaccaguccacgauugcaauacaacuugucagacacccaagggugcuauaaacaccagccucccauuucagaauauacauccgaucacaauuggaaaauguccaaaauauguaaaaagcacaaaauugagacuggccacaggauugaggaaugucccgucuauucaaucuagaggccuauuuggggccauugccgguuucauugaagggggguggacagggaugguagauggaugguacgguuaucaccaucaaaaugagcaggggucaggauaugcagccgaccugaagagcacacagaaugccauugacgagauuacuaacaaaguaaauucuguuauugaaaagaugaacacacaguucacagcaguagguaaagaguucaaccaccuggaaaaaagaauagagaauuuaaauaaaaaaguugaugaugguuuccuggacauuuggacuuacaaugccgaacuguugguucuauuggaaaaugaaagaacuuuggacuaccacgauucaaaugugaagaacuuauaugaaaagguaagaagccaguuaaaaaacaaugccaaggaaauuggaaacggcugcuuugaauuuuaccacaaaugcgauaacacgugcauggaaagugucaaaaaugggacuuaugacuacccaaaauacucagaggaagcaaaauuaaacagagaagaaauagaugggguaaagcuggaaucaacaaggauuuaccagauuuuggcgaucuauucaacugucgccaguucauugguacugguagucucccugggggcaaucaguuucuggaugugcucuaaugggucucuacaguguagaauauguauuuaa

SEQ ID NO: 41012 - RNA, 1701 nt, Artificial Sequence; identical to SEQ ID NO: 39190
  derived and/or modified CDS sequence (wt) from hemagglutinin__InfluenzaA__AFK14868

SEQ ID NO: 41013 - RNA, 1701 nt, Artificial Sequence; identical to SEQ ID NO: 35845
  derived and/or modified CDS sequence (wt) from hemagglutinin__InfluenzaA__AFK14884

SEQ ID NO: 41014 - RNA, 1701 nt, Artificial Sequence; identical to SEQ ID NO: 35845
  derived and/or modified CDS sequence (wt) from hemagglutinin__InfluenzaA__AFK14892

SEQ ID NO: 41015 - RNA, 1701 nt, Artificial Sequence; identical to SEQ ID NO: 35845
  derived and/or modified CDS sequence (wt) from hemagglutinin__InfluenzaA__AFK14901

SEQ ID NO: 41016 - RNA, 1701 nt, Artificial Sequence; identical to SEQ ID NO: 35845
  derived and/or modified CDS sequence (wt) from hemagglutinin__InfluenzaA__AFK14910

SEQ ID NO: 41017 - RNA, 1701 nt, Artificial Sequence
  derived and/or modified CDS sequence (wt) from hemagglutinin__InfluenzaA__AFK14919
augaaggcaauacuaguaguucugcuauauacauuugcaaccgcaaaugcagacacauuauguauagguuaucaugcgaacaauucaacagacacuguagacacaguacuagaaaagaauguaacaguaacacacucuguuaaccuucuagaagacaagcauaacgggaaacuaugcaaacuaagagggguagccccauugcauuuggguaaauguaacauugcuggcuggauccugggaaauccagagugugaaucacucuccacagcaagcucaugguccuacauuguggaaacaucuaguucagacaauggaacguguuacccaggagauuucaucgauuaugaggagcuaagagagcaauugagcucagugucaucauuugaaagguuugagauauuccccaagacaaguucauggcccaaucaugacucgaacaaagguguaacggcagcauguccucaugcuggagcaaaaagcuucuacaaaaauuuaauauggcuaguuaaaaaagggaauucauacccaaagcucagcaaauccuacauuaaugauaaagggaaagaaguccucgugcuauggggcauucaccauccaucuacuagugcugaccaacaaagucucuaucagaaugcagaugcauauguuuuuguggggacaucaagauacagcaagaaguucaagccggaaauagcaauaagacccaaagugagggaucaagaagggagaaugaacuauuacuggacacuaguagagccgggagacaaaauaacauucgaagcaacuggaaaucuagugguaccgagauaugcauucgcaauggaaagaaaugcuggaucugguauuaucauuucagauacaccaguccacgauugcaauacaacuugucagacacccaagggugcuauaaacaccagccucccauuucagaauauacauccgaucacaauuggaaaauguccaaaauauguaaaaagcacaaaauugagacuggccacaggauugaggaaugucccgucuauucaaucuagaggccuauuuggggccauugccgguuucauugaagggggguggacagggaugguagauggaugguacgguuaucaccaucaaaaugagcaggggucaggauaugcagccgaccugaagagcacacagaaugccauugaugagauuacuaacaaaguaaauucuguuauugaaaagaugaauacacaguucacagcaguagguaaagaguucaaccaccuggaaaaaagaauagagaauuuaaauaaaaaaguugaugaugguuuccuggacauuuggacuuacaaugccgaacuguugguucuauuggaaaaugaaagaacuuuggacuaccacgauucaaaugugaagaacuuauaugaaaagguaagaagccaguuaaaaaacaaugccaaggaaauuggaaacggcugcuuugaauuuuaccacaaaugcgauaacacgugcauggaaagugucaaaaaugggacuuaugacuacccaaaauacucagaggaagcaaaauuaaacagagaagaaauagaugggguaaagcuggaaucaacaaggauuuaccagauuuuggcgaucuauucaacugucgccaguucauugguacugguagucucccugggggcaaucaguuucuggaugugcucuaaugggucucuacaguguagaauauguauuuaa

SEQ ID NO: 41018 - RNA, 1701 nt, Artificial Sequence; identical to SEQ ID NO: 41017
  derived and/or modified CDS sequence (wt) from hemagglutinin__InfluenzaA__AFK14929

SEQ ID NO: 41019 - RNA, 1701 nt, Artificial Sequence
  derived and/or modified CDS sequence (wt) from hemagglutinin__InfluenzaA__AFK25599
augaaggcaauacuaguaguucugcuauauacauuugcaaccgcaaaugcagacacauuauguauagguuaccaugcgaacaauucaacagacacuguagacacaguacuagaaaagaauguaacaguaacacacucuguuaaucuucuagaagacaagcauaacgggaaacuaugcaaacuaagagggguagccccauugcauuuggguaaauguaacauugcuggcuggauccugggaaauccagagugugaaacacucuccacagcaagcucaugguccuacauuguggaaacaucuaguucagacaauggaacguguuacccaggagauuucaucgauuaugaggagcuaagagagcaauugagcucagugucaucauuugaaagguuugagauauuccccaagacaaguucauggcccaaucaugacucgaacaaaggcguaacggcagcauguccucaugcuggagcaaaaggcuucuacaaaaauuuaauauggcuaguuaaaaaaggaaauucauacccaaagcucagcaaauccuacauuaaugauaaagggaaagaaguccucgugcuauggggcauucaccauccaucuacuacugcugaccaacaaagucucuaucagaaugcagauacauauguuuuuguggggacaucaagauacagcaagaaguucaagccggaaauagcaauaagacccaaagugagggaucaagaagggagaaugaacuauuacuggacacuaguagagccgggagacaaaauaacauucgaagcaacuggaaaucuagugguaccgagauaugcauucgcaauggaaagagaugcuggaucugguauuaucauuucagauacaccaguccacgauugcaauacaacuugucagacacccaagggugcuauaaacaccagccucccauuucaaaauauacauccgaucacaauuggaaaauguccaaaauauguaaaaagcacaaaauugagacuggccacaggauugaggaaugucccgucuauucaaucuagaggccuauuuggggccauugccggcuucauugaagggggguggacagggaugguagauggaugguacgguuaucaccaucaaaaugagcaggggucaggauaugcagccgaccugaagagcacacagaaugccauugacaagauuacuaacaaaguaaauucuguuauugaaaaaaugaauacacaguucacagcaguagguaaagaguucaaccaccuggaaaaaagaauagagaauuuaaauaaaaaaguugaugauggguuccuggacauuuggacuuacaaugccgaacuguugguucuauuggaaaaugaaagaacuuuggacuaccacgauucaaaugugaagaacuuauaugaaaagguaagaaaccaguuaaaaaacaaugccaaggaaauuggaaauggcugcuuugaauuuuaccacaaaugcgauaacacguguauggaaagugucaaaaaugggacuuaugacuacccaaaauacucagaggaagcaaaauuaaacagagaagaaauagaugggguaaagcuggaaucaacaaggauuuaccagauuuuggcgaucuauucaacugccgccaguucauugguacugguagucucccugggggcaaucaguuuuuggaugugcucuaaugggucucuacaguguagaauauguauuuaa

SEQ ID NO: 41020 - RNA, 1701 nt, Artificial Sequence
  derived and/or modified CDS sequence (wt) from hemagglutinin__InfluenzaA__AFK25601
augaaggcaauacuaguaguucugcuauauacauuugcaaccgcaaaugcagacacauuauguauagguuaccaugcgaacaauucaacagacacuguagacacaguacuagaaaagaauguaacaguaacacacucuguuaaucuucuagaagacaagcauaacgggaaacuaugcaaacuaagagggguagccccauugcauuuggguaaauguaacauugcuggcuggauccugggaaauccagaguguguaacacucuccacagcaagcucaugguccuacauuguggaaacaucuaguucagacaauggaacguguuacccaggagauuucaucgauuaugaggagcuaagagagcaauugagcucagugucaucauuugaaagguuugagauauuccccaagacaaguucauggcccaaucaugacucgaacaaagguguaacggcagcauguccucaugcuggagcaaaaggcuucuacaaaaauuuaauauggcuaguuaaaaaaggaaauucauacccaaagcucagcaaauccuacauuaaugauaaagggaaagaaguccucgugcuauggggcauucaccauccaucuacuacugcugaccaacaaagucucuaucagaaugcagauacauauguuuuuguggggacaucaagauacagcaagaaguucaagccggaaauagcaauaagacccaaagugagggaucaagaagggagaaugaacuauuacuggacacuaguagagccgggagacaaaauaacauucgaagcaacuggaaaucuagugguaccgagauaugcauucgcaauggaaagagaugcuggaucugguauuaucauuucagauacaccaguccacgauugcaauacaacuugucagacacccaagggugcuauaaacaccagccucccauuucagaauauacauccgaucacaauuggaaaauguccaaaauauguaaaaagcacaaaauugagacuggccacaggauugaggaaugucccgucuauucaaucuagaggccuauuuggggccauugccggcuucauugaagggggguggacagggaugguggauggaugguacgguuaucaccaucaaaaugagcaggggucaggauaugcagccgaccugaagagcacacagaaugccauugacaagauuacuaacaaaguaaauucuguuauugaaaaaaugaauacacaguucacagcaguagguaaagaguucaaccaccuggaaaaaagaauagagaauuuaaauaaaaaaguugaugauggguuccuggacauuuggacuuacaaugccgaacuguugguucuauuggaaaaugaaagaacuuuggacuaccacgauucaaaugugaagaacuuauaugaaaagguaagaaaccaguuaaaaaacaaugccaaggaaauuggaaauggcugcuuugaauuuuaccacaaaugcgauaacacguguauggaaagugucaaaaaugggacuuaugacuacccaaaauacucagaggaagcaaaauuaaacagagaagaaauagaugggguaaagcuggaaucaacaaggauuuaccagauuuuggcgaucuauucaacugccgccaguucauugguacugguagucucccugggggcaaucaguuuuuggaugugcucuaaugggucucuacaguguagaauauguauuuaa

SEQ ID NO: 41021 - RNA, 1701 nt, Artificial Sequence
  derived and/or modified CDS sequence (wt) from hemagglutinin__InfluenzaA__AFK25603
augaaggcaauacuaguaguucugcuauauacauuugcaaccgcaaaugcagacacauuauguauagguuaccaugcgaacaauucaacagacacuguagacacaguacuagaaaagaauguaacaguaacacacucuguuaaucuucuagaagacaagcauaacgggaaacuaugcaaacuaagagggguagccccauugcauuuggguaaauguaacauugcuggcuggauccugggaaauccagagugugaaacacucuccacagcaagcucaugguccuacauuguggaaacaucuaguucagacaauggaacguguuacccaggagauuucaucgauuaugaggagcuaagagagcaauugagcucagugucaucauuugaaagguuugagauauuccccaagacaaguucauggcccaaucaugacucgaacaaagguguaacggcagcauguccucaugcuggagcaaaaggcuucuacaaaaauuuaauauggcuaguuaaaaaaggaaauucauacccaaagcucagcaaauccuacauuaaugauaaagggaaagaaguccucgugcuauggggcauucaccauccaucuacuacugcugaccaacaaagucucuaucagaaugcagauacauauguuuuuguggggacaucaagauacagcaagaaguucaagccggaaauagcaauaagacccaaagugagggaucaagaagggagaaugaacuauuacuggacacuaguagagccgggagacaaaauaacauucgaagcaacuggaaaucuagugguaccgagauaugcauucgcaauggaaagagaugcuggaucugguauuaucauuucagauacaccaguccacgauugcaauacaacuugucagacacccaagggugcuauaaacaccagccucccauuucagaauauacauccgaucacaauuggaaaauguccaaaauauguaaaaagcacaaaauugagacuggccacaggauugaggaaugucccgucuauucaaucuagaggccuauuuggggccauugccggcuucauugaagggggguggacagggaugguagauggaugguacgguuaucaccaucaaaaugagcaggggucaggauaugcagccgaccugaagagcacucagaaugccauugacaagauuacuaacaaaguaaauucuguuauugaaaaaaugaauacacaguucacagcaguagguaaagaguucaaccaccuggaaaaaagaauagagaauuuaaauaaaaaaguugaugauggguuccuggacauuuggacuuacaaugccgaacuguugguucuauuggaaaaugaaagaacuuuggacuaccacgauucaaaugugaagaacuuauaugaaaagguaagaaaccaguuaaaaaacaaugccaaggaaauuggaaauggcugcuuugaauuuuaccacaaaugcgauaacacguguauggaaagugucaaaaaugggacuuaugacuacccaaaauacucagaggaagcaaaauuaaacagagaagaaauagaugggguaaagcuggaaucaacaaggauuuaccagauuuuggcgaucuauucaacugccgccaguucauugguacugguagucucccugggggcaaucaguuuuuggaugugcucuaaugggucucuacaguguagaauauguauuuaa

SEQ ID NO: 41022 - RNA, 1701 nt, Artificial Sequence
  derived and/or modified CDS sequence (wt) from hemagglutinin__InfluenzaA__AFK25605
augaaggcaauacuaguaguucugcuauauacauuugcaaccgcaaaugcagacacauuauguauagguuaccaugcgaacaauucaacagacacuguagacacaguacuagaaaagaauguaacaguaacacacucuguuaaucuucuagaagacaagcauaacgggaaacuaugcaaacuaagagggguagccccauugcauuuggguaaauguaacauugcuggcuggauccugggaaauccagagugugaaacacucuccacagcaagcucaugguccuacauuguggaaacaucuaguucagacaauggaacguguuacccaggagauuucaucgauuaugaggagcuaagagagcaauugagcucagugucaucauuugaaagguuugagauauuccccaagacaaguucauggcccaaucaugacucgaacaaagguguaacggcagcauguccucaugcuggagcaaaaggcuucuacaaaaauuuaauauggcuaguuaaaaaaggaaauucauacccaaagcucagcaaauccuacauuaaugauaaagggaaagaaguccucgugcuauggggcauucaccauccaucuacuacugcugaccaacaaagucucuaucagaaugcagauacauauguuuuuguggggacaucaagauacagcaagaaguucaagccggaaauagcaauaagacccaaagugagggaucaagaagggagaaugaacuauuacuggacacuaguagagccgggagacaaaauaacauucgaagcaacuggaaaucuagugguaccgagauaugcauucgcaauggaaagagaugcuggaucugguauuaucauuucagauacaccaguccacgauugcaauacaacuugucagacacccaagggugcuauaaacaccagccucccauuucagaauauacauccgaucacaauuggaaaauguccaaaauauguaagaagcacaaaauugagacuggccacaggauugaggaaugucccgucuauucaaucuagaggccuauuuggggccauugccggcuucauugaagggggguggacagggaugguggauggaugguacgguuaucaccaucaaaaugagcaggggucaggauaugcagccgaccugaagagcacacagaaugccauugacaagauuacuaacaaaguaaauucuguuauugaaaaaaugaauacacaguucacagcaguagguaaagaguucaaccaccuggaaaaaagaauagagaauuuaaauaaaaaaguugaugauggguuccuggacauuuggacuuacaaugccgaacuguugguucuauuggaaaaugaaagaacuuuggacuaccacgauucaaaugugaagaacuuauaugaaaagguaagaaaccaguuaaaaaacaaugccaaggaaauuggaaauggcugcuuugaauuuuaccacaaaugcgauaacacguguauggaaagugucaaaaaugggacuuaugacuacccaaaauacucagaggaagcaaaauuaaacagagaagaaauagaugggguaaagcuggaaucaacaaggauuuaccagauuuuggcgauuuauucaacugccgccaguucauugguacugguagucucccugggggcaaucaguuuuuggaugugcucuaaugggucucuacaguguagaauauguauuuaa

SEQ ID NO: 41023 - RNA, 1701 nt, Artificial Sequence; identical to SEQ ID NO: 40426
  derived and/or modified CDS sequence (wt) from hemagglutinin__InfluenzaA__AFK74526

SEQ ID NO: 41024 - RNA, 1701 nt, Artificial Sequence; identical to SEQ ID NO: 34681
  derived and/or modified CDS sequence (wt) from hemagglutinin__InfluenzaA__AFK74534

SEQ ID NO: 41025 - RNA, 1701 nt, Artificial Sequence; identical to SEQ ID NO: 40437
  derived and/or modified CDS sequence (wt) from hemagglutinin__InfluenzaA__AFK74544

SEQ ID NO: 41026 - RNA, 1701 nt, Artificial Sequence; identical to SEQ ID NO: 36261
  derived and/or modified CDS sequence (wt) from hemagglutinin__InfluenzaA__AFK74554

SEQ ID NO: 41027 - RNA, 1701 nt, Artificial Sequence; identical to SEQ ID NO: 36785
  derived and/or modified CDS sequence (wt) from hemagglutinin__InfluenzaA__AFK74564

SEQ ID NO: 41028 - RNA, 1701 nt, Artificial Sequence; identical to SEQ ID NO: 39118
  derived and/or modified CDS sequence (wt) from hemagglutinin__InfluenzaA__AFK74575

SEQ ID NO: 41029 - RNA, 1701 nt, Artificial Sequence; identical to SEQ ID NO: 40425
  derived and/or modified CDS sequence (wt) from hemagglutinin__InfluenzaA__AFK74585

SEQ ID NO: 41030 - RNA, 1701 nt, Artificial Sequence
  derived and/or modified CDS sequence (wt) from hemagglutinin__InfluenzaA__AFK74595
augaaggcaauacuaguaguucugcuauauacauuugcaaccgcaaaugcagacacauuauguauagguuaucaugcgaacaauucaacagacacuguagacacaguacuagaaaagaauguaacaguaacacacucuguuaaccuucuagaagacaagcauaacgggaaacuaugcaaacuaagagggguagccccauugcauuuggguaaauguaacauugcuggcuggauccugggaaauccagagugugaaucacucuccacagcaagcucaugguccuacauuguggaaacaucuaguucagacaauggaacguguuacccaggagauuucaucgauuaugaggagcuaagagagcaauugagcucagugucaucauuugaaagguuugagauauuccccaagacaaguucauggcccaaucaugacuugaacaaagguguaacggcagcauguccucaugcuggagcaaaaagcuucuacaaaaauuuaauauggcuaguuaaaaaaggaaauucauacccaaagcucagcaaauccuacauuaaugauaaagggaaagaaguccucgugcuauggggcauucaccauccaucuacuagugcugaccaacaaagucucuaucagaaugcagaugcauauguuuuuguggggacaucaagauacagcaagaaguucaagccggaaauagcaauaagacccaaagugagggaucaagaagggagaaugaacuauuacuggacacuaguagagccgggagacaaaauaacauucgaagcaacuggaaaucuagugguaccgagauaugcauucgcaauggaaagaaaugcuggaucugguauuaucauuucagauacaccaguccacgauugcaauacaacuugucagacacccaagggugcuauaaacaccagccucccauuucagaauauacauccgaucacaauuggaaaauguccaaaauauguaaaaagcacaaaauugagacuggccacaggauugaggaaugucccgucuauucaaucuagaggccuauuuggggccauugccgguuucauugaagggggguggacagggaugguagauggaugguacgguuaucaccaucaaaaugagcaggggucaggauaugcagccgaccugaagagcacacagaaugccauugacgagauuacuaacaaaguaaauucuguuauugaaaagaugaauacacaguucacagcaguagguaaagaguucaaccaccuggaaaaaagaauagagaauuuaaauaaaaagguugaugaugguuuccuggacauuuggacuuacaaugccgaacuguugguucuauuggaaaaugaaagaacuuuggacuaccacgauucaaaugugaagaacuuauaugaaaagguaagaagccaguuaaaaaacaaugccaaggaaauuggaaacggcugcuuugaauuuuaccacaaaugcgauaacacgugcauggaaagugucaaaaaugggacuuaugacuacccaaaauacucagaggaagcaaaauuaaacagagaagaaauagaugggguaaagcuggaaucaacaaggauuuaccagauuuuggcgaucuauucaacugucgccaguucauugguacugguagucucccugggggcaaucaguuucuggaugugcucuaaugggucucuacaguguagaauauguauuuaa

SEQ ID NO: 41031 - RNA, 1701 nt, Artificial Sequence; identical to SEQ ID NO: 35311
  derived and/or modified CDS sequence (wt) from hemagglutinin__InfluenzaA__AFK74605

SEQ ID NO: 41032 - RNA, 1701 nt, Artificial Sequence; identical to SEQ ID NO: 40428
  derived and/or modified CDS sequence (wt) from hemagglutinin__InfluenzaA__AFK74615

SEQ ID NO: 41033 - RNA, 1701 nt, Artificial Sequence; identical to SEQ ID NO: 40428
  derived and/or modified CDS sequence (wt) from hemagglutinin__InfluenzaA__AFK74625

SEQ ID NO: 41034 - RNA, 1701 nt, Artificial Sequence; identical to SEQ ID NO: 36187
  derived and/or modified CDS sequence (wt) from hemagglutinin__InfluenzaA__AFK74635

SEQ ID NO: 41035 - RNA, 1701 nt, Artificial Sequence; identical to SEQ ID NO: 36187
  derived and/or modified CDS sequence (wt) from hemagglutinin__InfluenzaA__AFK74645

SEQ ID NO: 41036 - RNA, 1701 nt, Artificial Sequence; identical to SEQ ID NO: 40433
  derived and/or modified CDS sequence (wt) from hemagglutinin__InfluenzaA__AFK74655

SEQ ID NO: 41037 - RNA, 1701 nt, Artificial Sequence; identical to SEQ ID NO: 40433
  derived and/or modified CDS sequence (wt) from hemagglutinin__InfluenzaA__AFK74665

SEQ ID NO: 41038 - RNA, 1701 nt, Artificial Sequence; identical to SEQ ID NO: 34681
  derived and/or modified CDS sequence (wt) from hemagglutinin__InfluenzaA__AFK74675

SEQ ID NO: 41039 - RNA, 1701 nt, Artificial Sequence; identical to SEQ ID NO: 40437
  derived and/or modified CDS sequence (wt) from hemagglutinin__InfluenzaA__AFK74685

SEQ ID NO: 41040 - RNA, 1701 nt, Artificial Sequence; identical to SEQ ID NO: 39118
  derived and/or modified CDS sequence (wt) from hemagglutinin__InfluenzaA__AFK74695

SEQ ID NO: 41041 - RNA, 1701 nt, Artificial Sequence; identical to SEQ ID NO: 40440
  derived and/or modified CDS sequence (wt) from hemagglutinin__InfluenzaA__AFK74705

SEQ ID NO: 41042 - RNA, 1701 nt, Artificial Sequence; identical to SEQ ID NO: 40441
  derived and/or modified CDS sequence (wt) from hemagglutinin__InfluenzaA__AFK74715

SEQ ID NO: 41043 - RNA, 1701 nt, Artificial Sequence; identical to SEQ ID NO: 35498
  derived and/or modified CDS sequence (wt) from hemagglutinin__InfluenzaA__AFK74725

SEQ ID NO: 41044 - RNA, 1701 nt, Artificial Sequence; identical to SEQ ID NO: 35498
  derived and/or modified CDS sequence (wt) from hemagglutinin__InfluenzaA__AFK74735

SEQ ID NO: 41045 - RNA, 1701 nt, Artificial Sequence; identical to SEQ ID NO: 40444
  derived and/or modified CDS sequence (wt) from hemagglutinin__InfluenzaA__AFK74745

SEQ ID NO: 41046 - RNA, 1701 nt, Artificial Sequence; identical to SEQ ID NO: 35498
  derived and/or modified CDS sequence (wt) from hemagglutinin__InfluenzaA__AFK74755

SEQ ID NO: 41047 - RNA, 1701 nt, Artificial Sequence; identical to SEQ ID NO: 40447
  derived and/or modified CDS sequence (wt) from hemagglutinin__InfluenzaA__AFK74765

SEQ ID NO: 41048 - RNA, 1701 nt, Artificial Sequence; identical to SEQ ID NO: 40437
  derived and/or modified CDS sequence (wt) from hemagglutinin__InfluenzaA__AFK74775

SEQ ID NO: 41049 - RNA, 1701 nt, Artificial Sequence; identical to SEQ ID NO: 36261
  derived and/or modified CDS sequence (wt) from hemagglutinin__InfluenzaA__AFK74785

SEQ ID NO: 41050 - RNA, 1701 nt, Artificial Sequence; identical to SEQ ID NO: 36261
  derived and/or modified CDS sequence (wt) from hemagglutinin__InfluenzaA__AFK74795

SEQ ID NO: 41051 - RNA, 1701 nt, Artificial Sequence; identical to SEQ ID NO: 36261
  derived and/or modified CDS sequence (wt) from hemagglutinin__InfluenzaA__AFK74805

SEQ ID NO: 41052 - RNA, 1701 nt, Artificial Sequence; identical to SEQ ID NO: 36261
  derived and/or modified CDS sequence (wt) from hemagglutinin__InfluenzaA__AFK74815

SEQ ID NO: 41053 - RNA, 1701 nt, Artificial Sequence; identical to SEQ ID NO: 40457
  derived and/or modified CDS sequence (wt) from hemagglutinin__InfluenzaA__AFK74825

SEQ ID NO: 41054 - RNA, 1701 nt, Artificial Sequence; identical to SEQ ID NO: 40465
  derived and/or modified CDS sequence (wt) from hemagglutinin__InfluenzaA__AFK74835

SEQ ID NO: 41055 - RNA, 1701 nt, Artificial Sequence; identical to SEQ ID NO: 40457
  derived and/or modified CDS sequence (wt) from hemagglutinin__InfluenzaA__AFK74845

SEQ ID NO: 41056 - RNA, 1701 nt, Artificial Sequence; identical to SEQ ID NO: 40457
  derived and/or modified CDS sequence (wt) from hemagglutinin__InfluenzaA__AFK74895

SEQ ID NO: 41057 - RNA, 1701 nt, Artificial Sequence; identical to SEQ ID NO: 40457
  derived and/or modified CDS sequence (wt) from hemagglutinin__InfluenzaA__AFK74905

SEQ ID NO: 41058 - RNA, 1701 nt, Artificial Sequence; identical to SEQ ID NO: 40457
  derived and/or modified CDS sequence (wt) from hemagglutinin__InfluenzaA__AFK74915

SEQ ID NO: 41059 - RNA, 1701 nt, Artificial Sequence
  derived and/or modified CDS sequence (wt) from hemagglutinin__InfluenzaA__AFK74925
augaaggcaauacuaguaguucugcuauauacauuugcaaccgcaaaugcagacacauuauguauagguuaucaugcgaacaauucaacagacacuguagacacaguacuagaaaagaauguaacaguaacacacucuguuaaccuucuagaagacaagcauaacgggaaacuaugcaaacuaagagggguagucccauugcauuuggguaaauguaacauugcuggcuggauccugggaaauccagagugugaaucacucuccacagcaagcucaugguccuacauuguggaaacaucuaguucagacaauggaacguguuacccaggagauuucaucgauuaugaggagcuaagagagcaauugagcucagugucaucauuugaaagguuugagauauuccccaagacaaguucauggcccaaucaugacucgaacaaagguguaacggcagcauguccucaugcuggagcaaaaagcuucuacaaaaauuuaauauggcuaguuaaaaaaggaaauucauacccaaagcucagcaaauccuacauuaaugauaaagggaaagaaguccucgugcuauggggcauucaccauccaucuacuagugcugaccaacaaagucucuaucagaaugcagaugcauauguuuuuguggggacaucaagauacagcaagaaguucaagccggaaauagcaauaagacccaaagugagggaucaagaagggagaaugaacuauuacuggacacuaguagagccgggagacaaaauaacauucgaagcaacuggaaaucuagugguaccgagauaugcauucacaauggaaagaaaugcuggaucugguauuaucauuucagauacaccaguccacgauugcaauacaacuugucagacacccaagggugcuauaaacaccagccucccauuucagaauauacauccgaucacaauuggaaaauguccaaaauauguaaaaagcacaaaauugagacuggccacaggauugaggaaugucccgucuauucaaucuagaggccuauuuggggccauugccgguuucauugaagggggguggacagggaugguagauggaugguacgguuaucaccaucaaaaugagcaggggucaggauaugcagccgaccugaagagcacacagaaugccauugacgggauuacuaacaaaguaaauucuguuauugaaaagaugaauacacaguucacagcaguagguaaagaguucaaccaccuggaaaaaagaauagagaauuuaaauaaaaaaauugaugaugguuuccuggacauuuggacuuacaaugccgaacuguugguucuauuggaaaaugaaagaacuuuggacuaccacgauucaaaugugaagaacuuauaugaaaagguaagaagccaguuaaaaaacaaugccaaggaaauuggaaacggcugcuuugaauuuuaccacaaaugcgauaacacgugcauggaaagugucaaaaaugggacuuaugacuacccaaaauacucagaggaagcaaaauuaaacagagaagaaauagaugggguaaagcuggaaucaacaaggauuuaccagauuuuggcgaucuauucaacugucgccaguucauugguacugguagucucccugggggcaaucaguuucuggaugugcucuaaugggucucuacaguguagaauauguauuuaa

SEQ ID NO: 41060 - RNA, 1701 nt, Artificial Sequence; identical to SEQ ID NO: 36080
  derived and/or modified CDS sequence (wt) from hemagglutinin__InfluenzaA__AFK74935

SEQ ID NO: 41061 - RNA, 1701 nt, Artificial Sequence; identical to SEQ ID NO: 40464
  derived and/or modified CDS sequence (wt) from hemagglutinin__InfluenzaA__AFK74945

SEQ ID NO: 41062 - RNA, 1701 nt, Artificial Sequence; identical to SEQ ID NO: 40465
  derived and/or modified CDS sequence (wt) from hemagglutinin__InfluenzaA__AFK74955

SEQ ID NO: 41063 - RNA, 1701 nt, Artificial Sequence; identical to SEQ ID NO: 36261
  derived and/or modified CDS sequence (wt) from hemagglutinin__InfluenzaA__AFK74965

SEQ ID NO: 41064 - RNA, 1701 nt, Artificial Sequence; identical to SEQ ID NO: 40467
  derived and/or modified CDS sequence (wt) from hemagglutinin__InfluenzaA__AFK74975

SEQ ID NO: 41065 - RNA, 1701 nt, Artificial Sequence; identical to SEQ ID NO: 40468
  derived and/or modified CDS sequence (wt) from hemagglutinin__InfluenzaA__AFK74985

SEQ ID NO: 41066 - RNA, 1701 nt, Artificial Sequence; identical to SEQ ID NO: 39118
  derived and/or modified CDS sequence (wt) from hemagglutinin__InfluenzaA__AFK74995

SEQ ID NO: 41067 - RNA, 1701 nt, Artificial Sequence; identical to SEQ ID NO: 36261
  derived and/or modified CDS sequence (wt) from hemagglutinin__InfluenzaA__AFK75005

SEQ ID NO: 41068 - RNA, 1701 nt, Artificial Sequence
  derived and/or modified CDS sequence (wt) from hemagglutinin__InfluenzaA__AFK75015
augaaggcaauacuaguaguucugcuauauacauuugcaaccgcaaaugcagacacauuauguauagguuaucaugcgaacaauucaacagacacuguagacacaguacuagaaaagaauguaacaguaacacacucuguuaaccuucuagaagacaagcauaacgggaaacuaugcaaacuaagagggguagccccauugcauuuggguaaauguaacauugcuggcuggauccugggaaauccagagugugaaucacucuccacagcaagcucaugguccuacauuguggaaacaucuaguucagacaauggaacguguuacccaggagauuucaucgauuaugaggagcuaagagagcaauugagcucagugucaucauuugaaagguuugagauauuccccaagacaaguucauggcccaaucaugacucgaacaaagguguaacggcagcauguccucaugcuggagcaaaaagcuucuacaaaaauuuaauauggcuaguuaaaaaaggaaauucauacccaaagcucagcaaauccuacauuaaugauaaagggaaagaaguccucgugcuauggggcauucaccauccaucuacuagugcugaccaacaaagucucuaucagaaugcagaugcauauguuuuuguggggacaucaagauacagcaagaaguucaagccggaaauagcaauaagacccaaagugagggaucaagaagggagaaugaacuauuacuggacacuaguagagccgggagacaaaauaacauucgaagcaacuggaaaucuagugguaccgagauaugcauucgcaauggaaagaaaugcuggaucugguauuaucauuucagauacaccaguccacgauugcaauacaacuugucagacacccaagggugcuauaaacaccagccucccauuucagaauauacauccgaucacaauuggaaaauguccaaaauauguaaaaagcacaaaauugagacuggcuacaggauugaggaaugucccuucuauucaaucuagaggccuauuuggggccauugccgguuucauugaagggggguggacagggaugguagauggaugguacgguuaucaccaucaaaaugagcaggggucaggauaugcagccgaccugaagagcacacagaaugccauugacgagaucacuaacaaaguaaauucuguuauugaaaagaugaauacacaguucacagcaguagguaaagaguucaaccaccuggaaaaaagaauagagaauuuaaauaaaaaaguugaugaugguuuccuggacauuuggacuuacaaugccgaacuguugguucuauuggaaaaugaaagaacuuuggacuaccacgauucaaaugugaagaacuuauaugaaaagguaagaagccaguuaaaaaacaaugccaaggaaauuggaaacggcugcuuugaauuuuaccacaaaugcgauaacacgugcauggaaagugucaaaaaugggacuuaugacuacccaaaauacucagaggaagcaaaauuaaacagagaagaaauagaugggguaaagcuggaaucaacaaggauuuaccagauuuuggcgaucuauucaacugucgccaguucauugguacugguagucucccugggggcaaucaguuucuggaugugcucuaaugggucucuacaguguagaauauguguuuaa

SEQ ID NO: 41069 - RNA, 1701 nt, Artificial Sequence; identical to SEQ ID NO: 36785
  derived and/or modified CDS sequence (wt) from hemagglutinin__InfluenzaA__AFK75025

SEQ ID NO: 41070 - RNA, 1701 nt, Artificial Sequence; identical to SEQ ID NO: 36785
  derived and/or modified CDS sequence (wt) from hemagglutinin__InfluenzaA__AFK75035

SEQ ID NO: 41071 - RNA, 1701 nt, Artificial Sequence; identical to SEQ ID NO: 36785
  derived and/or modified CDS sequence (wt) from hemagglutinin__InfluenzaA__AFK75045

SEQ ID NO: 41072 - RNA, 1701 nt, Artificial Sequence; identical to SEQ ID NO: 36785
  derived and/or modified CDS sequence (wt) from hemagglutinin__InfluenzaA__AFK75055

SEQ ID NO: 41073 - RNA, 1701 nt, Artificial Sequence; identical to SEQ ID NO: 36261
  derived and/or modified CDS sequence (wt) from hemagglutinin__InfluenzaA__AFK75065

SEQ ID NO: 41074 - RNA, 1701 nt, Artificial Sequence; identical to SEQ ID NO: 40478
  derived and/or modified CDS sequence (wt) from hemagglutinin__InfluenzaA__AFK75075

SEQ ID NO: 41075 - RNA, 1701 nt, Artificial Sequence; identical to SEQ ID NO: 40479
  derived and/or modified CDS sequence (wt) from hemagglutinin__InfluenzaA__AFK75085

SEQ ID NO: 41076 - RNA, 1701 nt, Artificial Sequence; identical to SEQ ID NO: 40479
  derived and/or modified CDS sequence (wt) from hemagglutinin__InfluenzaA__AFK75095

SEQ ID NO: 41077 - RNA, 1701 nt, Artificial Sequence; identical to SEQ ID NO: 35311
  derived and/or modified CDS sequence (wt) from hemagglutinin__InfluenzaA__AFK75105

SEQ ID NO: 41078 - RNA, 1701 nt, Artificial Sequence
  derived and/or modified CDS sequence (wt) from hemagglutinin__InfluenzaA__AFK77857
auggaggcaauacuaguaguucugcuauauacauuugcaaccgcaaaugcagacacauuauguauagguuaucaugcgaacaauucaacagacacuguagacacaguacuagaaaagaauguaacaguaacacacucuguuaaccuucuagaagacaagcauaacgggaaacuaugcaaacuaagagggguagccccauugcauuuggguaaauguaacauugcuggcuggauccugggaaauccagagugugaaucacucuccacagcaagcucaugguccuacauuguggaaacaucuaguucagacaauggaacguguuacccaggagauuucaucgauuaugaggagcuaagagagcaauugagcucagugucaucauuugaaagguuugagauauuccccaagacaaguucauggcccaaucaugacucgaacaaagguguaacggcagcauguccucaugcuggagcaaaaagcuucuacaaaaauuuaauauggcuaguuaaaaaaggaaauucauacccaaagcucagcaaauccuacauuaaugauaaagggaaagaaguccucgugcuauggggcauucaccauccaucuacuagugcugaccaacaaagucucuaucagaaugcagaugcauauguuuuuguggggucaucaagauacagcaagaaguucaagccggaaauagcaauaagacccaaagugagggaucaagaagggagaaugaacuauuacuggacacuaguagagccgggagacaaaauaacauucgaagcaacuggaaaucuagugguaccgagauaugcauucgcaauggaaagaaaugcuggaucugguauuaucauuucagauacaccaguccacgauugcaauacaacuugucagacacccaagggugcuauaaacaccagccucccauuucauaauauacauccgaucacaauuggaaaauguccaaaauauguaaaaagcacaaaauugagacuggccacaggauugaggaaugucccgucuauucaaucuagaggccuauuuggggccauugccgguuucauugaagggggguggacagggaugguagauggaugguacgguuaucaccaucaaaaugagcaggggucaggauaugcagccgaccugaagagcacacagaaugccauugacgagauuacuaacaaaguaaauucuguuauugaaaagaugaauacacaguucacagcaguagguaaagaguucaaccaccuggaaaaaagaauagagaauuuaaauaaaaaaguugaugaugguuuccuggacauuuggacuuacaaugccgaacuguugguucuauuggaaaaugaaagaacuuuggacuaccacgauucaaaugugaagaacuuauaugaaaagguaagaagucaguuaaaaaacaaugccaaggaaauuggaaacggcugcuuugaauuuuaccacaaaugcgauaacacgugcauggaaagugucaaaaaugggacuuaugacuacccaaaauacucagaggaagcaaaauuaaacagagaagaaauagaugggguaaagcuggaaucaacaaggauuuaccagauuuuggcgaucuauucaacugucgccaguucauugguacugguagucucccugggggcaaucaguuucuggaugugcucuaaugggucucuacaguguagaauauguauuuaa

SEQ ID NO: 41079 - RNA, 1701 nt, Artificial Sequence; identical to SEQ ID NO: 34965
  derived and/or modified CDS sequence (wt) from hemagglutinin__InfluenzaA__AFK77867

SEQ ID NO: 41080 - RNA, 1701 nt, Artificial Sequence
  derived and/or modified CDS sequence (wt) from hemagglutinin__InfluenzaA__AFK77877
augaaggcaauacuaguaguucugcuauauacauuugcaaccgcaaaugcagacacauuauguauagguuaucaugcgaacaauucaacagacacuguagacacaguacuagaaaagaauguaacaguaacacacucuguuaaccuucuagaagacaagcauaacgagaaacuaugcaaacuaagagggguagccccauugcauuuggguaaauguaacauugcuggcuggauccugggaaauccagagugugaaucacucuccacagcaagcucaugguccuacauuguggaaacaucuaguucagacaauggaacguguuacccaggagauuucaucgauuaugaggagcuaagagagcaauugagcucagugucaucauuugaaagguuugagauauuccccaagacaaguucauggcccaaucaugacucgaacaaagguguaacggcagcauguccucaugcuggagcaaaaagcuucuacaaaaauuuaauauggcuaguuaaaaaaggaaauucauacccaaagcucagcaaauccuacauuaaugauaaagggaaagaaguccucgugcuauggggcauucaccauccaucuacuagugcugaccaacaaagucucuaucagaaugcagaugcauauguuuuuguggggacaucaagauacagcaagaaguucaagccggaaauagcaauaagacccaaagugagggaucaagaagggagaaugaacuauuacuggacacuaguagagccgggagacaaaauaacauucgaagcaacuggaaaucuagugguaccgagauaugcauucgcaauggaaagaaaugcuggaucugguauuaucauuucagauacaccaguccacgauugcaauacaacuugucagacacccaagggugcuauaaacaccagccucccauuucagaauauacauccgaucacaauuggaaaauguccaaaauauguaaaaagcacaaaauugagacuggccacaggauugaggaaugucccgucuauucaaucuagaggccuauuuggggccauugccgguuucauugaagggggguggacagggaugguagauggaugguacgguuaucaccaucaaaaugagcaggggucaggauaugcagccgaccugaagagcacacagaaugccauugacgagauuacuaacaaaguaaauucuguuauugaaaagaugaauacacaguucacagcaguagguaaagaguucaaccaccuggaaaaaagaauagagaauuuaaauaaaaagguugaugaugguuuccuggacauuuggacuuacaaugccgaacuguugguucuauuggaaaaugaaagaacuuuggacuaccacgauucaaaugugaagaacuuauaugaaaagguaagaagccaguuaaaaaacaaugccaaggaaauuggaaacggcugcuuugaauuuuaccacaaaugcgauaacacgugcauggaaagugucaaaaaugggacuuaugacuacccaaaauacucagaggaagcaaaauuaaacagagaagaaauagaugggguaaagcuggaaucaacaaggauuuaccagauuuuggcgaucuauucaacugucgccaguucauugguacugguagucucccugggggcaaucaguuucuggaugugcucuaaugggucucuacaguguagaauauguauuuaa

SEQ ID NO: 41081 - RNA, 1701 nt, Artificial Sequence; identical to SEQ ID NO: 34681
  derived and/or modified CDS sequence (wt) from hemagglutinin__InfluenzaA__AFK77887

SEQ ID NO: 41082 - RNA, 1701 nt, Artificial Sequence
  derived and/or modified CDS sequence (wt) from hemagglutinin__InfluenzaA__AFK77897
augaaggcaauacuaguaguucugcuauauacauuugcaaccgcaaaugcagacacauuauguauagguuaucaugcgaacaauucaacagacacuguagacacaguacuagaaaagaauguaacaguaacacacucuauuaaccuucuagaagacaagcauaacgggaaacuaugcaaacugagagggguagccccauugcauuuggguaaauguaacauugcuggcuggauccugggaaauccagagugugaaucacucuccacagcaagcucaugguccuacauuguggaaacaucuaguucagacaauggaacguguuacccaggagauuucaucaauuaugaagagcuaagagagcaauugagcucagugucaucauuugaaagguuugagauauucccaaagacaaguucauggcccaaucaugacucgaacaaagguguaacggcagcauguccucaugcuggagcaaaaagcuucuacaaaaauuuaauauggcuaguuaaaaaaggaaauucauacccaaagcucagcaaauccuauauuaacgauaaagggaaagaaguccuagugcuauggggcauucaccauccaucuacuagugcugaccaacaaagucucuaucagaaugcagaugcauauguuuuuguggggacaucaaaauacagcaagaaguucaagccggaaauagcaguaagaccuaaagugagggaucaagaagggagaaugaacuauuacuggacacuaguagagccgggagacaaaauaacauucgaagcaacuggaaaucuauugguaccgagauaugcauucgcaauggaaagaaaugcuggaucugguauuaucauuucagauacaccaguccacgauugcaauacaacuugucagacacccaagggugcuauaaacaccagccucccauuucagaauauacauccgaucacaauuggaaaauguccaaaauauguaaaaagcacaaaauugagacuggccacgggauugaggaaugucccgucuauucaaucuagaggucuauuuggggccauugccgguuucauugaagggggguggacagggaugguagauggaugguacgguuaucaccaucaaaaugagcaggggucaggauaugcagccgaccugaagagcacacagaaugccauugacaagauuacuaacaaaguaaauucuguuauugaaaagaugaauacacaguucacagcaguagguaaagaguucaaccaccuggaaaaaagaauagagaauuuaaauaaaaaaguugaugaugguuuccuggacauuuggacuuacaaugccgaacuguugguucuauuggaaaaugaaagaacuuuggacuaccacgauucaaaugugaaaaacuuauaugaaaagguaagaagccaauuaaaaaacaaugccaaggaaauuggaaacggcugcuuugaauuuuaccacaaaugcgauaacacgugcauggaaagugucaaaaaugggacuuaugacuacccaaaauacucagaggaagcaaaauuaaacagagaagaaauagaugggguaaagcuggaaucaacaaggauuuaccagauuuuggcgaucuauucaacugucgccaguucauugguacugguagucucccugggggcaaucaguuucuggaugugcucuaaugggucucuacaguguagaauauguauuuaa

SEQ ID NO: 41083 - RNA, 1701 nt, Artificial Sequence; identical to SEQ ID NO: 39755
  derived and/or modified CDS sequence (wt) from hemagglutinin__InfluenzaA__AFK78028

SEQ ID NO: 41084 - RNA, 1701 nt, Artificial Sequence; identical to SEQ ID NO: 34965
  derived and/or modified CDS sequence (wt) from hemagglutinin__InfluenzaA__AFK78187

SEQ ID NO: 41085 - RNA, 1701 nt, Artificial Sequence
  derived and/or modified CDS sequence (wt) from hemagglutinin__InfluenzaA__AFM45476
augaagacuaucauugcuuugagcuacauucuaugucugguuuucgcucaaaaacucccuggaaaugacaacagcacggcaacgcugugccuugggcaccaugcagugccaaacggaacgauagugaaaacaaucacgaaugaccaaauugaaguuacuaaugcuacugagcugguucagaguuccucaacaggugaaauaugcaacaguccucaucagauccuugauggagaaaacugcacacuaauagaugcucuauugggagacccucagugugauggcuuccaaaacaagaaaugggaccuuuuuguugaacgaagcaaagcccacagcaacuguuacccuuaugaugugccggauuaugccucccuuaggucacuaguugccucauccggcacacuggaguuuaacaaugaaagcuucaauuggacuggagucacucaaaacggaacaagcucugcuugcauaaggagaucuaauaauaguuucuuuaguagauugaauugguugacccauuuaaacuucaaauacccagcauugaacgugacuaugccaaacaaugaacaauuugacaaauuguacauuugggggguucaccacccggguacggacaaggaccaaaucuuccuguaugcucaagcagcaggaagaaucacaguaucuaccaaaagaagccaacaagcuguaauuccgaauaucggaucuagacccagaguaaggaauaucccuagcagaguaagcaucuauuggacaauaguaaaaccgggagacauacuuuugauuaacagcacagggaaucuaauugcuccuagggguuacuucaaaauacgaagugggaaaagcucaauaaugaggucagaugcacccauuggcaaauguaauucugcaugcaucacuccaaauggaagcauucccaaugacaaaccauuccaaaauguaaacaggaucacauacggggccugucccagauauguuaagcaaaacacucugaaauuggcaacaggaaugagaaauguaccagagaaacaaacuagaggcauauuuggcgcaauagcugguuucauagaaaaugguugggagggaaugguggaugguugguacgguuucaggcaucaaaauucugagggaaggggacaagcagcagaucucaaaagcacucaagcagcaaucgaucaaaucaaugggaagcugaauagauugaucgggaaaaccaacgagaaauuccaucagauugaaaaagaauucucagaagucgaagggagaauucaggaccuugagaaauauguugaggacacuaaaauagaucucuggucauacaacgcggagcuucuuguugcccuggagaaccaacacacaauugaucuaacggacucagaaaugaacaaacuguuugaaaaaacaaagaagcaacugagggaaaaugcugaggauaugggcaaugguuguuucaaaauauaccacaaaugugacaaugccugcauaggaucaaucagaaauggaacuuaugaccacgauguguacagagaugaagcauuaaacaaccgauuccagaucaagggaguugagcugaagucaggguacaaagauuggauccuauggauuuccuuugccauaucauguuuuuugcuuuguguugcuuuguugggguucaucaugugggccugccaaaaaggcaacauuaggugcaacauuugcauuuga

SEQ ID NO: 41086 - RNA, 1701 nt, Artificial Sequence
  derived and/or modified CDS sequence (wt) from hemagglutinin__InfluenzaA__AFM45487
augaagacuaucauugcuuugagcuacauucuaugucugguuuucgcucaaaaacucccuggaaaugacaacagcacggcaacgcugugccuugggcaccaugcaguaccaaacggaacgauagugaaaacaaucacgaaugaccaaauugaaguuacuaaugcuacugagcugguucagaguuccucaacaggugaaauaugcgacaguccucaucagauccuugauggagaaaacugcacacuaauagaugcucuauugggagacccucagugugauggcuuccaaaauaagaagugggaccuuuuuguugaacgaagcaaagccuacagcaacuguuacccuuaugaugugccggauuaugccucccuuaggucacuaguugccucauccggcacacuggaguuuaacaaugaaagcuucaauuggacuggagucacucaaaacggaacaagcucugcuugcauaaggagaucuaacaguaguuucuuuaguagauugaauugguugacccacuuaaacuucaaauacccagcauugaacgugacuaugccaaacaaugaacaauuugacaaauuguacauuugggggguucaccacccggguacggacaaggaccaaaucuuccuguaugcucaaucaucaggaagaaucacaguaucuaccaaaagaagccaacaagcuguaaucccgaauaucggaucuagacccagaauaaggaauaucccuagcagaauaagcaucuauuggacaauaguaaaaccgggagacauacuuuugauuaacagcacagggaaucuaauugcuccuagggguuacuucaaaauacgaagugggaaaagcucaauaaugagaucagaugcacccauuggcaaaugcaauucugaaugcaucacuccaaauggaagcauucccaaugacaaaccauuccaaaauguaaacaggaucacauacggggccugucccagauauguuaagcaaagcacucugaaauuggcaacaggaaugcgaaauguaccagagaaacaaacuagaggcauauuuggcgcaauagcggguuucauagaaaaugguugggagggaaugguggaugguugguacgguuucaggcaucaaaauucugagggaagaggacaagcagcagaucucaaaagcacucaagcagcaaucgaucaaaucaaugggaagcugaaucgauugaucgggaaaaccaacgagaaauuccaucagauugaaaaagaauucucagaagucgaagggagaauucaggaccuugagaaauauguugaggacacuaaaauagaucucuggucauacaacgcggagcuucuuguugcccuggagaaccaacauacaauugaucuaacugacucagaaaugaacaaacuguuugaaaaaacaaagaagcaacugagggaaaaugcugaggauaugggcaaugguuguuucaaaauauaccacaaaugugacaaugccugcauaggaucaaucagaaauggaacuuauaaccacgauguauacagagaugaagcauuaaacaaccguuuccagaucaagggaguugagcugaagucaggguacaaagauuggauccuauggauuuccuuugccauaucauguuuuuugcuuuguguugcuuuguugggguucaucaugugggcaugccaaaagggcaacauuaggugcaacauuugcauuuga

SEQ ID NO: 41087 - RNA, 1701 nt, Artificial Sequence
  derived and/or modified CDS sequence (wt) from hemagglutinin__InfluenzaA__AFM45489
augaagacuaucauugcuuugagcuacauucuaugucugguuuucgcucaaaaacuuccuggaaaugacaacagcacggcaacgcugugccuugggcaccaugcagugccaaacgggacgauagugaaaacaaucacgaaugaccaaauugaaguuacuaaugcuacugagcugguucagaguuccucaacaggugaaauaugcaacaguccucaucagauccuugauggagaaaacugcacacuaauagaugcucuauugggagacccucagugugauggcuuccaaaacaagaaaugggaccuuuuuguugaacgaagcaaagcccacagcaacuguuaccccuaugaugugccggauuaugccucccuuaggucacuaguugccucauccggcacacuggaguuuaacaaugaaagcuucaauuggacuggagucacucaaaacggaacaagcucugcuugcauaaggagaucuaauaauaguuucuuuaguagauugaauugguugacccacuuaaacuucaaauacccagcauugaacgugacuaugccaaacaaugaacaauuugacaaauuguacauuugggggguucaccacccggguacggacaaggaccaaaucuuccuguaugcucaagcagcaggaagaaucacaguaucuaccaaaagaagccaacaagcuguaauuccgaauaucggaucuagacccagaguaaggaauaucccuagcagaguaagcaucuauuggacaauaguaaaaccgggagacauacuuuugauuaacagcacagggaaucuaauugcuccuagggguuacuucaaaauacgaagugggaaaagcucaauaaugagaucagaugcacccauuggcaaaugcaauucugcaugcaucacuccaaauggaagcauucccaaugacaaaccauuccaaaauguaaacaggaucacauacggggccugucccagauauguuaagcaaaacacucugaaauuggcaacaggaaugagaaauguaccagagaaacaaacuagaggcauauuuggcgcaauagcugguuucauagaaaaugguugggagggaaugguggaugguugguacgguuucaggcaucaaaauucugagggaaggggacaagcagcagaucucaaaagcacucaagcagcaaucgaucaaaucaaugggaagcugaauagauugaucgggaaaaccaacgagaaauuccaucagauugaaaaagaauucucagaagucgaagggagaauucaggaccuugagaaauauguugaggacacuaaaauagaucucuggucauacaacgcggagcuucuuguugcccuggagaaccaacacacaauugaucuaacugauucagaaaugaacaaacuguuugaaaaaacaaagaagcaacugagggaaaaugcugaggauaugggcaaugguuguuucaaaauauaccacaaaugugacaaugccugcauaggaucaaucagaaauggaacuuaugaccacgauguguacagagaugaagcauuaaacaaccgauuccagaucaagggaguugagcugaagucaggguacaaagauuggauccuauggauuuccuuugccauaucauguuuuuugcuuuguguugcuuuguugggguucaucaugugggccugccaaaaaggcaacauuaggugcaacauuugcauuuga

SEQ ID NO: 41088 - RNA, 1701 nt, Artificial Sequence
  derived and/or modified CDS sequence (wt) from hemagglutinin__InfluenzaA__AFM45494
augaagacuaucauugcuuugagcuacauucuaugucugguuuucgcucaaaaacuuccuggaaaugacaacagcacggcaacgcugugccuugggcaccaugcaguaccaaacggaacgauagugaaaacaaucacgaaugaccaaauugaaguuacuaaugcuacugagcugguucagaguuccucaacaggugaaauaugcgacaguccucaucagauccuugauggagaaaacugcacacuaauagaugcucuauugggagacccucagugugauggcuuccaaaauaagaagugggaccucuuuguugaacgaagcaaagccuacagcaacuguuacccuuaugaugugccggauuaugccucccuuaggucacuaguugccucauccggcacacuagaguuuaacaaugaaagcuucaauuggacuggagucacucaaaacggaacaagcucugcuugcauaaggagaucuaauaguaguuucuuuaguagauugaauugguugacccacuuaaacuucaaauacccagcauugaacgugacuaugccaaacaaugaacaauuugacaaauuguacauuugggggguucaccacccggguacggacaaggaccaaaucuuccuguaugcucaaucaucaggaagaaucacaguaucuaccaaaagaagccaacaagcuguaaucccgaauaucggaucuagacccagaauaaggaauaucccuagcagaauaagcaucuauuggacaauaguaaaaccgggagacauacuuuugauuaacagcacagggaaucuaauugcuccuagggguuacuucaaaauacgaagugggaaaagcucaauaaugagaucagaugcacccauuggcaaaugcaauucugaaugcaucacuccaaauggaagcauucccaaugacaaaccauuccaaaauguaaacaggaucacauacggggccugucccagauauguuaagcaaagcacucugaaauuggcaacaggaaugcgaaauguaccagagaaacaaacuagaggcauauuuggcgcaauagcggguuucauagaaaaugguugggagggaaugguggaugguugguacgguuucaggcaucaaaauucugagggaagaggacaagcagcagaucucaaaagcacucaagcagcaaucgaucaaaucaaugggaagcugaaucgauugaucgggaaaaccaacgagaaauuccaucagauugaaaaagaauucucagaagucgaagggagaauucaggaccuugagaaauauguugaggacacuaaaauagaucucuggucauacaacgcggagcuucuuguugcccuggagaaccaacauacaauugaucuaacugacucagaaaugaacaaacuguuugaaaaaacaaagaagcaacugagggaaaaugcugaggauaugggcaaugguuguuucaaaauauaccacaaaugugacaaugccugcauaggaucaaucagaaauggaacuuauaaccacgauguauacagagaugaagcauuaaacaaccgguuccagaucaagggaguugagcugaagucaggguacaaagauuggauccuauggauuuccuuugccauaucauguuuuuugcuuuguguugcuuuguugggguucaucaugugggccugccaaaagggcaacauuaggugcaacauuugcauuuga

SEQ ID NO: 41089 - RNA, 1701 nt, Artificial Sequence
  derived and/or modified CDS sequence (wt) from hemagglutinin__InfluenzaA__AFM68954
augaaggcaagacuacugguccuguuaugugcacuugcagcuacagaugcagacacaauauguauaggcuaccaugcgaacaacucaaccgacacuguugacacacuacucgagaagaaugugacagugacacauucuguuaaccugcucgaagacagccacaacgggaaacuauguaaauuaaaaggaauagccccacuacaauuggggaaauguaacaucgccggauggcucuugggaaacccagaaugcgacucacugcuuccagcgagaucaugguccuacauuguagaaacaccaaacucugagaauggagcauguuauccaggagauuucaucgacuaugaggaacugaaggagcaauugagcucaguaucaucauuagaaagauucgaaauauuucccaaggaaaguucauggcccaaccacaacacacucaaaggaguaacagcaucaugcucccaugggggaaaaagcaguuuuuacagaaauuugcuauggcugacgaaaacggaggacucauacccaaagcugagcaauuccuaugugaacaauaaagggaaagaaguccuuguacuaugggguguucaucacccgucuagcagugaugagcaacagagucucuaucauaauguaaaugcuuaugucucuguagugucuucaaauuauaacgggagauucaccccggaaauagcugcaagacccaaaguaagaaaucaaccugggaggaugaacuauuacuggaccuugcuagaacccggagacacaauaauauuugaggcaacugguaaucuaauagcaccaugguaugcuuucgcacugaguagaggguuuggguccggcaucaucaccucaaacgcgucaaugcaugaguguaacacgaagugucaaacaccccagggagcuauaaacagcagucucccuuuccagaauauacacccagucacaauaggagagugcccaaaauaugucaggaguaccaaauugaggaugguuacaggacuaagaaacaucccauccauucaauucagaggucuauuuggagccauugcugguuuuauugaggggggauggacuggaaugauagauggaugguaugguuaucaucaucagaaugaacagggaucaggcuaugcagcggaucaaaaaagcacacaaaaugccauuaacgggauuacaaacaaggugaacucuguuaucgagaaaaugaacacucaauucacagcugugaguaaagaauucaacaacuuagaaaaaaggauggaaaauuuaaauaaaaaaguugaugauggauuucuggacauuuggacauauaaugcagaauuguuaguucuacuggaaaaugaaaggacuuuggauuuccaugauuuaaaugugaagaaucuguacgagaaaguaaaaagccaauuaaagaauaaugccaaagaaaucggaaauggguguuuugaguucuaccacaagugugacaauaaaugcauggaaaguguaagaaaugggacuuaugauuauccaaaauauucagaagaaucaaaguugaacagggaaaagauagauggagugaaauuggaaucaauggggguguaucagauucuggcgaucuacucaacugucgccaguucacuggugcuuuuggucucccugggggcaaucaguuucuggauguguucuaaugggucuuugcagugcagaauaugcaucuga

SEQ ID NO: 41090 - RNA, 1701 nt, Artificial Sequence
  derived and/or modified CDS sequence (wt) from hemagglutinin__InfluenzaA__AFM68965
augaagacuaucauugcuuugagcuacauuuucugucagguucucgcccaaaaccuuccaggaaaugacaacagcacagcaacgcugugccugggacaucaugcagugccaaacggaacgcuagugaaaacaaucacgaaugaucagauugaagugacuaaugcuacugagcugguucagaguuccucaacagguagaauaugcgacaguccucaucgaauccuugaugggaaaaacugcacacugauagaugcucuauugggggacccucauugugauggcuuucaaaaugagaaaugggaccuuuuuguugaacgcagcaaagcuuucagcaacuguuacccuuaugaugugccagauuaugccucccuuaggucacuaguugccucgucaggcacccuggaguuuaucaaugaaggcuucaauuggacuggggucacucagaaugggggaagcuaugcuugcaaaaggggaccugauaacaguuucuucaguagacugaacugguuguacaaaucagaaagcacauauccagugcugaacgugacuaugccaaacaaugacaauuuugacaaacuguacauuuggggaguucaccacccgagcacggacaaagaacaaaccaaccuauauguucaagcaucagggagagucacagucuccaccaagagaagccagcaaacuauaaucccgaaugucgggucuagacccuggguaaggggucugucuaguggaauaagcaucuauuggacaauaguaaaaccgggagacauacuguuaauuaauaguaaugggaaccuaauugcuccucgggguuacuucaaaauacgcacugggaaaagcucaauaaugaggucagaugcacccauuggcaccugcaguucugaaugcaucacuccaaauggaagcauucccaaugacaagcccuuucaaaacguaaacaagaucacauauggggcaugucccaaguauguuaagcaaaacacucugaaguuggcaacagggaugcggaauguaccagagaaacaaacuagaggcauauucggcgcaaaagcagguuucauagaaaaugguugggagggaaugauagacgguugguacgguuucaggcaucaaaauucugagggcacaggacaagcagcagaucuuaaaagcacucaagcagccaucgaccaaaucaaugggaaacugaauaggguaaucgagaaaacgaacgagaaauuccaucaaaucgaaaaggaauucucagaaguagaagggagaauucaggaccucgagaaauacguugaagacacuaaaauagaucucuggucuuacaaugcggagcuucuugucgcucuggagaaccaacauacaauugaucugacugacucggaaaugaacaaacuguuugaaaaaacaaggaggcaacugagggaaaaugcugaggacaugggcaaugguugcuucaaaauauaccacaaaugugacaaugcuugcauagggucaaucagaaauggaacuuaugaccaugauguauacagagacgaagcauuaaacaaccgguuucagaucaaagguguugagcugaagucaggauacaaagacuggauccuguggauuuccuuugccauaucaugcuuuuugcuuuguguuguuuugcugggguucaucaugugggccugccaaaaaggcaacauuaggugcaacauuugcauuuga

SEQ ID NO: 41091 - RNA, 1701 nt, Artificial Sequence
  derived and/or modified CDS sequence (wt) from hemagglutinin__InfluenzaA__AFM68987
augaagacuaucauugcuuugagcuacauuuucugucugguuuucgcccaaaaccuucccggaaaugacaacagcacagcaacgcugugccugggacaccaugcagugccaaacggaacgcuagugaaaacaaucacgaaugaucagauugaagugacuaaugcuacugagcugguucagaguuccucaacagguagaauaugcgacaguccucaccgaauccuugaugggaaaaacugcacacugauagaugcucuauugggagacccucauugugauggcuuucaaaaugagaaaugggaccuuuuuguugaacgcagcaaagcuuucagcaacuguuacccuuaugaugugccagauuaugccucccuuaggucacuaguugccucgucaggcacccuggaguuuaucaaugaaggcuucaauuggacuggagucacucagagugggggaagcuaugcuugcaaaaggggaucugauaaaaguuucuucaguagacugaauugguuguacgaaucagaaagcaaauauccagugcugaacgugacuaugccaaacaauggcaauuuugacaaacuguacauuugggggguucaccacccgagcacggacaaagaacaaaccaaccuauauguucgagcaucagggagagucacagucucuaccaagagaagccagcaaacuguaaucccgaauaucgggucuagacccuggguaaggggucugucuaguagaauaaguaucuauuggacaauaguaaaaccgggagacauacuguuaauuaauaguaaugggaaccuaauugcuccucgggguuacuucaaaauacgcacugggaaaagcucaauaaugaggucagaugcaccuauuggcaccugcaguucugaaugcaucacuccaaauggaagcauucccaaugacaagcccuuucaaaacguaaacaagaucacauauggggcaugucccaaguauguuaagcaaaacacucugaaguuggcaacagggaugcggaauguaccagagaaacaaacuagaggcauauucggcgcaauagcagguuucauagaaaaugguugggagggaaugguagacgguugguacgguuucaggcaucaaaauucugagggcacaggacaagcagcagaucuuaaaagcacucaagcagcaaucgaccaaaucaaugggaaacugaauaggguaaucgagaaaacgaacgagaaauuccaucaaaucgaaaaggaauucucagaaguagaagggagaauucaggaccucgagaaauacguugaagacacuaaaauagaucucuggucuuacaacgcggagcuucuugucgcucuggagaaccaacauacaauugaucugacugacucggaaaugaacaaacuguuugaaaaaacaaggaggcaacugagggaaaaugcugaggacaugggcaaugguugcuucaaaauauaccacaaaugugacaaugcuugcauagggucaaucagaaauggaacuuaugaccaugauguauacagagacgaagcauuaaacaaccgguuucagaucaaagguguugagcugaagucaggauacaaagacuggauccuguggauuuccuuugccauaucaugcuuuuugcuuuguguuguuuugcugggguucaucaugugggccugccaaaaaggcaacauuaggugcaacauuugcauuuga

SEQ ID NO: 41092 - RNA, 1701 nt, Artificial Sequence
  derived and/or modified CDS sequence (wt) from hemagglutinin__InfluenzaA__AFM71720
augaagacuaucauugcuuugagcuacauuuucugucugguuuucgcccaaaaacuucccggaaaugacaacagcacagcaacgcugugccugggacaucaugcagugccaaacggaacgcuagugaaaacaauaacgaaugaucagauugaagugacuaaugcuacugagcugguucagaguuccucaacagguagaauaugcgacaguccucaccgaauccuugauggaaaaaacugcacacugauagaugcucuauugggagacccucauugugauggcuuccaaaaugagaaaugggaccuuuuuguugaacgcagcaaagcuuacagcaacuguuacccuuaugaugugccggauuaugccucccuuaggucacuaguugccucaucaggcacccuggaguuuaucaaugaagacuucaauuggacuggagucacucagagugggggaagcuaugcuugcaaaaggggaucuguuaacaguuucuucaguagauugaauugguugcacgaaucagaauacaaauauccagcgcugaacguggcuaugccaaacaauggcaaauuugacaaauuguacauuugggggguucaccacccgaucacggacagagaacaaaccaaccuauauguucgagcaucagggagagucacagucucuaccaagagaagccagcaaacuguaaucccgaauaucgggucuagacccuggguaaggggucuguccaguagaauaagcaucuauuggacaauaguaaaaccgggagacauacuguuuauuaauagcaccgggaaccuaauugcuccucgggguuacuucaaaauacgcacugggaaaagcucaauaaugaggucagaugcaccuauuggcaccugcaguucugaaugcaucacuccaaauggaagcauucccaaugacaaacccuuucaaaauguaaacaagaucacauauggggcaugucccagguauguuaagcaaaacacucugaaauuggcaacagggaugcggaauguaccagagaaacaaacuagaggcauauucggcgcaauagcagguuucauagaaaaugguugggagggaaugguagacgguugguacgguuucaggcaucaaaauucugagggcacaggacaagcagcagaucuuaaaagcacucaagcagcaaucgaccaaaucaacgggaaacugaauagguuaaucgagaaaacgaacgagaaauuccaucaaaucgaaaaggaauucucagaaguagaagggagaauucaggaccucgagaaauauguugaagacacuaaaauagaucucuggucuuacaacgcggagcuucuugucgcccuggagaaccaacauacaauugaucugacugacucagaaaugaacaaacuguuugaaaaaacaaggaagcaacugagggaaaaugcugaggacaugggcaaugguugcuucaagauauaccacaaaugugacaaugccugcauagggucaaucagaaauggaacuuaugaccaugauguauacagagacgaagcauuaaacaaccgguuccagaucaaagguguugagcugaagucaggauacaaagacuggauccuauggauuuccuuugccauaucaugcuuuuugcuuuguguuguuuugcugggguucaucaugugggccugccaaaaaggcaacauuaggugcaacauuugcauuuga

SEQ ID NO: 41093 - RNA, 1701 nt, Artificial Sequence
  derived and/or modified CDS sequence (wt) from hemagglutinin__InfluenzaA__AFM71731
augaagacuaucauugcuuugagcuacauuuuaugucugguuuucgcccaaaaacuucccggaaaugacaacagcacagcaacgcugugccugggacaucaugcagugccaaacggaacgcuagugaaaacaaucacgaaugaucaaauugaagugacuaaugcuacugagcugguucagaguuccucaacagguagaauaugcgacaguccucaccgaauccuugauggaaaaaacugcacacugauagaugcucuauugggagacccucauugugauggcuuccaaaauaaggaaugggaccuuuuuguugaacgcagcaaagcuuacagcaacuguuacccuuaugaugugccggauuaugccucccuuaggucacuaguugccucaucaggcacccuggaguuuaucaaugaagacuucaauuggacuggagucgcucagaguggggaaagcuaugcuugcaaaaggggaucuguuaaaaguuucuuuaguagauugaauugguugcacaaaucagaauacaaauauccagcgcugaacgugacuaugccaaacaauggcaaauuugacaaauuguacauuugggggguucaccacccgagcacggacagagaacaaaccaaccuauauguucgagcaucagggagagucacagucucuaccaaaagaagccaacaaacuguaaucccgaauaucgggucuagacccuggguaaggggucuguccaguagaauaagcaucuauuggacaauaguaaaaccgggagacauacuuuugauuaauagcaccgggaaccuaauugcuccucgggguuacuucaaaauacgaacugggaaaagcucaauaaugaggucagaugcacccauuggcaccugcaguucugaaugcaucacuccaaauggaagcauccccaaugacaaaccuuuucaaaauguaaacaggaucacauauggggcaugucccagauauguuaagcaaaacacucugaaauuggcaacagggaugcggaauguaccagagaaacaaacuagaggcauauucggcgcaaucgcagguuucauagaaaaugguugggagggaaugguagacgguugguacgguuucaggcaucaaaauucugagggcacaggacaagcagcagaucuuaaaagcacucaagcagcaaucgaccaaaucaacgggaaacugaauagguuaaucgagaaaacgaacgagaaauuccaucaaaucgaaaaggaauucucagaaguagaagggagaauucaggaccucgagaaauauguugaagacacuaaaauagaucucuggucuuacaacgcggagcuucuuguugcccuggagaaccaacauacaauugaucugacugacucagaaaugaacaaacuguuugaaaaaacaaggaagcaacugagggaaaaugcugaggacaugggcaaugguugcuucaaaauauaccacaaaugugacaaugccugcauagggucaaucagaaauggaacuuaugaccaugauguauacagagacgaagcauuaaacaaccgguuccagaucaaagguguugagcugaagucaggauacaaagauuggauccuauggauuuccuuugccauaucaugcuuuuugcuuuguguuguuuugcugggguucaucaugugggccugccaaaaaggcaacauuaggugcaacauuugcauuuga

SEQ ID NO: 41094 - RNA, 1701 nt, Artificial Sequence
  derived and/or modified CDS sequence (wt) from hemagglutinin__InfluenzaA__AFM71754
augaagacuaucauugcuuugagcuacauucuaugucugguuuucgcucaaaaacuuccuggaaaugacaacagcacggcaacgcugugccuugggcaccaugcaguaccaaacggaacgauagugaaaacaaucacgaaugaccaaauugaaguuacuaaugcuacugagcugguucagaguuccucaacaggugaaauaugcgacaguccucaucagauccuugauggaaaaaacugcacacuaauagaugcucuauugggagacccucagugugauggcuuccaaaauaagaaaugggaccuuuuuguugaacgcagcaaagccuacagcaacuguuacccuuaugaugugccggauuaugccucccuuaggucacuaguugccucauccggcacacuggaguuuaacaaugaaagcuucaauuggacuggagucacucaaaacggaacaagcucugcuugcauaaggagaucuaaaaacaguuucuuuaguagauugaauugguugacccacuuaaacuucaaauacccagcauugaacgugacuaugccaaacaaugaacaauuugacaaauuguacauuugggggguucaccacccggguacggacaaagaccaaaucuucccguaugcucaagcaucaggaagaaucacagucucuaccaaaagaagccaacaaacugcaaucccgaauaucggaucuagacccagaguaaggaauaucccuagcagaauaagcaucuauuggacaauaguaaaaccgggagacauacuuuugauuaacagcacagggaaucuaauugcuccuagggguuacuucaaaauacgaagugggaaaagcucaauaaugagaucagaugcacccauuggcaaaugcaauucugaaugcaucacuccaaauggaagcauucccaaugacaaaccauuccaaaauguaaacaggaucacauacggggccugucccagauauguuaagcaaaacacucugaaauuggcaacagggaugcgaaauguaccagagaaacaaacuagaggcauauuuggcgcaaucgcggguuucauagaaaaugguugggagggaaugguggaugguugguacgguuucaggcaucaaaauucugagggaagaggacaagcagcagaucucaaaagcacucaagcagcaaucgaucaaaucaaugggaagcugaauagauugaucgggaaaaccaacgagaaauuccaucagauugaaaaagaauucucagaagucgaagggagaauucaggaccuugagaaauauguugaggacacuaaaauagaucucuggucauacaacgcggagcuucuuguugcccuggagaaccaacauacaauugaucuaacugacucagaaaugaacaaacuguuugaaaaaacaaagaagcaacugagggaaaaugcugaggauaugggcaaugguuguuucaaaauauaccacaaaugugacaaugccugcauaggaucaaucagaaauggaacuuaugcccacgauguauacagagaugaagcauuaaacaaccgguuucagaucaagggaguugagcugaagucaggguacaaagauuggauccuauggauuuccuuugccauaucauguuuuuugcuuuguguugcuuuguugggguucaucaugugggccugccaaaaaggcaacauuaggugcaacauuugcauuuga

SEQ ID NO: 41095 - RNA, 1701 nt, Artificial Sequence
  derived and/or modified CDS sequence (wt) from hemagglutinin__InfluenzaA__AFM71768
augaagacuaucauugcuuugagcuacauucuaugucugguuuucgcucaaaaacuuccuggaaaugacaacagcacggcaacgcugugccuugggcaccaugcaguaccaaacggaacgauagugaaaacaaucacgaaugaccaaauugaaguuacuaaugcuacugagcugguucagaguuccucaacaggugaaauaugcgacaguccucaucagauccuugauggaaaaaacugcacacuaauagaugcucuauugggagacccucagugugaugacuuccaaaauaagaaaugggaccuuuuuguugaacgcagcaaagccuacagcaacuguuacccuuaugaugugccggauuaugccucccuuaggucacuaguugccucauccggcacacuggaguuuaacaaugaaagcuucaauuggacuggagucacucaaaacggaacaagcucugcuugcauaaggagaucuaaaaacaguuucuuuaguagauugaauugguugacccacuuaaacuucaaauacccagcauugaacgugacuaugccaaacaaugaacaauuugacaaauuguacauuugggggguucaccacccggguacggacaaagaccaaaucuucccguaugcucaagcaucaggaagaaucacagucucuaccaaaagaagccaacaaacugcaaucccgaauaucggaucuagacccagaguaaggaauaucccuagcagaauaagcaucuauuggacaauaguaaaaccgggagacauacuuuugauuaacagcacagggaaucuaauugcuccuagggguuacuucaaaauacgaagugggaaaagcucaauaaugagaucagaugcacccauuggcaaaugcaauucugaaugcaucacuccaaauggaagcauucccaaugacaaaccauuccaaaauguaaacaggaucacauacggggccugucccagauauguuaagcaaaacacucugaaauuggcaacagggaugcgaaauguaccagagaaacaaacuagaggcauauuuggcgcaaucgcggguuucauagaaaaugguugggagggaaugguggaugguugguacgguuucaggcaucaaaauucugagggaagaggacaagcagcagaucucaaaagcacucaagcagcaaucgaucaaaucaaugggaagcugaauagauugaucgggaaaaccaacgagaaauuccaucagauugaaaaagaauucucagaagucgaagggagaauucaggaccuugagaaauauguugaggacacuaaaauagaucucuggucauacaacgcggagcuucuuguugcccuggagaaccaacauacaauugaucuaacugacucagaaaugaacaaacuguuugaaaaaacaaagaagcaacugagggaaaaugcugaggauaugggcaaugguuguuucaaaauauaccacaaaugugacaaugccugcauaggaucaaucagaaauggaacuuaugcccacgauguauacagagaugaagcauuaaacaaccgguuucagaucaagggaguugagcugaagucaggguacaaagauuggauccuauggauuuccuuugccauaucauguuuuuugcuuuguguugcuuuguugggguucaucaugugggccugccaaaaaggcaacauuaggugcaacauuugcauuuga

SEQ ID NO: 41096 - RNA, 1701 nt, Artificial Sequence
  derived and/or modified CDS sequence (wt) from hemagglutinin__InfluenzaA__AFM71791
augaagacuaucauugcuuugagcuacacucuaugucugguuuucgcucaaaaacuuccuggaaaugacaacagcacggcaacgcugugccuugggcaccaugcaguaccaaacggaacgauagugaaaacaaucacgaaugaccaaauugaaguuacuaaugcuacugagcugguucagaguuccucaacaggugaaauaugcgacaguccucaucagauccuugauggaaaaaacugcacacuaauagaugcucuauugggagacccucagugugauggcuuccaaaauaagaaaugggaccuuuuuguugaacgcagcaaagccuacagcaacuguuacccuuaugaugugccggauuaugccucccuuaggucacuaguugccucauccggcacacuggaguuuaacaaugaaagcuucaauuggacuggagucacucaaaacggaacaagcucugcuugcauaaggagaucuaaaaacaguuucuuuaguagauugaauugguugacccacuuaaacuucaaauacccagcauugaacgugacuaugccaaacaaugaacaauuugacaaauuguacauuugggggguucaccacccggguacggacaaagaccaaaucuucccguaugcucaagcaucaggaagaaucacagucucuaccaaaagaagccaacaaacuguaaucccgaauaucggaucuagacccagaguaaggaauaucccuagcagaauaagcaucuauuggacaauaguaaaaccgggagacauacuuuugauuaacagcacagggaaucuaauugcuccuagggguuacuucaaaauacgaagugggaaaagcucaauaaugagaucagaugcacccauuggcaaaugcaauucugaaugcaucacuccaaauggaagcauucccaaugacaaaccauuccaaaauguaaacaggaucacauacggggccugucccagauauguuaagcaaaacacucugaaauuggcaacagggaugcgaaauguaccagagaaacaaacuagaggcauauuuggcgcaaucgcggguuucauagaaaaugguugggagggaaugguggaugguugguacgguuucaggcaucaaaauucugagggaagaggacaagcagcagaucucaaaagcacucaagcagcaaucgaucaaaucaaugggaagcugaauagauugaucgggaaaaccaacgagaaauuccaucagauugaaaaggaauucucagaagucgaagggagaauucaggaccuugagaaauauguugaggacacuaaaauagaucucuggucauacaacgcggagcuucuuguugcccuggagaaccaacauacaauugagcuaacugacucagaaaugaacaaacuguuugaaaaaacaaagaagcaacugagggaaaaugcugaggauaugggcaaugguuguuucaaaauauaccacaaaugugacaaugccugcauaggaucaaucagaaauggaacuuaugaccacgauguauacagagaugaagcacuaaacaaccgguuucagaucaagggaguugagcugaagucaggguacaaagauuggauccuauggauuuccuuugccauaucauguuuuuugcuuuguguugcuuuguugggguucaucaugugggccugccaaaaaggcaacauuaggugcaacauuugcauuuga

SEQ ID NO: 41097 - RNA, 1701 nt, Artificial Sequence
  derived and/or modified CDS sequence (wt) from hemagglutinin__InfluenzaA__AFM71824
augaagacuaucauugcuuugagcuacauucuaugucugguuuucgcucaaaaacuuccuggaaaugacaacagcacggcaacgcugugccuugggcaccaugcaguaccaaacggaacgauagugaaaacaaucacgaaugaccaaauugaaguuacuaaugcuacugagcugguucagaguuccucaacaggugaaauaugcgacaguccucaucagauccuugauggaaaaaacugcacacuaauagaugcucuauugggagacccucagugugauggcuuccaaaauaagaaaugggaccuuuuuguugaacgcagcaaagccuacagcaacuguuacccuuaugaugugccggauuaugccucccuuaggucacuaguugccucauccggcacacuggaguuuaacaaugaaagcuucaauuggacuggagucacucaagacggaacaagcucugcuugcauaaggagaucuaaaaacaguuucuuuaguagauugaauugguugacccacuuaaacuucaaauacccagcauugaacgugacuaugccaaacaaugaacaauuugacaaauuguacauuugggggguucaccacccggguacggacaaagaccaaaucuucccguaugcucaagcaucaggaagaaucacagucucuaccaaaagaagccaacaaacugcaaucccgaauaucggaucuagacccagaguaaggaauaucccuagcagaauaagcaucuauuggacaauaguaaaaccgggagacauacuuuugauuaacagcacagggaaucuaauugcuccuagggguuacuucaaaauacgaagugggaaaagcucaauaaugagaucagaugcacccauuggcaaaugcaauucugaaugcaucacuccaaauggaagcauucccaaugacaaaccauuccaaaauguaaacaggaucacauacggggccugucccagauauguuaagcaaaacacucugaaauuggcaacagggaugcgaaauguaccagagaaacaaacuagaggcauauuuggcgcaaucgcggguuucauagaaaaugguugggagggaaugguggaugguugguacgguuucaggcaucaaaauucugagggaagaggacaagcagcagaucucaaaagcacucaagcagcaaucgaucaaaucaaugggaagcugaauagauugaucgggaaaaccaacgagaaauuccaucagauugaaaaagaauucucagaagucgaagggagaauucaggaccuugagaaauauguugaggacacuaaaauagaucucuggucauacaacgcggagcuucuuguugcccuggagaaccaacauacaauugaucuaacugacucagaaaugaacaaacuguuugaaaagacaaagaagcaacugagggaaaaugcugaggauaugggcaaugguuguuucaaaauauaccacaaaugugacaaugccugcauaggaucaaucagaaauggaacuuaugaccacgauguauacagagaugaagcauuaaacaaccgguuucagaucaagggaguugagcugaagucaggguacaaagauuggauccuauggauuuccuuugccauaucauguuuuuugcuuuguguugcuuuguugggguucaucaugugggccugccaaaaaggcaacauuaggugcaacauuugcauuuga

SEQ ID NO: 41098 - RNA, 1701 nt, Artificial Sequence
  derived and/or modified CDS sequence (wt) from hemagglutinin__InfluenzaA__AFM71835
augaagacuaucauugcuuugagcuacauucuaugucugguuuucgcucaaaaacuuccuggaaaugacaacagcacggcaacgcugugccuugggcaccaugcaguaccaaacggaacgauagugaaaacaaucacgaaugaccaaauugaaguuacuaaugcuacugagcugguucagaguuccucaacaggugaaauaugcgacaguccucaucagauccuugauggagaaaacugcacacuaauagaugcucuauugggagacccucagugugauggcuuccaaaauaagaaaugggaccuuuuuguugaacgaagcaaagccuacagcagcuguuacccuuaugaugugccggauuaugccucccuuaggucacuaguugccucauccggcacacuggaauuuaacagugaaagcuucaauuggacuggagucacucaaaacggaacaagcucugcuugcauaaggagaucuuauaauaguuucuuuaguagauugaauugguugacccacuuaaacuucaaauacccagcauugaacgugacuaugccaaacaaugaacaauuugacaaauuguacauuugggggguucaccacccggguacggacaaggaccaaaucuucccguaugcucaagcaucaggaagaaucacaguaucuaccaaaagaagccaacaagcuguaaucccgaauaucggaucuagacccagaguaaggaauaucccuagcagaauaagcaucuauuggacaauaguaaaaccgggagacauacuuuugauuaacagcacagggaaucuaauugcuccuagggguuacuucaaaauacgaagugggaaaagcucaauaaugagaucagaugcacccauuggcaaaugcaauucugaaugcaucacuccaaauggaagcauucccaaugacaaaccauuccaaaauguaaacaggaucacauacggggccugucccagauauauuaagcaaagcacucugaaauuggcaacaggaaugcgaaauguaccagagaaacaaacuagaggcauauuuggcgcaauagcggguuucauagaaaaugguugggagggaaugguggaugguugguacgguuucaggcaucaaaauucugagggaagaggacaagcagcagaucucaaaagcacucaagcagcaaucgaucaaaucaaugggaagcugaauagauugaucgggaaaaccaacgagaaauuccaucagauugaaaaagaauucucagaagucgaagggagaauucaggaccuugagaaauauguugaggacacuaaaauagaucucuggucauacaacgcagagcuucuuguugcccuugagaaccaacauacaauugaucuaacugacucagaaaugaacaaacuguuugaaaaaacaaagaagcaacugagggaaaaugcugaggauaugggcaaugguuguuucaaaauauaccacaaaugugacaaugccugcauaggaucaaucagaaauggaacuuaugaccacgauguauacagagaugaagcauuaaacaaccgguuccagaucaagggaguugagcugaagucaggguacaaagauuggauccuauggauuucccuugccauaucauguuuuuugcuuuguguugcuuuguugggguucaucaugugggccugccaaaaaggcaacauuaggugcaacauuugcauuuga

SEQ ID NO: 41099 - RNA, 1698 nt, Artificial Sequence
  derived and/or modified CDS sequence (wt) from hemagglutinin__InfluenzaA__AFM71846
augaaggcaaaccuacugguccuguuaugugcacuugcagcugcagaugcagacacaauauguauaggcuaccaugcgaacaauucaaccgacacuguugacacaguacucgagaagaaugugacagugacacacucuguuaaccugcucgaagacagccacaacggaaaacuauguagauuaaaaggaauagccccacuacaauuggggaaauguaacaucgccggauggcucuugggaaacccagaaugcgacccacugcuuccagugagaucaugguccuacauuguagaaacaccaaacucugagaauggaauauguuauccaggagauuucaucgacuaugaggagcugagggagcaauugagcucagugucaucauucgaaagauucgaaauauuucccaaagaaagcucauggcccaaccacaacacaaacggaguaacggcagcaugcucccaugaggggaaaagcaguuuuuacagaaauuugcuauggcugacggagaaggagggcucauacccaaagcugaaaaauucuuaugugaacaaaaaagggaaagaaguccuuguacugugggguauucaucacccgucuaacaguaaggaacaacagaaucucuaucagaaugaaaaugcuuaugucucuguagugacuucaaauuauaacaggagauuuaccccggaaauagcagaaagacccaaaguaagagaucaagcugggaggaugaacuauuacuggaccuugcuaaaacccggagacacaauaauauuugaggcaaauggaaaucuaauagcaccaauguaugcuuucgcacugaguagaggcuuuggguccggcaucaucaccucaaacgcaucaaugcaugaguguaacacgaagugucaaacaccccugggagcuauaaacagcagucucccuuaccagaauauacacccagucacaauaggagagugcccaaaauacgucaggagugccaaauugaggaugguuacaggacuaaggaacauuccguccauucaauccagaggucuauuuggagccauugccgguuuuauugaagggggauggacuggaaugauagauggaugguaugguuaucaucaucagaaugaacagggaucaggcuaugcagcggaucaaaaaagcacacaaaaugccauuaacgggauuacaaacaaggugaacacuguuaucgagaaaaugaacauucaauucacagcuguggguaaagaauucaacaaauuagaaaaaaggauggaaaauuuaaauaaaaaaguugaugauggauuucuggacauuuggacauauaaugcagaauuguuaguucuacuggaaaaugaaaggacucuggauuuccaugacucaaaugugaagaaucuguaugagaaaguaaaaagccaauuaaagaauaaugccaaagaaaucggaaauggauguuuugaguucuaccacaagugugacaaugaaugcauggaaaguguaagaaaugggacuuaugauuaucccaaauauucagaagagucaaaguugaacagggaaaagguagauggagugaaauuggaaucaauggggaucuaucagauucuggcgaucuacucaacugucgccaguucacuggugcuuuuggucucccugggggcaaucaguuucuggauguguucuaauggaucuuugcagugcagaauaugcaucuga

SEQ ID NO: 41100 - RNA, 1701 nt, Artificial Sequence; identical to SEQ ID NO: 34330
  derived and/or modified CDS sequence (wt) from hemagglutinin__InfluenzaA__AFM71857

SEQ ID NO: 41101 - RNA, 1701 nt, Artificial Sequence
  derived and/or modified CDS sequence (wt) from hemagglutinin__InfluenzaA__AFM71868
augaagacuaucauugcuuugagcuacauucuaugucugguuuucgcccaaaaacuucccggaaaugacaacagcacggcaacgcugugccuugggcaccaugcaguaccaaacggaacgauagugaaaacaaucacgaaugaccaaauugaaguuacuaaugcuacugagcugguucagaguuccucaacagguggaauaugcgacaguccucaucagauccuugauggagaaaacugcacacuaauagaugcucuauugggagacccucagugugauggcuuccaaaauaagaaaugggaccuuuuuguugaacgcagcaaagccuacagcaacuguuacccuuaugauguaccggauuaugccucccuuaggucacuaguugccucauccggcacacuggaguuuaacaaugaaagcuucaauuggacuggagucacucaaaauggaacaagcucuucuugcaaaaggagaucuaauaacaguuucuuuaguagauugaauugguugacccacuuaaaauucaaauacccagcauugaacgugacuaugccaaacaaugaaaaauuugacaaauuguacauuugggggguucaccacccgguuacggacaaugaccaaaucagacuauaugcucaagcuucaggaagaaucacagucucuaccaaaagaagccaacaaacuguaaucccgaauaucggaucuagacccaggguaagggauauccccagcagaauaagcaucuauuggacaauaguaaaaccgggagacauacuuuugauuaacagcacagggaaucuaauugcuccucgggguuacuucaaaauacgaagugggaaaagcucaauaaugagaucagaugcacccauuggcaaaugcaauucugaaugcaucacuccaaauggaagcauucccaaugacaaaccauuucaaaauguaaacaggaucacauauggggccugucccagauauguuaagcaaaacacucugaaauuggcaacagggaugcgaaauguaccagagaaacaaacuagaggcauauuuggcgcaaucgcggguuucauagaaaaugguugggagggaaugguggaugguugguacgguuucaggcaucaaaauucugagggaauaggacaagcagcagaucucaaaagcacucaagcagcaaucaaccaaaucaaugggaaacugaauagguugaucgggaaaaccaacgagaaauuccaucagauugaaaaagaauucucagaaguagaagggagaauucaggaccucgagaaauauguugaggacacuaaaauagaucucuggucauacaacgcggagcuucuuguugcccuggagaaccaacauacaauugaucuaacugacucagaaaugaacaaacuguuugaaagaacaaagaagcaacugagggaaaaugcugaggauaugggcaaugguuguuucaaaauauaccacaaaugugacaaugccugcauagggucaaucagaaauggaacuuaugaccaugauguauacagagaugaagcauuaaacaaccgguuccagaucaaagguguugagcugaagucaggauacaaagauuggauccuauggauuuccuuugccauaucauguuuuuugcuuuguguuguuuuguugggguucaucaugugggccugccaaaaaggcaacauuaggugcaacauuugcauuuga

SEQ ID NO: 41102 - RNA, 1701 nt, Artificial Sequence; identical to SEQ ID NO: 39010
  derived and/or modified CDS sequence (wt) from hemagglutinin__InfluenzaA__AFM71879

SEQ ID NO: 41103 - RNA, 1701 nt, Artificial Sequence
  derived and/or modified CDS sequence (wt) from hemagglutinin__InfluenzaA__AFM71890
augaaggcaagacuacugguccuguuaugugcacuugcagcuacagaugcagacacaauauguauaggcuaccaugcgaacaacucaaccgacacuguugacacacuacucgagaagaaugugacagugacacauucuguuaaccugcucgaagacagccacaacgggaaacuauguaaauuaaaaggaauagccccacuacaauuggggaaauguaacaucgccggauggcucuugggaaacccagaaugcgacucacugcuuccagcgagaucaugguccuacauuguagaaacaccaaacucugagaauggagcauguuauccaggagauuucaucgacuaugaggaacugaaggagcaauugagcucaguaucaucauuagaaagauucgaaauauuucccaaggaaaguucauggcccaaccacaacacacucaaaggaguaacagcaucaugcucccaugggggaaaaagcaguuuuuacagaaauuugcuauggcugacgaaaacggaggacucauacccaaagcugagcaauuccuaugugaacaauaaagggaaagaaguccuuguacuaugggguguucaucacccgucuagcagugaugagcaacagagucucuaucauaauguaaaugcuuaugucucuguagugucuucaaauuauaacaggagauucaccccggaaauagcugcaagacccaaaguaagaaaucaaccugggaggaugaacuauuacuggaccuugcuagaacccggagacacaauaauauuugaggcaacugguaaucuaauagcaccaugguaugcuuucgcacugaguagaggguuuggguccggcaucaucaccucaaacgcgucaaugcaugaguguaacacgaagugucaaacaccccagggagcuauaaacagcagucucccuuuccagaauauacacccagucacaauaggagagugcccaaaauaugucaggaguaccaaauugaggaugguuacaggacuaagaaacaucccauccauucaauucagaggucuauuuggagccauugcugguuuuauugaggggggauggacuggaaugauagauggaugguaugguuaucaucaucagaaugaacagggaucaggcuaugcagcggaucaaaaaagcacacaaaaugccauuaacgggauuacaaacaaggugaacucuguuaucgagaaaaugaacacucaauucacagcugugaguaaagaauucaacaacuuagaaaaaaggauggaaaauuuaaauaaaaaaguugaugauggauuucuggacauuuggacauauaaugcagaauuguuaguucuacuggaaaaugaaaggacuuuggauuuccacgauuuaaaugugaagaaucuguacgagaaaguaaaaagccaauuaaagaauaaugccaaagaaaucggaaauggguguuuugaguucuaccacaagugugacaauaaaugcauggaaaguguaagaaaugggacuuaugauuauccaaaauauucagaagaaucaaaguugaacagggaaaagauagauggagugaaauuggaaucaauggggguguaucagauucuggcgaucuacucaacugucgccaguucacuggugcuuuuggucucccugggggcaaucaguuucuggauguguucuaaugggucuuugcagugcagaauaugcaucuga

SEQ ID NO: 41104 - RNA, 1701 nt, Artificial Sequence
  derived and/or modified CDS sequence (wt) from hemagglutinin__InfluenzaA__AFM71901
augaaggcaagacuacugguccuguuaugugcacuugcagcuacagaugcagacacaauauguauaggcuaccaugcgaacaacucaaccgacacuguugacacacuacucgagaagaaugugacagugacacauucuguuaaccugcucgaagacagccacaacgggaaacuauguaaauuaaaaggaauagccccacuacaauuggggaaauguaacaucgccggauggcucuugggaaacccagaaugcgacucacugcuuccagcgagaucaugguccuacauuguagaaacaccaaacucugagaauggagcauguuauccaggagauuucaucgacuaugaggaacugaaggagcaauugagcucaguaucaucauuagaaagauucgaaauauuucccaaggaaaguucauggcccaaccacaacacacucaaaggaguaacagcaucaugcucccaugggggaaaaagcaguuuuuacagaaauuugcuauggcugacgaaaacggaggacucauacccaaagcugagcaauuccuaugugaacaauaaagggaaagaaguccuuguacuaugggguguucaucacccgucuagcagugaugagcaacagagucucuaucauaauguaaaugcuuaugucucuguagugucuucaaauuauaacgggagauucaccccggaaauagcugcaagacccaaaguaagaaaucaaccugggaggaugaacuauuacuggaccuugcuagaacccggagacacaauaauauuugaggcaacugguaaucuaauagcaccaugguaugcuuucgcacugaguagaggguuuggguccggcaucaucaccucaaacgcgucaaugcaugaguguaacacgaagugucaaacaccccagggagcuauaaacagcagucucccuuuccagaauauacacccagucacaauaggagagugcccaaaauaugucaggaguaccaaauugaggaugguuacaggacuaagaaacaucccauccauucaauucagaggucuauuuggagccauugcugguuuuauugaggggggauggacuggaaugauagauggaugguaugguuaucaucaucagaaugaacagggaucaggcuaugcagcggaucaaaaaagcacacaaaaugccauuaacgggauuacaaacaaggugaacucuguuaucgagaaaaugaacacucaauucacagcugugaguaaagaauucaacaacuuagaaaaaaggauggaaaauuuaaauaaaaaaguugaugauggauuucuggacauuuggacauauaaugcagaauuguuaguucuacuggaaaaugaaaggacuuuggauuuccaugaucuaaaugugaagaaucuguacgagaaaguaaaaagccaauuaaagaauaaugccaaagaaaucggaaauggguguuuugaguucuaccacaagugugacaauaaaugcauggaaaguguaagaaaugggacuuaugauuauccaaaauauucagaagaaucaaaguugaacagggaaaagauagauggagugaaauuggaaucaauggggguguaucagauucuggcgaucuacucaacugucgccaguucacuggugcuuuuggucucccugggggcaaucaguuucuggauguguucuaaugggucuuugcagugcagaauaugcaucuga

SEQ ID NO: 41105 - RNA, 1701 nt, Artificial Sequence
  derived and/or modified CDS sequence (wt) from hemagglutinin__InfluenzaA__AFM71923
augaagacuaucauugcuuugagcuacauuuucugucugguucucggccaagaucuuccaggaaaugacaacagcacagcaacgcugugccugggacaucaugcggugccaaacggaacacuagugaaaacaaucacaaaugaucagauugaagugacuaaugcuacugagcugguucagagcuccucaacggggaaaauaugcaacaauccucaucgaauccuugauggaauagacugcacacugauagaugcucuauugggggacccucauugugauagcuuucaaaaugagacaugggaccuuuucguugaacgcagcaaagcuuucagcaacuguuacccuuaugaugugccagauuaugccucccuuaggucacuaguugccucgucaggcacucuggaguuuaucaaugaggguuucacuuggacuggggucacucagaaugggggaagcaaugcuugcaaaaggggaccugauagcgguuuuuucaguagacugaacugguuguacaaaucaggaagcacauauccagugcugaacgugacuaugccaaacaaugacaauuuugacaaacuauacauuugggggguucaccacccgagcacgaaccaagaacaaaccagccuauauguucaagcaucagggagagucacagucucuaccaagagaagccagcaaacuauaaucccgaauaucgggucuagacccuggguaaggggucugucuaguagaauaagcaucuauuggacaauaguuaaaccgggagacauacugguaauuaauaguaaugggaaccuaauugcuccucgggguuauuucaaaaugcgcacugggaaaagcucaauaaugaggucagaugcaccuauugguaccuguauuucugaaugcaucacuccaaauggaagcauucccaaugacaaacccuuucaaaacguaaacaagaucacauauggggcaugucccaaguauguuaagcaaaacacccugaaguuggcaacagggaugcggaauguaccagagaaacaaacuagaggccuauucggcgcaauagcagguuucauagaaaaugguugggagggaaugauagacgguugguacgguuucaggcaucaaaauucugagggcacaggacaagcagcagaucuuaaaagcacucaagcagccaucgaccaaaucaaugggaaacugaauaggguaaucgagaagacgaacgagaaauuccaucaaaucgaaaaggaauucucagaaguagaagggagaauucaggaccucgagaaauacguugaagacacuaaaauagaucucuggucuuacaaugcggagcuucuugucgcucuggagaaccaacauacaauugaucugacugacucggaaaugaacaagcuguuugaaaaaacaaggaggcaacugagggaaaaugcugaggacaugggcaaugguugcuucagaauauaccacaaaugugacaaugcuugcauagggucaaucagaaaugggacuuaugaccaugauguauacagagacgaagcauuaaacaaccgguuucagaucaaagguguugaacugaaaucaggauacaaagacuggauccuguggauuuccuuugccauaucaugcuuuuugcuuuguguuguuuugcugggguucaucaugugggccugccaaaaaggcaacauuaggugcaacauuugcauuuga

SEQ ID NO: 41106 - RNA, 1701 nt, Artificial Sequence
  derived and/or modified CDS sequence (wt) from hemagglutinin__InfluenzaA__AFM71934
augaagacuaucauugcuuugagcuacauuuucugucugguucuaggccaagaucuuccaggaaaugacaacagcacagcaacgcugugccugggacaucaugcggugccaaacggaacacuagugaaaacaaucacaaaugaucagauugaagugacuaaugcuacugagcugguucagagcuccucaacggggaaaauaugcaacaauccucaucgaauccuugauggaauagacugcacacugauagaugcucuauugggggacccucauugugauggcuuucaaaaugagacaugggaccuuuucguugaacgcagcaaagcuuucagcaacuguuacccuuaugaugugccagauuaugccucccuuaggucacuaguugccucgucaggcacucuggaguuuaucaaugaggguuucacuuggacuggggucacucagaaugggggaagcaaugcuugcaaaaggggaccugauagcgguuuuuucaguagacugaacugguuguacaaaucaggaagcacauauccagugcugaacgugacuaugccaaacaaugacaauuuugacaaacuauacauuugggggguucaccacccgagcacgaaccaagaacaaaccagccuauauguucaagcaucagggagagucacagucucuaccaagggaagccagcaaacuauaaucccgaauaucgggucuagacccuggguaaggggucugucuaguagaauaagcaucuauuggacaauaguuaaaccgggagacauacugguaauuaauaguaaugggaaccuaauugcuccucgggguuauuucaaaaugcgcacugggaaaagcucaauaaugaggucagaugcaccuauugguaccuguauuucugaaugcaucacuccaaauggaagcauucccaaugacaaacccuuucaaaacguaaacaagaucacauauggggcaugucccaaguauguuaagcaaaacacccugaaguuggcaacagggaugcggaauguaccagagaaacaaacuagaggccuauucggcgcaauagcagguuucauagaaaaugguugggagggaaugauagacgguugguacgguuucaggcaucaaaauucugagggcacaggacaagcagcagaucuuaaaagcacucaagcagccaucgaccaaaucaaugggaaacugaauaggguaaucgagaagacgaacgagaaauuccaucaaaucgaaaaggaauucucagaaguagaagggagaauucaggaccucgagaaauacguugaagacacuaaaauagaucucuggucuuacaaugcggagcuucuugucgcucuggagaaccaacauacaauugaucugacugacucggaaaugaacaagcuguuugaaaaaacaaggaggcaacugagggaaaaugcugaggacaugggcaaugguugcuucagaauauaccacaaaugugacaaugcuugcauagggucaaucagaaaugggacuuaugaccaugauguauacagagacgaagcauuaaacaaccgguuucagaucaaagguguugaacugaaaucaggauacaaagacuggauccuguggauuuccuuugccauaucaugcuuuuugcuuuguguuguuuugcugggguucaucaugugggccugccaaaaaggcaacauuaggugcaacauuugcauuuga

SEQ ID NO: 41107 - RNA, 1701 nt, Artificial Sequence
  derived and/or modified CDS sequence (wt) from hemagglutinin__InfluenzaA__AFM71945
augaagacuaucauugcuuugagcuacauuuucugucugguucucggccaagacuuuccaggaaaugacaacagcacagcaacgcugugccugggacaucaugcggugccaaacggaacacuagugaaaacaaucacaaaugaucagauugaagugacuaaugcuacugagcugguucagaguuccucaacggguaaaauaugcaacaauccucaucgaauccuugauggaauaaacugcacacugauagaugcucuguugggggacccucauugugauggcuuucaaaaugagacaugggaccuuuucguugaacgcagcaaagcuuucagcaacuguuacccuuaugaugugccagauuaugccucccuuaggucacuaguugccucgucaggcacucuggaguuuaucaaugaaggcuucacuuggacuggggucacucagaaugggggaagcaaugcuugcaaaaggggaccugauagcgguuuuuucaguagacugaacugguuguacaaaucaggaagcgcauauccagugcugaacgugacuaugccaaacaaugacaauuuugacaaacuauacauuugggggguucaccacccgagcacggaccaagaacaaaccaaccuauauguucaagcaucagggagagucacagucuccacaaagagaagccagcaaacuauaaucccgaauaucgggucuagacccuggguaaggggucugucuaguagaauaagcaucuauuggacaauaguuaaaccgggagacauacugguaauuaauaguaaugggaaccuaauugcuccucgggguuacuucaaaaugcgcacugggaaaagcucaauaaugaggucagaugcaccuauuggcaccugcauuucugaaugcaucacuccaaauggaagcauucccaaugacaagcccuuucaaaacguaaacaagaucacauauggggcaugucccaaguauguuaagcaaaacacucugaaguuggcaacagggaugcggaauguaccagagaaacaaacuagaggcauauucggcgcaauagcagguuucauagaaaaugguugggagggaaugauagacgguugguacgguuucaggcaucaaaauucugagggcacaggacaagcagcagaucuuaaaagcacucaagcagccaucgaccaaaucaaugggaaacugaauaggguaaucgagaagacgaacgagaaauuccaucaaaucgaaaaggaauucucagaaguagaagggagaauucaggaccucgagaaauacguugaagacacuaaaauagaucucuggucuuacaaugcggagcuucuugucgcucuggagaaccaacauacaauugaucugacugacucggaaaugaacaaacuguuugaaaaaacaaggaggcaacugagggaaaaugcugaggacaugggcaaugguugcuucaaaauauaccacaaaugugacaaugcuugcauagggucaaucagaaaugggacuuaugaccaugauguauacagagacgaagcauuaaacaaccgguuucagaucaaagguguugaacugaagucaggauacaaagacuggauccuguggauuuccuuugccauaucaugcuuuuugcuuuguguuguuuugcugggguucaucaugugggccugccaaaaaggcaacauuaggugcaacauuugcauuuga

SEQ ID NO: 41108 - RNA, 1701 nt, Artificial Sequence; identical to SEQ ID NO: 41107
  derived and/or modified CDS sequence (wt) from hemagglutinin__InfluenzaA__AFM71956

SEQ ID NO: 41109 - RNA, 1704 nt, Artificial Sequence
  derived and/or modified CDS sequence (wt) from hemagglutinin__InfluenzaA__AFM71978
augaagacuaucauugcuuugagcuacauuuucugucugguuuucgcccaagaccuuccaggaaaugacaacaacagcacagcaacgcugugccugggacaucaugcggugccaaacggaacgcuagugaaaacaaucacgaaugaucagauugaagugacuaaugcuacugagcugguucagaguuccucaacggguaaaauaugcaacaauccucaucgaauccuugauggaauaaacugcacacugauagaugcucuauugggggacccucauugugauggauuucaaaaugagaaaugggaccuuuucguugaacgcagcaaagcuuucagcaacuguuacccuuaugaugugccagauuaugccucccuuaggucacuaguugccucgucaggcacucuggaguuuaucaaugaaggcuucaauuggacuggggucacucagaaugggggaagcaaugcuugcaaaagaggaccugauagcgguuuuuucaguagacugaacugguuguacaaaucaggaagcacauauccagugcaaaacgugaccaugccaaacaaugacaauucugacaaacuauacauuugggggguucaccacccgagcacggacaaagaacaaaccaaccuauauguucaagcaucagggaaagucacagucuccaccaagagaagccagcaaacuauaaucccgaaugucgggucuagacccuggguaaggggucugucuaguagaauaagcaucuauuggacaauaguuaaaccgggagacauacugguaauuaauaguaaugggaaccuaauugcuccucgggguuacuucaaaaugcgcacugggaaaagcucaauaaugaggucagaugcaccuauuggcaccugcagcucugaaugcaucacuccaaauggaagcauucccaaugacaagcccuuucaaaacguaaacaagaucacauauggggcaugucccaaguauguuaagcaaaacacucugaaguuggcaacagggaugcggaauguaccagagaaacaaacuagaggcauauucggcgcaauagcagguuucauagaaaaugguugggagggaaugauagacgguugguacgguuucaggcaucaaaauuccgagggcacaggacaagcagcagaucuuaaaagcacucaagcagccaucgaccaaaucaaugggaaacugaauaggguaaucgagaagacgaacgagaaauuccaucaaaucgaaaaggaauucucagaaguagaagggagaauucaggaccucgagaaauacguugaagacacuaaaauagaucucuggucuuacaaugcggagcuucuugucgcucuggagaaccaacauacaauugaucugacugacucggaaaugaacaaacuguuugaaaaaacaaggaggcaacugagggaaaaugcugaggacaugggcaaugguugcuucaaaauauaccacaaaugugacaaugcuugcauagggucaaucagaaaugggacuuaugaccaugauguauacagagacgaagcauuaaacaaccgguuucagaucaaagguguugaacugaagucaggauacaaagacuggauccuguggauuuccuuugccauaucaugcuuuuugcuuuguguuguuuugcugggguucaucaugugggccugccaaaaaggcaacauuaggugcaacauuugcauuuga

SEQ ID NO: 41110 - RNA, 1701 nt, Artificial Sequence
  derived and/or modified CDS sequence (wt) from hemagglutinin__InfluenzaA__AFM71989
augaagacuaucauugcuuugagcuacauucuaugucugguuuucgcucaaaaacuuccuggaaaugacaacagcacggcaacgcugugccuugggcaccaugcagugccaaacggaacgauagugaaaacaaucacgaaugaccaaauugaaguuacuaaugcuacugagcugguucagaguuccucaacaggugaaauaugcaacaguccucaucagauccuugauggagaaaacugcacacuaauagaugcucuauugggagacccucagugugauggcuuccaaaacaagaaaugggaccuuuuuguugaacgaagcaaagcccacagcaacuguuacccuuaugaugugccggauuaugccucccuuaggucacuaguugccucauccggcacacuggaguuuaacaaugaaagcuucaauuggacuggagucacucaaaacggaacaagcucugcuugcauaaggagaucuaauaauaguuucuuuaguagauugaauugguugacccacuuaaacuucaaauacccagcauugaacgugacuaugccaaacaaugaacaauuugacaaauuguacauuugggggguucaccacccgaguacggacaaggaccaaaucuuccuguauacucaagcagcaggaagaaucacaguaucuaccaaaagaagccaacaagcuguaauuccgaauaucggaucuagacccagaguaaggaauaucccuagcagaguaagcaucuauuggacaauaguaaaaccgggagacauacuuuugauuaacagcacagggaaucuaauugcuccuagggguuacuucaaaauacgaagugggaaaagcucaauaaugagaucagaugcacccauuggcaaaugcaauucugcaugcaucacuccaaauggaagcauucccaaugacaaaccauuccaaaauguaaacaggaucacauacggggccugucccagauauguuaagcaaaacacucugaaauuggcaacaggaaugagaaauguaccagagaaacaaacuagaggcauauuuggcgcaauagcugguuucauagaaaaugguugggagggaaugguggaugguugguacgguuucaggcaucaaaauucugagggaaggggacaagcagcagaucucaaaagcacucaagcagcaaucgaucaaaucaaugggaagcugaauagauugaucgggaaaaccaacgagaaauuccaucagauugaaaaagaauucucagaagucgaagggagaauucaggaccuugagaaauauguugaggacacuaaaauagaucucuggucauacaacgcggagcuucuuguugcccuggagaaccaacacacaauugaucuaacugacucagaaaugaacaaauuguuugaaaaaacaaagaagcaacugagggaaaaugcugaggauaugggcaaugguuguuucaaaauauaccacaaaugugacaaugccugcauaggaucaaucagaaauggaacuuaugaccacgauguguacagagaugaagcauuaaacaaccgauuccagaucaagggaguugagcugaagucaggguacaaagauuggauccuauggauuuccuuugccauaucauguuuuuugcuuuguguugcuuuguugggguucaucaugugggccugccaaaaaggcaacauuaggugcaacauuugcauuuga

SEQ ID NO: 41111 - RNA, 1701 nt, Artificial Sequence
  derived and/or modified CDS sequence (wt) from hemagglutinin__InfluenzaA__AFM72010
augaagacuaucauugcuuugagcuacauuuucugucagguucucgcccaaaaccuuccaggaaaugacaacagcacagcaacgcugugccugggacaucaugcagugccaaacggaacgcuagugaaaacaaucacgaaugaucagauugaagugacuaaugcuacugagcugguucagaguuccucaacagguagaauaugcgacaguccucaucgaauccuugaugggaaaaacugcacacugauagaugcucuauugggggacccucauugugauggcuuucaaaaugagaaaugggaccuuuuuguugaacgcagcaaagcuuucagcaacuguuacccuuaugaugugccagauuaugccucccuuaggucacuaguugccucgucaggcacccuggaguuuaucaaugaaggcuucaauuggacuggggucacucagaaugggggaagcuaugcuugcaaaaggggaccugauaaaaguuucuucaguagacugaacugguuguacgaaucagaaagcacauauccagugcugaacgugacuaugccaaacaaugacaauuuugacaaacuguacauuuggggaguucaccacccgagcacggacaaagaacaaaccaaacuauauguucaagcaucagggagagucacagucuccaccaagagaagccagcaaacuauaaucccgaaugucgggucuagacccuggguaaggggucugucuaguagaauaagcaucuauuggacaauaguaaaaccgggagacauacuguuaauuaauaguaaugggaaccuaauugcuccucgggguuacuucaaaauacgcacugggaaaagcucaauaaugaggucagaugcacccauuggcaccugcaguucugaaugcaucacuccaaauggaagcauucccaaugacaagcccuuucaaaacguaaacaagaucacauauggggcaugucccaaguauguuaagcaaaacacucugaaguuggcaacagggaugcggaauguaccagagaaacaaacuagaggcauauucggcgcaauagcagguuucauagaaaaugguugggagggaaugauagacgguugguacgguuucaggcaucaaaauucugagggcacaggacaagcagcagaucuuaaaagcacucaagcagccaucgaccaaaucaaugggaaacugaauaggguaaucgagaaaacgaacgagaaauuccaucaaaucgaaaaggaauucucagaaguagaagggagaauucaggaccucgagaaauacguugaagacacuaaaauagaucucuggucuuacaaugcggagcuucuugucgcucuggagaaccaacauacaauugaucugacugacucggaaaugaacaaacuguuugaaaaaacaaggaggcaacugagggaaaaugcugaggacaugggcaaugguugcuucaaaauauaccacaaaugugacaaugcuugcauagggucaaucagaaauggaacuuaugaccaugauguauacagagacgaagcauuaaacaaccgguuucagaucaaagguguugagcugaagucaggauacaaagacuggauccuguggauuuccuuugccauaucaugcuuuuugcuuuguguuguuuugcugggguucaucaugugggccugccaaaaaggcaacauuaggugcaacauuugcauuuga

SEQ ID NO: 41112 - RNA, 1701 nt, Artificial Sequence; identical to SEQ ID NO: 32928
  derived and/or modified CDS sequence (wt) from hemagglutinin__InfluenzaA__AFM72021

SEQ ID NO: 41113 - RNA, 1701 nt, Artificial Sequence
  derived and/or modified CDS sequence (wt) from hemagglutinin__InfluenzaA__AFM72032
augaagacuaucauugcuuugagcuacauguucugucugguuuucgcccaaaaccuucccggaaaugacaacagcacagcaacgcugugccugggacaucaugcagugccaaacggaacgcuagugaaaacaaucacgaaugaucagauugaagugacuaaugcuacugagcugguucagaguuccucaacagguaggauaugcgacaguccucaccgaauccuugaugggaaaaacugcacacugauagaugcucuauugggagacccucauugugauggcuuccaaaaugagaaaugggaccuuuuuguugaacgcagcaaagcuuucagcaacuguuacccuuaugaugugccagauuaugccucccuuaggucacuaguugccucaucaggcacccuggaguuuaucaaugaaggcuucaauuggacuggagucacucagagugggggaagcuauacuugcaaaaggggaucuaauaacaguuucuucaguagacugaacugguuguacgaaucagaaagcaaauauccagugcugaacgugacuaugccaaacaauggcaaauuugacaaauuguacauuugggggauucaccacccgagcacggacaaagaacaaaccaaccuauauauucgagcaucagggagagucacagucucuaccaagagaagccagcaaacuguaaucccgaauaucgggucuagacccuggguaaggggucugucuaguagaauaaguaucuauuggacaauaguaaaaccgggagacauacuguuaauuaauagcacugggaaccuaauugcuccucgggguuacuucaaaauacgcacugggaaaagcucaauaaugaggucagaugcaccuauuggcaccugcaguucugaaugcaucacuccaaauggaagcauucccaaugacaagcccuuucaaaacguaaacaagaucacauauggggcaugucccagguauguuaagcaaaacacucugaaguuggcaacagggaugcggaauguaccagagaaacaaacuagaggcauauucggcgcaauagcagguuucauagaaaaugguugggagggaaugguagacgguugguacgguuucaggcaucaaaauucugagggcacaggacaagcagcagaucuuaaaagcacucaagcagcaaucgaccaaaucaaugggaaacugaauaggguaaucgagaaaacgaacgagaaauuccaucaaaucgaaaaggaauucucagaaguagaagggagaauucaggaccucgagaaauauguugaagacacuaaaauagaucucuggucuuacaacgcggagcuucuugucgcucuggagaaccaacauacaauugaucugacugacucagaaaugaacaaacuguuugaaaaaacaaggaaacaacugagggaaaaugcugaggacaugggcaaugguugcuucaaaauauaccacaaaugugacaaugcuugcauagggucaaucagaaauggaacuuaugaccaugauguauacagagacgaagcauuaaacaaccgguuucagaucaaagguguugagcugaagucaggauacaaagacuggauccuauggauuuccuuugccauaucaugcuuuuugcuuuguguuguuuugcugggguucaucaugugggccugccaaaaaggcaacauuaggugcaacauuugcauuuga

SEQ ID NO: 41114 - RNA, 1701 nt, Artificial Sequence
  derived and/or modified CDS sequence (wt) from hemagglutinin__InfluenzaA__AFM72043
augaagacuaucauugcuuugagcuacauguucugucugguuuucgcccaaaaccuucccggaaaugacaacagcacagcaacgcugugccugggacaucaugcagugccaaacggaacgcuagugaaaacaaucacgaaugaucagauugaagugacuaaugcuacugagcugguucagaguuccucaacagguaggauaugcgacaguccucaccgaauccuugaugggaaaaacugcacacugauagaugcucuauugggagacccucauugugauggcuuccaaaaugagaaaugggaccuuuuuguugaacgcagcaaagcuuucagcaacuguuacccuuaugaugugccagauuaugccucccuuaggucacuaguugccucaucaggcacccuggaguuuaucaaugaaggcuucaauuggacuggagucacucagagugggggaagcucuacuugcaaaaggggaucuaauaacaguuucuucaguagacugaacugguuguacgaaucagaaagcaaauauccagugcugaacgugacuaugccaaacaauggcaaauuugacaaauuguacauuugggggauucaccacccgagcacggacaaagaacaaaccaaccuauauauucgagcaucagggagagucacagucucuaccaagagaagccagcaaacuguaaucccgaauaucgggucuagacccuggguaaggggucugucuaguagaauaaguaucuauuggacaauaguaaaaccgggagacauacuguuaauuaauagcacugggaaccuaauugcuccucgggguuacuucaaaauacgcacugggaaaagcucaauaaugaggucagaugcaccuauuggcaccugcaguucugaaugcaucacuccaaauggaagcauucccaaugacaagcccuuucaaaacguaaacaagaucacauauggggcaugucccagguauguuaagcaaaacacucugaaguuggcaacagggaugcggaauguaccagagaaacaaacuagaggcauauucggcgcaauagcagguuucauagaaaaugguugggagggaaugguagacgguugguacgguuucaggcaucaaaauucugagggcacaggacaagcagcagaucuuaaaagcacucaagcagcaaucgaccaaaucaaugggaaacugaauaggguaaucgagaaaacgaacgagaaauuccaucaaaucgaaaaggaauucucagaaguagaagggagaauucaggaccucgagaaauauguugaagacacuaaaauagaucucuggucuuacaacgcggagcuucuugucgcucuggagaaccaacauacaauugaucugacugacucagaaaugaacaaacuguuugaaaaaacaaggaaacaacugagggaaaaugcugaggacaugggcaaugguugcuucaaaauauaccacaaaugugacaaugcuugcauagggucaaucagaaauggaacuuaugaccaugauguauacagagacgaagcauuaaacaaccgguuucagaucaaagguguugagcugaagucaggauacaaagacuggauccuauggauuuccuuugccauaucaugcuuuuugcuuuguguuguuuugcugggguucaucaugugggccugccaaaaaggcaacauuaggugcaacauuugcauuuga

SEQ ID NO: 41115 - RNA, 1701 nt, Artificial Sequence
  derived and/or modified CDS sequence (wt) from hemagglutinin__InfluenzaA__AFM72054
augaaagcaaaacuacugguccuguuaugugcacuuucagcuacagaugcagacacaauauguauaggcuaccaugcgaacaacucaaccgacacuguugacacaguacucgaaaagaacgugacagugacacacucugucaaccuacuugaggacaaucacaacggaaaacuaugcaaacuaaaaggaauagccccacuacaauuggggaaaugcagcauugccggauggaucuuaggaaacccagaaugcgaaucacuguuuucuaagaaaucaugguccuacauugcagaaacaccaaacuccgagaauggaacauguuacccaggguauuucgccgacuaugaggaacugagggaacaauugaguucaguaucaucauucgagagauucgaaauauuccccaaggaaaguucauggcccaaacacaacguaaccaaaggaguaacggcagcaugcucccauaaggggaaaagcaguuuuuacagaaauuugcuauggcugacggagaaaaauggcucguacccaaaucugagcaaguccuaugugaacaacaaagagaaagaaguccuuguacuaugggguguucaucacccgucuaacauagaggaccaaaagaccaucuaucguaaagaaaaugcuuaugucucuguagugucuucacauuauaacaggagauucaccccagaaauagcaaaaagacccaaaguaagaaaucaagaagggagaauuaacuacuacuggacucugcuggaacccggggacacaauaauauuugaggcaaauggaaaucuaauagcgccaugguaugcuuucgcacugaguagaggcuuugggucaggaaucaucaccucaaacgcaucgauggaugaaugugacgcgaagugucaaacaccccagggagcuauaaacaguagucuuccuuuucagaauguacacccagucacaauaggagagugcccaaaguacgucaggaguacaaaauuaaggaugguuacaggacuaaggaacaucccauccauucaauccagagguuuguuuggagccauugccgguuucauugaagggggauggacuggaaugauugauggaugguaugguuaucaucaucagaaugaacagggaucuggcuaugcugcggaucaaaaaagcacacaaaaugccauuaacgggauuacaaacaaggugaacucuauaaucgagaaaaugaacacucaauucacagcuguggguaaagaauucaacaaacuagaaaaaaggauggaaaacuuaaauaaaaaaguugaugauggauuccuggacauuuggacauauaaugcagaauuguugguucuacuggaaaaugaaaggacuuuggauuuccaugacucaaaugugaagaacuuguaugagaaaguaaaaagccaauuaaagaauaaugccaaagaaauaggaaacggguguuuugaauucuaccacaaguguaacaaugaaugcauggaaaguguaaaaaaugggacuuaugacuauccaaaauauucagaagaaucaaaguuaaacagggaaaaaauugauggagugaaauuggaaucaaugggagucuaucagauucuggcgaucuacucaacugucgccaguucacuggugcuuuuggucucccugggggcaaucagcuucuggauguguucuaaugggucuuugcagugcagaauaugcaucuga

SEQ ID NO: 41116 - RNA, 1701 nt, Artificial Sequence; identical to SEQ ID NO: 41115
  derived and/or modified CDS sequence (wt) from hemagglutinin__InfluenzaA__AFM72065

SEQ ID NO: 41117 - RNA, 1701 nt, Artificial Sequence
  derived and/or modified CDS sequence (wt) from hemagglutinin__InfluenzaA__AFM72087
augaagacuaucauugcuuugagcuacauuuucugucugguuuucgcccaaaaacuucccggaaaugacaacagcacagcaacgcugugccugggacaucaugcagugccaaacggaacgcuagugaaaacaaucacgaaugaucagauugaagugacuaaugcuacugagcugguucagaguuccucaacagguagaauaugcgacaguccucaccgaauccuugauggaaaaaacugcacacugauagaugcucuauugggagacccucauugugauggcuuccaaaaugagaaaugggaccuuuuuauugaacgcagcaaagcuuucagcaacuguuacccuuaugaugugccggauuaugccucccuuaggucacuaguugccucaucaggcacccuggaguuuaucaaugaaggcuucaauuggacuggagucacucagagugggggaagcuauacuugcaaaaggggaucuguuaacaguuucuucaguagauugaauugguuguacgaaucagaauacaaauauccagcgcugaacgugacuaugccaaacaauggcaaauuugacaaauuguacauuugggggguucaccacccgagcacggaaaaagaacaaaccaaccuauauguucgagcaucagggagagucacagucucuaccaagagaagccagcaaacuguaaucccgaauaucgggucuaguccauggguaaggggucuguccaguagaauaagcaucuauuggacaauaguaaaaccgggagacauacuguugauuaauagcacugggaaccuaauugcuccucgggguuacuucaaaauacgcacugggaaaagcucaauaaugaggucagaugcaccuauuggcaccugcaguucugaaugcaucacuccaaauggaagcauucccaaugacaaacccuuucaaaauguaaacaagaucacauauggggcaugucccagguaugucaagcaaaacacucugaaauuggcaacagggaugcggaauguaccagagaaacaaacuagaggcauauucggcgcaauagcagguuucauagaaaaugguugggagggaaugguagacgguugguacgguuucaggcaucaaaauucugagggcacaggacaagcagcagaucuuaaaagcacucaagcagcaaucgaccaaaucaacgggaagcugaauagguuaaucgagaaaacgaacgagaaauuccaucaaaucgaaaaggaauucucagaaguagaagggagaauucaggaccucgagaaauauguugaagacacuaaaauagaucucuggucuuacaacgcggagcuucuugucgcccuggagaaccaauauacaauugaucugacugacucagaaaugaacaaacuguuugaaaaaacaaggaagcaacugagggaaaaugcugaggacaugggcaaugguugcuucaaaauauaccacaaaugugacaaugcuugcauagggucaaucagaaaugggacuuaugaccaugauguauacagagacgaagcauugaacaaccgguuucagaucaaagguguugagcugaagucaggauacaaagacuggauccuauggauuuccuuugccauaucaugcuuuuugcuuuguguuguuuugcugggguucaucaugugggccugccaaaaaggcaacauuaggugcaacauuugcauuuga

SEQ ID NO: 41118 - RNA, 1701 nt, Artificial Sequence
  derived and/or modified CDS sequence (wt) from hemagglutinin__InfluenzaA__AFM72098
augaagacuaucauugcuuugagcuacauuuucugucugguuuucgcccaaaaacuucccggaaaugacaacagcacagcaacgcugugccugggacaucaugcagugccaaacggaacgcuagugaaaacaaucacgaaugaucagauugaagugacuaaugcuacugagcugguucagaguuccucaacagguagaauaugcgacaguccucaccgaauccuugauggaaaaaacugcacacugauagaugcucuauugggagacccucauugugauggcuuccaaaaugagaaaugggaccuuuuuguugaacgcagcaaagcuuacagcaacuguuacccuuaugaugugccggauuaugccucccuuaggucacuaguugccucaucaggcacccuggaguuuaucaaugaagacuucaauuggacuggagucacucagagugggggaagcuaugcuugcaaaaggggaucuguuaacaguuucuucaguagauugaauugguuguacaaaucagaauacaaauauccagcgcugaacgugacuaugccaaacaauggcaaauuugacaaauuguacauuugggggguucaccacccggucacggacagagaacaaaccaaccuauauguucgagcaucagggagagucacagucucuaccaagagaagccagcaaacuguaaucccgaauaucgggucuagacccuggguaaggggucuguccaguagaauaagcaucuauuggacaauaguaaaaccgggagacauacuguugauuaauagcaccgggaaccuaauugcuccucgggguuacuucaaaauacgcacugggaaaagcucaauaaugaggucagaugcaccuauuggcaccugcaguucugaaugcaucacuccaaauggaagcauucccaaugacaaacccuuucaaaauguaaacaagaucacauauggggcaugucccagauauguuaagcaaaacacucugaaauuggcaacagggaugcggaauguaccagagaaacaaacuagaggcauauucggcgcaauagcagguuucauagaaaaugguugggagggaaugguagacggcugguacgguuucaggcaucaaaauucugagggcacaggacaagcagcagaucuuaaaagcacucaagcagcaaucgaccaaaucaacgggaaacugaauagguuaaucgagaaaacgaacgagaaauuccaucaaaucgaaaaggaauucucagaaguagaagggagaauucaggaccucgagaaauauguugaagacacuaaaauagaucucuggucuuacaacgcggagcuucuugucgcccuggagaaccaacauacaauugaucugacugacucagaaaugaacaaacuguuugaaaaaacaaggaagcaacugagggaaaaugcugaggacaugggcaaugguugcuucaagauauaccacaaaugugacaaugccugcauagggucaaucagaaauggaacuuaugaccaugauguauacagagacgaagcauuaaacaaccgguuccagaucaaagguguugagcugaagucaggauacaaagacuggauccuauggauuuccuuugccauaucaugcuuuuugcuuuguguuguuuugcugggguucaucaugugggccugccaaaaaggcaacauuaggugcaacauuugcauuuga

SEQ ID NO: 41119 - RNA, 1701 nt, Artificial Sequence
  derived and/or modified CDS sequence (wt) from hemagglutinin__InfluenzaA__AFM72109
augaagacuaucauugcuuugagcuacauuuucugucugguuuucgcccaaaaacuucccggaaaugacaacagcacagcaacgcugugccugggacaucaugcagugccaaacggaacgcuagugaaaacaaucacgaaugaucagauugaagugacuaaugcuacugagcugguucagaguuccucaacagguagaauaugcgacaguccucaccgaauccuugauggaaaaaacugcacacugauagaugcucuauugggagacccucauugugauggcuuccaaaaugagaaaugggaccuuuuuguugaacgcagcaaagcuuacagcaacuguuacccuuaugaugugccggauuaugccucccuuaggucacuaguugccucaucaggcacccuggaguuuaucaaugaagacuucaauuggacuggagucacucagagugggggaagcuaugcuugcaaaaggggaucuguuaacaguuucuucaguagauugaauugguugcacaaaucagaauacaaauauccagcgcugaacgugacuaugccaaacaauggcaaauuugacaaauuguacauuugggggguucaccacccgaucacggacagagaacaaaccaaccuauauguucgagcaucagggagagucacagucucuaccaagagaagccagcaaacuguaaucccgaauaucgggucuagacccuggguaaggggucuguccaguagaauaagcaucuauuggacaauaguaaaaccgggagacauacuguugauuaauagcaccgggaaccuaauugcuccucgggguuacuucaaaauacgcacugggaaaagcucaauaaugaggucagaugcaccuauuggcaccugcaguucugaaugcaucacuccaaauggaagcauucccaaugacaaacccuuucaaaauguaaacaagaucacauauggggcaugucccagauauguuaagcaaaacacucugaaauuggcaacagggaugcggaauguaccagagaaacaaacuagaggcauauucggcgcaauagcagguuucauagaaaaugguugggagggaaugguagacggcugguacgguuucaggcaucaaaauucugagggcacaggacaagcagcagaucuuaaaagcacucaagcagcaaucgaccaaaucaacggaaaacugaauagguuaaucgagaaaacgaacgagaaauuccaucaaaucgaaaaggaauucucagaaguagaagggagaauucaggaccucgagaaauauguugaagacacuaaaauagaucucuggucuuacaacgcggagcuucuugucgcccuggagaaccaacauacaauugaucugacugacucagaaaugaacaaacuguuugaaaaaacaaggaggcaacugagggaaaaugcugaggacaugggcaaugguugcuucaaaauauaccacaaaugugacaaugccugcauagggucaaucagaaauggaacuuaugaccaugauguauacagagacgaagcauuaaacaaccgguuccagaucaaagguguugagcugaagucaggauacaaagacuggauccuauggauuuccuuugccauaucaugcuuuuugcuuuguguuguuuugcugggguucaucaugugggccugccaaaaaggcaacauuaggugcaacauuugcauuuga

SEQ ID NO: 41120 - RNA, 1701 nt, Artificial Sequence
  derived and/or modified CDS sequence (wt) from hemagglutinin__InfluenzaA__AFM72120
augaagacuaucauugcuuugagcuacauuuucugucugguuuucgcccaaaaacuucccggaaaugacaacagcacagcaacgcugugccugggacaucaugcagugccaaacggaacgcuagugaaaacaauaacgaaugaucagauugaagugacuaaugcuacugagcugguucagaguuccucaacagguagaauaugcgacaguccucaccgaauccuugauggaaaaaacugcacacugauagaugcucuauugggagacccucauugugauggcuuccaaaaugagaaaugggaccuuuuuguugaacgcagcaaagcuuacagcaacuguuacccuuaugaugugccggauuaugccucccuuaggucacuaguugccucaucaggcacccuggaguuuaucaaugaagacuucaauuggacuggagucacucagagugggggaagcuaugcuugcaaaaggggaucuguuaacaguuucuucaguagauugaauugguugcacgaaucagaauacaaauauccagcgcugaacgugacuaugccaaacaauggcaaauuugacaaauuguacauuugggggguucaccacccgaucacggacagagaacaaaccaaccuauauguucgagcaucagggagagucacagucucuaccaagagaagccagcaaacuguaaucccgaauaucggguuuagacccuggguaaggggucuguccaguagaauaagcaucuauuggacaauaguaaaaccgggagacauacuguugauuaauagcaccgggaaccuaauugcuccucgggguuacuucaaaauacgcaaugggaaaagcucaauaaugaggucagaugcaccuauuggcaccugcaguucugaaugcaucacuccaaauggaagcauucccaaugacaaacccuuucaaaauguaaacaagaucacauauggggcaugucccagguauguuaagcaaaacacucugaaauuggcaacagggaugcggaauguaccagagaaacaaacuagaggcauauucggcgcaauagcagguuucauagaaaaugguugggagggaaugguagacgguugguacgguuucaggcaucaaaauucugagggcacaggacaagcagcagaucuuaaaagcacucaagcagcaaucgaccaaaucaacgggaaacugaauagguuaaucgagaaaacgaacgagaaauuccaucaaaucgaaaaggaauucucagaaguagaagggagaauucaggaccucgagaaauauguugaagacacuaaaauagaucucuggucuuacaacgcggagcuucuugucgcccuggagaaccaacauacaauugaucugacugacucagaaaugaacaaacuguuugaaaaaacaaggaagcaacugagggaaaaugcugaggacaugggcaaugguugcuucaagauauaccacaaaugugacaaugccugcauagggucaaucagaaauggaacuuaugaccaugauguauacagagacgaagcauuaaacaaccgguuccagaucaaagguguugagcugaagucaggauacaaagacuggauccuauggauuuccuuugccauaucaugcuuuuugcuuuguguuguuuugcugggguucaucaugugggccugccaaaaaggcaacauuaggugcaacauuugcauuuga

SEQ ID NO: 41121 - RNA, 1701 nt, Artificial Sequence
  derived and/or modified CDS sequence (wt) from hemagglutinin__InfluenzaA__AFM72131
augaagacuaucauugcuuugagcuacauuuuaugucugguuuucgcccaaaaacuucccggaaaugacaacagcacagcaacgcugugccugggacaucaugcagugccaaacggaacgcuagugaaaacaaucacgaaugaucaaauugaagugacuaaugcuacugagcugguucagaguuccucaacagguagaauaugcgacaguccucaccgaauccuugauggaaaagacugcacacugauagaugcucuauugggagacccucauugugauggcuuccaaaauaaggaaugggaccuuuuuguugaacgcagcaaagcuuacagcaacuguuacccuuaugaugugccggauuaugccucccuuaggucacuaguugccucaucaggcacccuggaguuuaucaaugaagacuucaauuggaauggagucgcucagaguggggaaagcuaugcuugcaaaaggggaucuguuaaaaguuucuuuaguagauugaauugguugcacgaaucagaauacaaauauccagcgcugaacgugacuaugccaaacaauggcaaauuugacaaauuguacauuugggggguucaccacccgagcacggacagagaacaaaccaaacuauauguucgagcaucagggagagucacagucucuaccaaaagaagccaacaaacuguaaucccgaauaucgggucuagacccuggguaaggggucuguccaguagaauaagcaucuauuggacaauaguaaaaccgggagacauacuuuugauuaauagcaccgggaaccuaauugcuccucgggguuacuucaaaauacgaacugggaaaagcucaauaaugaggucagaugcacccauuggcaccugcaguucugaaugcaucacuccaaauggaagcauccccaaugacaaaccuuuucaaaauguaaacaggaucacauauggggcaugucccagauauguuaagcaaaacacucugaaauuggcaacagggaugcggaauguaccagagaaacaaacuagaggcauauucggcgcaaucgcagguuucauagaaaaugguugggagggaaugguagacgguugguacgguuucaggcaucaaaauucugagggcacaggacaagcagcagaucuuaaaagcacucaagcagcaaucgaccaaaucaacgggaaacugaauagguuaaucgagaaaacgaacgagaaauuccaucaaaucgaaaaggaauucucagaaguagaagggagaauucaggaccucgagaaauauguugaagacacuaaaauagaucucuggucuuacaacgcggagcuucuuguugcccuggagaaccaacauacaauugaucugacugacucagaaaugaacaaacuguuugaaaaaacaaggaagcaacugagggaaaaugcugaggacaugggcaaugguugcuucaaaauauaccacaaaugugacaaugccugcauagggucaaucagaaauggaacuuaugaccaugauguauacagagacgaagcauuaaacaaccgguuccagaucaaagguguugagcugaagucaggauacaaagauuggauccuauggauuuccuuugccauaucaugcuuuuugcuuuguguuguuuugcugggguucaucaugugggccugccaaaaaggcaacauuaggugcaacauuugcauuuga

SEQ ID NO: 41122 - RNA, 1701 nt, Artificial Sequence
  derived and/or modified CDS sequence (wt) from hemagglutinin__InfluenzaA__AFM72142
augaagacuaucauugcuuugagcuacauuucaugucugguuuucgcucaaaaacuucccggaaaugacaacagcacagcaacgcugugccugggacaucaugcagugccaaacggaacgcuagugaaaacaaucacgaaugaucaaauugaagugacuaaugcuacugagcugguacagaguuccucaacagguagaauaugcgacaguccucaccgaauccuugauggaaaaaacugcacacugauagaugcucuauugggagacccucauugugauggcuuccaaaauaaggaaugggaccuuuuuguugaacgcagcaaagcuuacagcaacuguuacccuuaugaugugccggauuaugccucccuuaggucacuaguugccucaucaggcacccuggaguuuaucaaugaagacuucaauuggacuggagucgcucaggaugggggaagcuaugcuugcaaaaggggaucuguuaacaguuucuuuaguagauugaauugguugcacaaauuagaauacaaauauccagcgcugaacgugacuaugccaaacaauggcaaauuugacaaauuguacauuugggggguucaccacccgagcacggaccgugaccaaaccagccuauauguucgagcaucagggagagucacagucucuaccaaaagaagccaacaaacuguaaucccgaauaucgggucuagacccuggguaaggggucaguccaguagaauaagcaucuauuggacaauaguaaaaccgggagacauacuuuugauuaauagcacagggaaucuaauugcuccucgggguuacuucaaaauacgaaaugggaaaagcucaauaaugagaucagaugcacccauuggcaacugcaguucugaaugcaucacuccaaauggaagcauucccaaugacaaaccuuuucaaaauguaaacaggaucacauauggggccugccccagauauguuaagcaaaacacucugaaauuggcaacagggaugcggaauguaccagagaaacaaacuagaggcauauucggcgcaaucgcagguuucauagaaaaugguugggagggaaugguagaugguugguacgguuucaggcaucaaaauucugagggcacaggacaagcagcagaucuuaaaagcacucaagcagcaaucgaccaaaucaacgggaaacugaauagguuaaucgagaaaacgaacgagaaauuccaucaaaucgaaaaagaauucucagaaguagaagggagaauucaggaccucgagaaauauguugaagacacuaaaauagaucucuggucuuacaacgcggagcuucuuguugcccuggagaaccaacauacaauugaucuaacugacucagaaaugaacaaacuguuugaaagaacaaggaagcaacugagggaaaaugcugaggacaugggcaaugguugcuucaaaauauaccacaaaugugacaaugccugcauagggucaaucagaaauggaacuuaugaccaugauguauacagagacgaagcauuaaacaaccgguuccagaucaaagguguugagcugaagucaggauacaaagauuggauccuauggauuuccuuugccauaucaugcuucuugcuuuguguuguuuugcugggguucaucaugugggccugccaaaaaggcaacauuaggugcaacauuugcauuuga

SEQ ID NO: 41123 - RNA, 1701 nt, Artificial Sequence
  derived and/or modified CDS sequence (wt) from hemagglutinin__InfluenzaA__AFM72153
augaagacuaucauugcuuugagcuacauuuuaugucugguuuucgcucaaaaacuucccggaaaugacaacagcacagcaacgcugugccugggacaucaugcagugccaaacggaacgcuagugaaaacaaucacgaaugaucaaauugaagugacuaaugcuacugaguugguucagaguuccucaacagguagaauaugcggcaguccucaccgaauccuugauggaaaaaacugcacacugauagaugcucuauugggagacccucauugugauggcuuccaaaauaaggaaugggaccuuuuuguugaacgcagcaaagcuuacagcaacuguuacccuuaugaugugccggauuaugccucccuuaggucacuaguugccucaucaggcacccuggaguuuaucaaugaagacuucaauuggacuggagucgcucaggaugggggaagcuaugcuugcaaaagaggaucuguuaacaguuucuuuaguagauugaauugguugcacaaauuagaauacaaauauccagcgcugaacgugacuaugccaaacaauggcaaauuugacaaauuguacauuugggggguucaccacccgagcacggacagugaccaaaccagccuauauguucgagcaucagggagagucacagucucuaccaaaagaagccaacaaacuguaaccccgaauaucgggucuagacccuggguaaggggucaguccaguagaauaggcaucuauuggacaauaguaaaaccgggagacauacuuuugauuaauagcacagggaaucuaauugcuccucgggguuacuucaaaauacgaaaugggaaaagcucaauaaugaggucagaugcacccauuggcaacugcaguucugaaugcaucacuccaaauggaagcauucccaaugacaaaccuuuucaaaauguaaacagaaucacauauggggccugccccagauauguuaagcaaaacacucugaaauuggcaacagggaugcggaauguaccagagaaacaaacuagaggcauauucggcgcaaucgcagguuucauagaaaaugguugggagggaaugguagacgguugguacgguuucaggcaucaaaauucugagggcacaggacaagcagcagaucuuaaaagcacucaagcagcaauugaccaaaucaacgggaaacugaauagguuaaucgagaaaacgaacgagaaauuccaucaaaucgaaaaagaauucucagaaguagaagggagaauucaggaccucgagaaauauguugaagacacuaaaauagaucucuggucuuacaacgcggagcuucuuguugcccuggagaaccaacauacaauugaucuaacugacucagaaaugaacaaacuguuugaaaaaacaaggaagcaacugagggaaaaugcugaggacaugggcaaugguugcuucaaaauauaccacaaaugugacaaugccugcauagggucaaucagaaauggaacuuaugaccaugauguauacagagacgaagcauuaaacaaccgguuccagaucaaagguguugagcugaagucaggauacaaagauuggauccuauggauuuccuuugccauaucaugcuuuuugcuuuguguuguuuugcugggguucaucaugugggccugccaaaaaggcaacauuaggugcaacauuugcauuuga

SEQ ID NO: 41124 - RNA, 1701 nt, Artificial Sequence
  derived and/or modified CDS sequence (wt) from hemagglutinin__InfluenzaA__AFM72164
augaagacuaucauugcuuugagcuacauuuuaugucugguuuucgcucaaaaacuucccggaaaugacaacagcacagcaacgcugugccugggacaccaugcagugccaaacggaacgcuagugaaaacaaucacgaaugaucaaauugaagugacuaaugcuacugagcugguucagaguuccccaacagguagaauaugcgacaguccucaccgaauccuugauggaaagaacugcacacugauagaugcucuauugggagacccucauugugauggcuuccaaaauaaggaaugggaccuuuuuguugaacgcagcaaagcuuacagcaacuguuacccuuaugaugugccggauuaugccucccuuaggucacuaguugccucaucaggcacccuggaguuuaucaacgaaaacuucaauuggacuggagucgcucaggaugggaaaagcuaugcuugcaaaaggggaucuguuaacaguuucuuuaguagauugaauugguugcacaaauuagaauacaaauauccagcgcugaacgugacuaugccaaacaauggcaaauuugacaaauuguacauuugggggguucaccacccgagcacggacagugaccaaaccagccuauauguccgagcaucagggagagucacagucucuaccaaaagaagccaacaaacuguaaucccggauaucggguauagaccauggguaaggggucaguccaguagaauaagcauccauuggacaauaguaaaaccgggagacauacuuuugauuaauagcacagggaaucuaauugcuccucgggguuacuucaaaauacgaaaugggaaaagcucaauaaugaggucagaugcacccauuggcaacugcaguucugaaugcaucacuccaaauggaagcauucccaaugacaaaccuuuucaaaauguaaacaggaucacauauggggccugccccagauauguuaagcaaaacacucugaaauuggcaacagggaugcggaauguaccagagaaacaaacuagaggcauauucggcgcaaucgcagguuucauagaaaaugguugggagggaaugguagacgguugguacgguuucaggcaucaaaauucugagggcacaggacaagcugcagaucuuaaaagcacucaagcagcaaucgaccaaaucaacgggaaacugaauagguuagucgagaaaacgaacgagaaauuccaucaaaucgaaaaagaauucucagaaguagaagggagaauucaggaccucgagaaauauguugaagacacuaaaauagaucucuggucuuacaaugcggagcuucuuguugcucuggagaaccaacauacaauugaucuaacugacucagaaaugaacaaacuguuugaaagaacaaggaagcaacugagggaaaaugcugaggacaugggcaaugguuguuucaaaauauaccacaaaugugacaaugccugcauagggucaaucagaaauggaacuuaugaccaugauguauacagagacgaagcauuaaacaaccgguuccagaucaaagguguugagcugaagucaggauacaaagauuggauucuauggauuuccuuugccauaucaugcuuuuugcuuuguguuguuuugcuuggguucaucaugugggccugccaaaaaggcaacauuaggugcaacauuugcauuuga

SEQ ID NO: 41125 - RNA, 1701 nt, Artificial Sequence
  derived and/or modified CDS sequence (wt) from hemagglutinin__InfluenzaA__AFM72175
augaagacuaucauugcuuugagcuacauuuuaugucugguuuucgcucaaaaacuucccggaaaugacaacagcacagcaacgcugugccugggacaccaugcagugccaaacggaacgcuagugaaaacaaucacgaaugaucaaauugaagugacuaaugcuacugagcugguucagaguuccccaacagguagaauaugcgacaguccucaccgaauccuugauggaaagaacugcacacugauagaugcucuauugggagacccucauugugauggcuuccaaaauaaggaaugggaccuuuuuguugaacgcagcaaagcuuacagcaacuguuacccuuaugaugugccggauuaugccucccuuaggucacuaguugccucaucaggcacccuggaguuuaucaacgaaaacuucaauuggacuggagucgcucaggaugggaaaagcuaugcuugcaaaaggggaucuguuaacaguuucuuuaguagauugaauugguugcacaaauuagaauacaaauauccagcgcugaacgugacuaugccaaacaauggcaaauuugacaaauuguacauuugggggguucaccacccgagcacggacagugaccaaaccaaccuauauguccgagcaucagggagagucacagucucuaccaaaagaagccaacaaacuguaaucccggauaucggguauagaccauggguaaggggucaguccaguagaauaagcauccauuggacaauaguaaaaccgggagacauacuuuugauuaauagcacagggaaucuaauugcuccucgggguuacuucaaaauacgaaaugggaaaagcucaauaaugaggucagaugcacccauuggcaacugcaguucugaaugcaucacuccaaauggaagcauucccaaugacaaaccuuuucaaaauguaaacaggaucacauauggggccugccccagauauguuaagcaaaacacucugaaauuggcaacagggaugcggaauguaccagagaaacaaacuagaggcauauucggcgcaaucgcagguuucauagaaaaugguugggagggaaugguagacgguugguacgguuucaggcaucaaaauucugagggcacaggacaagcugcagaucuuaaaagcacucaagcagcaaucgaccaaaucaacgggaaacugaauagguuagucgagaaaacgaacgagaaauuccaucaaaucgaaaaagaauucucagaaguagaagggagaauucaggaccucgagaaauauguugaagacacuaaaauagaucucuggucuuacaaugcggagcuucuuguugcucuggagaaccaacauacaauugaucuaacugacucagaaaugaacaaacuguuugaaagaacaaggaagcaacugagggaaaaugcugaggacaugggcaaugguuguuucaaaauauaccacaaaugugacaaugccugcauagggucaaucagaaauggaacuuaugaccaugauguauacagagacgaagcauuaaacaaccgguuccagaucaaagguguugagcugaagucaggauacaaagauuggauucuauggauuuccuuugccauaucaugcuuuuugcuuuguguuguuuugcuuggguucaucaugugggccugccaaaaaggcaacauuaggugcaacauuugcauuuga

SEQ ID NO: 41126 - RNA, 1701 nt, Artificial Sequence
  derived and/or modified CDS sequence (wt) from hemagglutinin__InfluenzaA__AFM72197
augaagacuaucauugcuuugagcuacauuuuauguaugguuuucgcucaaaaacuucccggaaaugacaacagcacggcaacgcugugccugggacaccaugcagugccaaacggaacgcuagugaaaacaaucacgaaugaccaaauugaagugacuaaugcuacugagcugguucagaguuccucaacagguagaauaugcgacaguccucaccgaauccuugauggaaaaaacugcacacugauagaugcucuauugggagacccucauugugauggcuuccaaaauaaggaaugggaccuuuuuguugaacgcagcaaagcuuacagcaacuguuacccuuaugaugugccggauuaugccucccuuaggucacuaguugccucauccggcacccuggaguuuaacaaugaaagcuucaauuggacuggagucgcucagaauggaacaagcuaugcuugcaaaaggagaucuguuaaaaguuucuuuaguagauugaauugguugcacaaauuagaauacaaauauccagcacugaacgugacuaugccaaacaaugacaaauuugacaaauuguacauuugggggguucaccacccgauuacggacagugaacaaaccagcuuauauguucaagcaucagggagagucacagucucuaccaaaagaagccaacaaacuguaaucccgaauaucggauauagacccuggguaaggggugucuccagcagaauaagcaucuauuggacaauaguaaaaccgggagacauacuuuugauuaacagcacagggaaucuaauugcuccucgggguuacuucaaaauacgaagugggaaaagcucaauaaugaggucagaugcacccauuggcaacugcaauucugaaugcaucacuccaaauggaagcauuccuaaugacaaaccauuucaaaauguaaacaggaucacauauggggccugucccagauauguuaagcaaaacacucugaaauuggcaacagggaugcggaauguaccagagaaacaaacuagaggcauauucggcgcaaucgcagguuucauagaaaaugguugggagggaaugguagacgguugguacgguuucaggcaucaaaauucugagggcacaggacaagcagcagaucuuaaaagcacucaagcagcaaucaaccaaaucaacgggaaacugaauagguuaaucgagaaaacgaacgagaaauuccaucaaaucgaaaaagaauucucagaaguagaagggagaauucaggaccucgagaaauauguugaagacacuaaaauagaucucuggucguacaacgcggagcuucuuguugcccuggagaaccaacauacaauugaucuaacugacucagaaaugaacaaacuguuugaaagaacaaggaagcaacugagggaaaaugcugaggacaugggcaaugguugcuucaaaauauaccacaaaugugacaaugccugcauagggucaaucagaaauggaacuuaugaccaugauguauacagagacgaagcauuaaacaaccgguuccagaucaaagguguugagcugaagucaggauacaaagauuggauccuauggauuuccuuugccauaucauguuuuuugcuuuguguuguuuugcugggguucaucaugugggccugccaaaagggcaacauuaagugcaacauuugcauuuga

SEQ ID NO: 41127 - RNA, 1701 nt, Artificial Sequence
  derived and/or modified CDS sequence (wt) from hemagglutinin__InfluenzaA__AFM72208
augaagacuaucauugcuuugagcuacauuuuaugucugguuuucgcucaaaaacuucccggaaaugacaacagcacggcaacgcugugccugggacaccaugcagugccaaacggaacgcuagugaaaacaaucacgaaugaccaaauugaagugacuaaugcuacugagcugguucagaguuccucaacagguagaauaugcgacaguccucaccaaauccuugauggagaaaacugcacacugauagaugcucuauugggagacccacauugugauggcuuccaaaauaaggaaugggaccuuuuuguugaacgcagcaaagccuacagcaacuguuacccuuaugaugugccggauuaugccucccuuaggucacuaguugccucauccggcacccuggaguuuaacaaugaaagcuucaauuggacuggagucgcucagaauggaacaagcucugcuugcaaaaggagaucuauuaacaguuucuuuaguagauugaauugguugcaccaauuaaaauacagauauccagcacugaacgugacuaugccaaacaaugacaaauuugacaaauuguacauuugggggguucaccacccgaguacggacagugaccaaaccagccuauauacccaagcaucagggagagucacagucucuaccaaaagaagccaacaaacuguaaucccgaauaucggauccagacccuggguaagggguaucuccagcagaauaagcaucuauuggacaauaguaaaaccgggagacauacuuuugauuaacagcacagggaaucuaauugcuccucgggguuacuucaaaauacgaagugggaaaagcucaauaaugaggucagaugcacccauuggcaaaugcaauucugaaugcaucacuccaaauggaagcauucccaaugacaaaccauuucaaaauguaaacaggaucacauauggggccugucccagauauguuaagcaaaacacucugaaauuggcaacagggaugcggaauguaccagagaaacaaacuagaggcauauucggcgcaaucgcggguuucauagaaaaugguugggagggaaugauggacgguugguacgguuucaggcaucaaaauucugagggcacaggacaagcagcagaucuuaaaagcacucaagcagcaaucaaccaaaucaacgggaaacugaauagguuaaucgagaaaacgaacgagaaauuccaucaaauugaaaaagaauucucagaaguagaagggagaauucaggaccucgagaaauauguugaggacacuaaaauagaucucuggucguacaacgcggagcuucuuguugcccuggagaaccaacauacaauugaucuaacugacucagaaaugaacaaacuguuugaaagaacaaggaagcaacugagagaaaaugcugaggauaugggcaaugguuguuucaaaauauaccacaaaugugacaaugccugcauagggucaaucagaaauggaacuuaugaccaugauguauacagagacgaagcauuaaacaaccgguuccagaucaaagguguugagcugaagucaggauacaaagauuggauccuauggauuuccuuugccauaucauguuuuuugcuuuguguuguuuugcugggguucauuaugugggccugccaaaaaggcaacauuaggugcaacauuugcauuuga

SEQ ID NO: 41128 - RNA, 1701 nt, Artificial Sequence
  derived and/or modified CDS sequence (wt) from hemagglutinin__InfluenzaA__AFM72219
augaagacuaucauugcuuugagcuacauuuuaugucugguuuucgcucaaaaacuucccggaaaugacaacagcacggcaacgcugugccugggacaccaugcagugccaaacggaacgcuagugaaaacaaucacgaaugaccaaauugaagugacuaaugcuacugagcugguucagaguuccucaacagguagaauaugcgacaguccucaccaaauccuugauggagaaaacugcacacugauagaugcucuauugggagacccacauugugauggcuuccaaaauaaggaaugggaccuuuuuguugaacgcagcaaagccuacagcaacuguuacccuuaugaugugccggauuaugccucccuuaggucacuaguugccucauccggcacccuggaguuuaacaaugaaagcuucaauuggacuggagucgcucagaauggaacaagcucugcuugcaaaaggagaucuauuaacaguuucuuuaguagauugaauugguugcaccaauuaaaauacagauauccagcacugaacgugacuaugccaaacaaugacaaauuugacaaauuguacauuugggggguucaccacccgaguacggacagugaccaaaccagccuauauacccaagcaucagggagagucacagucucuaccaaaagaagccaacaaacuguaaucccgaauaucggauccagacccuggguaagggguaucuccagcagaauaagcaucuauuggacaauaguaaaaccgggagacauacuuuugauuaaaagcacagggaaucuaauugcuccucgggguuacuucaaaauacgaagugggaaaagcucaauaaugaggucagaugcacccauuggcaaaugcaauucugaaugcaucacuccaaauggaagcauucccaaugacaaaccauuucaaaauguaaacaggaucacauauggggccugucccagauauguuaagcaaaacacucugaaauuggcaacagggaugcggaauguaccagagaaacaaacuagaggcauauucggcgcaaucgcggguuucauagaaaaugguugggagggaaugauggacgguugguacgguuucaggcaucaaaauucugagggcacaggacaagcagcagaucuuaaaagcacucaagcagcaaucaaccaaaucaacgggaaacugaauagguuaaucgagaaaacgaacgagaaauuccaucaaauugaaaaagaauucucagaaguagaagggagaauucaggaccucgagaaauauguugaggacacuaaaauagaucucuggucguacaacgcggagcuucuuguugcccuggagaaccaacauacaauugaucuaacugacucagaaaugaacaaacuguuugaaagaacaaggaagcaacugagagaaaaugcugaggauaugggcaaugguuguuucaaaauauaccacaaaugugacaaugccugcauagggucaaucagaaauggaacuuaugaccaugauguauacagagacgaagcauuaaacaaccgguuccagaucaaagguguugagcugaagucaggauacaaagauuggauccuauggauuuccuuugccauaucauguuuuuugcuuuguguuguuuugcugggguucauuaugugggccugccaaaaaggcaacauuaggugcaacauuugcauuuga

SEQ ID NO: 41129 - RNA, 1698 nt, Artificial Sequence
  derived and/or modified CDS sequence (wt) from hemagglutinin__InfluenzaA__AFM72230
augaaagcaaaacuacugguccuguuauguacauuuacagcuacauaugcagacacaauauguauaggcuaccaugccaacaacucaaccgacacuguugacacaguacuugagaagaaugugacagugacacacucugucaaccuacuugaggacagucacaauggaaaacuaugucuacuaaaaggaauagccccacuacaauuggguaauugcagcguugccggauggaucuuaggaaacccagaaugcgaauuacugauuuccaagaaaucaugguccuacauuguagaaacaccaaauccugagaauggaacauguuacccaggguauuucgccgacuaugaggaacugagggagcaauugaguucaguaucuucauuugagagauucgaaauauuccccaaagaaagcucauggcccaaccacaccguaaccggaguaucagcaucaugcucccauaaugggaaaagcaguuuuuacagaaauuugcuauggcugacggggaagaaugguuuguacccaaaccugagcaaguccuauguaaacaacaaagagaaagaaguccuuguacuaugggguguucaucacccgccuaacauagggaaccaaagggcccucuaucauacagaaaaugcuuaugucucuguagugucuucacauuauagcagaagauucaccccagaaauagccaaaagacccaaaguaagagaucaggaaggaagaaucaacuacuacuggacucugcuggaaccuggggauacaauaauauuugaggcaaauggaaaucuaauagcgccaugguaugcuuuugcacugaguagaggcuuuggaucaggaaucaucaccucaaaugcaccaauggaugaaugugaugcgaagugucaaacaccucagggagcuauaaacagcagucuuccuuuccagaauguacacccagucacaauaggagaguguccaaaguaugucaggagugcaaaauuaaggaugguuacaggacuaaggaacaucccauccauucaauccagagguuuguuuggagccauugccgguuucauugaagggggguggacuggaaugguagaugggugguaugguuaucaucaucagaaugagcaaggaucuggcuaugcugcagaucaaaaaaguacacaaaaugccauuaacgggauuacaaacaaggugaauucuguaauugagaaaaugaacacucaauucacagcugugggcaaagaauucaacaaauuggaaagaaggauggaaaacuuaaauaaaaaaguugaugauggguuucuagacauuuggacauauaaugcagaauuguugguucuacuggaaaaugaaaggacuuuggauuuccaugacuccaaugugaagaaucuguaugagaaaguaaaaagccaauuaaagaauaaugccaaagaaauaggaaacggguguuuugaauucuaucacaaguguaacaaugaaugcauggagagugugaaaaauggaacuuaugacuauccaaaauauuccgaagaaucaaaguuaaacagggagaaaauugauggagugaaauuggaaucaaugggagucuaucagauucuggcgaucuacucaacugucgccaguucccugguucuuuuggucucccugggggcaaucagcuucuggauguguuccaaugggucuuugcaguguagaauaugcaucuga

SEQ ID NO: 41130 - RNA, 1701 nt, Artificial Sequence
  derived and/or modified CDS sequence (wt) from hemagglutinin__InfluenzaA__AFM72246
augaagacuaucauugcuuugagcuacauuuuaugucugguuuucgcucaaaaacuucccggaaaugacaacagcacggcaacgcugugccuggggcaccaugcagugucaaacggaacgcuagugaaaacaaucacgaaugaccaaauugaagugacuaaugcuacugagcugguucagaguuccucaacagguagaauaugcgacaguccucaccaaauccuugauggagaaaacugcacacuaauagaugcucuauugggagacccucauugugauggcuuccaaaauaaggaaugggaccuuuuuguugaacgcagcaaagccuacagcaacuguuacccuuaugaugugccggauuaugccucccuuaggucacuaguugccucauccggcacacuggaguuuaacaaugaaagcuucaauuggacuggagucgcucagaauggaacaagcucugcuugcaaaaggagaucuaauaaaaguuucuuuaguagauugaauugguugcaccaauuaaaauacaaauauccagcacugaacgugacuaugccaaacaaugaaaaauuugacaaauuguacauuugggggguucaccacccgaguacggacagugaccaaaucagcauauaugcucaagcaucagggagagucacagucucuaccaaaagaagccaacaaacuguaaucccgaauaucggaucuagccccuggguaaggggugucuccagcagaauaagcaucuauuggacaauaguaaaaccgggagacauacuuuugauuaacagcacagggaaucuaauugcuccucgggguuacuucaaaauacgaagugggaaaagcucaauaaugaggucagaugcacccauuggcaaaugcaauucugaaugcaucacuccaaauggaagcauucccaaugacaaaccauuucaaaauguaaacaggaucacauauggggccugucccagauauguuaagcaaaacacucugaaauuggcaacagggaugcggaauguaccagagaaacaaacuagaggcauauucggcgcaaucgcggguuucauagaaaaugguugggagggaaugguggacgguugguacgguuucaggcaucaaaauucugagggcacaggacaagcagcagaucuuaaaagcacucaagcagcaaucaaccaaaucaacgggaaacugaauagguuaaucgagaaaacgaacgagaaauuccaucaaauugaaaaagaauucucagaaguagaagggagaauucaggaccucgagaaauauguugaggacacuaaaauagaucucuggucguacaacgcggagcuucuuguugcccuggagaaccaacauacaauugaucuaacugacucagaaaugaacaaacuguuugaaagaacaaagaagcaacugagggaaaaugcugaggauaugggcaaugguuguuucaaaauauaccacaaaugugacaaugccugcauagggucaaucagaaauggaacuuaugaccaugauguauacagagacgaagcauuaaacaaccgguuccagaucaaagguguugagcugaagucaggauacaaagauuggauccuauggauuuccuuugccauaucaugcuuuuugcuuuguguuguuuugcugggguucaucaugugggccugccaaaaaggcaacauuaggugcaacauuugcauuuga

SEQ ID NO: 41131 - RNA, 1701 nt, Artificial Sequence
  derived and/or modified CDS sequence (wt) from hemagglutinin__InfluenzaA__AFM72257
augaagacuaucauugcuuugagcuacauuuuaugucugguuuucgcucaaaaacuucccguaaaugacaacagcacggcaacgcugugccugggacaccaugcagugccaaacggaacgcuagugaaaacaaucacgaaugaccacauugaagugacuaaugcuacugagcugguucagaguuccucaacagguagaauaugcgacaguccucaccaaauccuugauggagaaaacugcacacuaauagaugcucuauugggagacccucauugugauggcuuccaaaauaaggaaugggaccuuuuuguugaacgcagcacagccuacagcaacuguuacccuuaugaugugccggauuaugccucccuuaggucacuaguugccucauccggcacacuggaguuuaacaaugaaagcuucaauuggacuggagucgcucagaauggaacaagcucugcuugcaaaaggagaucuauuaaaaguuucuuuaguagauugaauugguugcaccaauuaaauuacaaauauccagcacugaacgugacuaugccaaacaaugaaaaauuugacaaauuguacauuugggggguucaccacccgaguacggacagugaccaaaucagcauauaugcucaagcaucagggagagucacagucucuaccaaaagaagccaacaaacuguaaucccgaauaucggaucuagacccuggguaaggggugucuccagcggaauaagcaucuauuggacaauaguaaaaccgggagacauacuuuugauuaacagcacagggaaucuaauugcuccucgggguuacuuuaaaauacgaagugggaaaagcucaauaaugaggucaaaugcacccauuggcaaaugcaauucugaaugcaucacuccaaauggaagcauucccaaugacaaaccauuucaaaauguaaacaggaucacauauggggccugucccagauauguuaagcaaaacacucugaaauuggcaacagggaugcggaauguaccagagaaacaaacuagaggcauauucggcgcaaucgcggguuucauagaaaaugguugggagggaaugguggacgguugguacgguuucaggcaucaaaauucugagggcacaggacaagcagcagaucuuaaaagcacucaagcagcaaucaaccaaaucaacgggaaacugaauagguuaaucgagaaaacaaacgagaaauuccaucaaauugaaaaagaauucucagaaguagaagggagaauucaggaccucgagaaauauguugaggacacuaaaauagaucucuggucguacaacgcggagcuucuuguugcccuggagaaccaacauacaauugaucuaacugacucagaaaugaacaaacuguuugaaagaacaaggaagcaacugagggaaaaugcugaggauaugggcaaugguuguuucaaaauauaccacaaaugugacaaugccugcauagggucaaucagaaauggaacuuaugaccaugauguauacagagacgaagcauuaaacaaccgguuccagaucaaagguguugagcugaagucaggauacaaagauuggauccuauggauuuccuuugccauaucauguuuuuugcuuuguguuguuuugcugggguucaucaugugggccugccaaaaaggcaacauuaggugcaacauuugcauuuga

SEQ ID NO: 41132 - RNA, 1701 nt, Artificial Sequence
  derived and/or modified CDS sequence (wt) from hemagglutinin__InfluenzaA__AFM72268
augaagacuaucauugcuuugagcuacauuuuaugucugguuuucgcucaaaaacuucccguaaaugacaacagcacggcaacgcugugccugggacaccaugcagugccaaacggaacgcuagugaaaacaaucacgaaugaccacauugaagugacuaaugcuacugagcugguucagaguuccucaacagguagaauaugcgacaguccucaccaaauccuugauggagaaaacugcacacuaauagaugcucuauugggagacccucauugugauggcuuccaaaauaaggaaugggaccuuuuuguugaacgcagcacagccuacagcaacuguuacccuuaugaugugccggauuaugccucccuuaggucacuaguugccucauccggcacacuggaguuuaacaaugaaagcuucaauuggacuggagucgcucagaauggaacaagcucugcuugcaaaaggagaucuauuaaaaguuucuuuaguagauugaauugguugcaccaauuaaauuacaaauauccagcacugaacgugacuaugccaaacaaugaaaaauuugacaaauuguacauuugggggguucaccacccgaauacggacagugaccaaaucagcauauaugcucaagcaucagggagagucacagucucuaccaaaagaagccaacaaacuguaaucccgaauaucggaucuagacccuggguaaggggugucuccagcggaauaagcaucuauuggacaauaguaaaaccgggagacauacuuuugauuaacagcacagggaaucuaauugcuccucgggguuacuuuaaaauacgaagugggaaaagcucaauaaugaggucaaaugcacccauuggcaaaugcaauucugaaugcaucacuccaaauggaagcauucccaaugacaaaccauuucaaaauguaaacaggaucacauauggggccugucccagauauguuaagcaaaacacucugaaauuggcaacagggaugcggaauguaccagagaaacaaacuagaggcauauucggcgcaaucgcggguuucauagaaaaugguugggagggaaugguggacgguugguacgguuucaggcaucaaaauucugagggcacaggacaagcagcagaucuuaaaagcacucaagcagcaaucaaccaaaucaacgggaaacugaauagguuaaucgagaaaacaaacgagaaauuccaucaaauugaaaaagaauucucagaaguagaagggagaauucaggaccucgagaaauauguugaggacacuaaaauagaucuauggucguacaacgcggagcuucuuguugcccuggagaaccaacauacaauugaucuaacugacucagaaaugaacaaacuguuugaaagaacaaggaagcaacugagggaaaaugcugaggauaugggcaaugguuguuucaaaauauaccacaaaugugacaaugccugcauagggucaaucagaaauggaacuuaugaccaugauguauacagagacgaagcauuaaacaaccgguuccagaucaaagguguugagcugaagucaggauacaaagauuggauccuauggauuuccuuugccauaucauguuuuuugcuuuguguuguuuugcugggguucaucaugugggccugccaaaaaggcaacauuaggugcaacauuugcauuuga

SEQ ID NO: 41133 - RNA, 1701 nt, Artificial Sequence
  derived and/or modified CDS sequence (wt) from hemagglutinin__InfluenzaA__AFM72279
augaagacuaucauugcuuugagcuacauuuuaugucugguuuucgcucaaaaacuucccguaaaugacaacagcacggcaacgcugugccugggacaccaugcagugccuaacggaacgcuagugaaaacaaucacgaaugaccacauugaagugacuaaugcuacugagcugguucagaguuccucaacagguagaauaugcgacaguccucaccaaauccuugauggagaaaacugcacacuaauagaugcucuauugggagacccucauugugauggcuuccaaaauaaggaaugggaccuuuuuguugaacgcagcacagccuacagcaacuguuacccuuaugaugugccggauuaugccucccuuaggucacuaguugccucauccggcacacuggaguuuaacaaugaaagcuucaauuggacuggagucgcucagaauggaacaagcucugcuugcaaaaggagaucuauuaaaaguuucuuuaguagauugaauugguugcaccaauuaaaauacaaauauccagcacugaacgugacuaugccaaacaaugaaaaauuugacaaauuguacauuugggggguucaccacccgaguacggacagugaccaaaucagcauauaugcucaagcaucagggagagucacagucucuaccaaaagaagccaacaaacuguaaucccgaauaucggaucuaaacacuggguaaggggugucuccagcagaauaagcaucuauuggacaauaguaaaaccgggagacauacuuuugauuaacagcacagggaaucuaauugcuccucgggguuacuucaaaauacgaagugggaaaagcucaauaaugaggucaaaugcacccauuggcaaaugcaauucugaaugcaucacuccaaauggaagcauucccaaugacaaaccauuucaaaauguaaacaggaucacauauggggccugucccagauauguuaagcaaaacacucugaaauuggcaacagggaugcggaauguaccagagaaacaaacuagaggcauauucggcgcaaucgcggguuucauagaaaaugguugggaaggaaugguggacgguugguacgguuucaggcaucaaaauucugagggcacaggacaagcagcagaucuuaaaagcacucaagcagcaaucaaccaaaucaacgggaaacugaauagguuaaucgagaaaacaaacgagaaauuccaucaaauugaaaaagaauucucagaaguagaagggagaauucaggaccucgagaaauauguugaggacacuaaaauagaucucuggucguacaacgcggagcuucuuguugcccuggagaaccaacauacaauugaucuaacugacucagaaaugaacaaacuguuugaaagaacaaggaagcaacugagggaaaaugcugaggauaugggcaaugguuguuucaaaauauaccacaaaugugacaaugccugcauagggucaaucagaaauggaacuuaugaccaugauguauacagagacgaagcauuaaacaaccgguuucagaucaaagguguugagcugaagucaggauacaaagauuggauccuauggauuuccuuugccauaucauguuuuuugcuuuguguuguuuugcugggguucaucaugugggccugccaaaaaggcaacauuaggugcaacauuugcauuuga

SEQ ID NO: 41134 - RNA, 1701 nt, Artificial Sequence
  derived and/or modified CDS sequence (wt) from hemagglutinin__InfluenzaA__AFM72290
augaagacuaucauugcuuugagcuacauuuuaugucugguuuucgcucaaaaacuucccguaaaugacaacagcacggcaacgcugugccugggacaccaugcagugccuaacggaacgcuagugaaaacaaucacgaaugaccacauugaagugacuaaugcuacugagcugguucagaguuccucaacagguagaauaugcgacaguccucaccaaauccuugauggagaaaacugcacacuaauagaugcucuauugggagacccucauugugauggcuuccaaaauaaggaaugggaccuuuuuguugaacgcagcacagccuacagcaacuguuacccuuaugaugugccggauuaugccucccuuaggucacuaguugccucauccggcacacuggaguuuaacaaugaaagcuucaauuggacuggagucgcucagaauggaacaagcucugcuugcaaaaggagaucuauuaaaaguuucuuuaguagauugaauugguugcaccaauuaaaagacaaauauccagcacugaacgugacuaugccaaacaaugaaaaauuugacaaauuguacauuugggggguucaccacccgaguacggacagugaccaaaucagcauauaugcucaagcaucagggagagucacagucucuaccaaaagaagccaacaaacuguaaucccgaauaucggaucuaaacacuggguaaggggugucuccagcagaauaagcaucuauuggacaauaguaaaaccgggagacauacuuuugauuaacagcacagggaaucuaauugcuccucgggguuacuucaaaauacgaagugggaaaagcucaauaaugaggucaaaugcacccauuggcaaaugcaauucugaaugcaucacuccaaauggaagcauucccaaugacaaaccauuucaaaauguaaacaggaucacauauggggccugucccagauauguuaagcaaaacacucugaaauuggcaacagggaugcggaauguaccagagaaacaaacuagaggcauauucggcgcaaucgcggguuucauagaaaaugguugggaaggaaugguggacgguugguacgguuucaggcaucaaaauucugagggcacaggacaagcagcagaucuuaaaagcacucaagcagcaaucaaccaaaucaacgggaaacugaauagguuaaucgagaaaacaaacgagaaauuccaucaaauugaaaaagaauucucagaaguagaagggagaauucaggaccucgagaaauauguugaggacacuaaaauagaucucuggucguacaacgcggagcuucuuguugcccuggagaaccaacauacaauugaucuaacugacucagaaaugaacaaacuguuugaaagaacaaggaagcaacugagggaaaaugcugaggauaugggcaaugguuguuucaaaauauaccacaaaugugacaaugccugcauagggucaaucagaaauggaacuuaugaccaugauguauacagagacgaagcauuaaacaaccgguuucagaucaaagguguugagcugaagucaggauacaaagauuggauccuauggauuuccuuugccauaucauguuuuuugcuuuguguuguuuugcugggguucaucaugugggccugccaaaaaggcaacauuaggugcaacauuugcauuuga

SEQ ID NO: 41135 - RNA, 1701 nt, Artificial Sequence
  derived and/or modified CDS sequence (wt) from hemagglutinin__InfluenzaA__AFM72301
augaagacuaucauugcuuuaagcuacauucuaugucugguuuucucucaaaagcuucccggaaaugacaacagcacggcaacgcugugccuugggcaccaugcaguaccaaacggaacgauagugaaaacaaucacgaaugaccaaauugaaguuacuaaugcuacugagcugguucagaguuccucaacagguggaauaugcgacaguccucaucagauccuugauggagaaaacugcacacuaauagaugcucuauugggagacccucagugugauggcuuccaaaauaagaaaugggaccuuuuuguugaacgcagcaaagccuacagcaacuguuacccuuaugaugugccggauuaugccucccuuaggucacuaguugccucauccggcacacuggaguuuaacaaugaaagcuucaauugggcuggagucacucagaauggaacaagcucugcuugcaaaaggagaucuaauaaaaguuucuuuaguagauugaauugguugacccaauuaaaauacaaauacccagcauugaacgugacuaugccaaacaaugaaaaauuugacaaauuguacauuugggggguucaccacccgguuacggacagugaccaaaucagccuauaugcucaagcaucaggaagaaucacagucucuaccaaaagaagccaacaaacuguaaucccgaauaucggauauagacccaggguaagggauaucuccagcagaauaagcaucuauuggacaauaguaaaaccgggagacauacuuuugauuaacagcacaggaaaucuaauugcuccucgggguuacuucaaaauacgaagugggaaaagcucaauaaugagaucagaugcacccauuggcaaaugcaauucugaaugcaucacuccaaauggaagcauucccaaugacaaaccauuucaaaauguaaacaggaucacauauggggccugucccagauauguuaagcaaaacacucugaaauuggcaacagggaugcgaaauguaccagagaaacaaacuagaggcauauuuggcgcaaucgcggguuucauagaaaaugguugggagggaaugguggacgguugguacgguuucaggcaucaaaauucugagggcacaggacaagcagcagaucucaaaagcacucaagcagcaaucaaccaaaucaaugggaaacugaauagguuaaucgggaaaacaaacgagaaauuccaucagauugaaaaagaauucucagaaguagaagggagaauucaggaccucgagaaauauguugaggacacuaaaauagaucucuggucauacaacgcggagcuucuuguugcccuggaaaaccaacauacaauugaucuaacugacucagaaaugaacaaacuguuugaaagaacaaagaagcaacugagggaaaaugcugaggauaugggcaaugguuguuucaaaauauaccacaaaugugacaaugccugcauagagucaaucagaaauggaacuuaugaccaugauguauacagagaugaagcauuaaacaaccgguuccagaucaaagguguugagcugaagucaggauacaaagauuggauccuauggauuuccuuugccauaucauguuuuuugcuuuguguugcuuuguugggguucaucaugugggccugccaaaaaggcaacauuaggugcaacauuugcauuuga

SEQ ID NO: 41136 - RNA, 1701 nt, Artificial Sequence
  derived and/or modified CDS sequence (wt) from hemagglutinin__InfluenzaA__AFM72312
augaagacuaucauugcuuugagcuacauucuaugucugguuuucgcucaaaaacuucccggaaaugacaacagcacggcaacgcugugccuugggcaccaugcaguaccaaacggaacgauagugaaaacaaucacgaaugaccaaauugaaguuacuaaugcuacugagcugguucagaguuccucaacagguggaauaugcgacaguccucaucagauccuugauggagaaaacugcacacuaauagaugcucuauugggagacccucagugugauggcuuccaaaauaagaaaugggaccuuuuuguugaacgcagcaaagccuacagcaacuguuacccuuaugaugugccggauuaugccucccuuaggucacuaguugccucauccggcacacuggaguuuaacaaugaaagcuucaauuggacuggagucacucagaauggaacaagcucugcuugcaaaaggagaucuaauaaaaguuucuuuaguagauugaauugguugacccacuuaaaauacaaauacccagcauugaacgugacuaugccaaacaaugaaaaauuugacaaauuguacauuugggggguucaccacccgguuacggacagugaccaaaucaaccuauaugcucaagcaucaggaagaaucacaguuucuaccaaaagaagccaacaaacuguaaucccgaauaucggauauagacccaggguaagggauauccccagcagaauaagcaucuauuggacaauaguaaaaccgggagacauacuuuugauuaacagcacagggaaucuaauugcuccucgggguuacuucaaaauacgaagugggaaaagcucaauaaugagaucagaugcacccauuggcaaaugcaauucugagugcaucacuccaaauggaagcauucccaaugacaaaccauuucaaaauguaaacaggaucacauauggggccugucccagauauguuaagcaaaacacucugaaauuggcaacagggaugcgaaauguaccagagaaacagacuagaggcauauuuggcgcaaucgcggguuucauagaaaaugguugggagggaaugguggacgguugguacgguuucaggcaucaaaauucugagggcacaggacaagcagcagaucucaaaagcacccaagcagcaaucaaccaaaucaaugggaaacugaauagguuaaucgggaaaacaaacgaaaaauuccaucagauugaaaaagaauucucagaaguagaagggagaauucaggaccucgagaaauauguugaggacacuaaaauagaucucuggucauacaacgcggagcuucuuguugcccuggagaaccaacauacaauugaucuaacugacucagaaaugaacaaacuguuugaaagaacaaagaagcaacugagggaaaaugcugaggacaugggcaaugguuguuucaaaauauaccacaaaugugacaaugccugcauagggucaaucagaaauggaacuuaugaccaugauguauacagagaugaagcauuaaacaaccgguuccagaucaaagguguugagcugaagucaggauacaaagauuggauccuauggauuuccuuugccauaucauguuuuuugcuuuguguugcuuuguugggguucaucaugugggccugccaaaaaggcaacauuaggugcaacauuugcauuuga

SEQ ID NO: 41137 - RNA, 1701 nt, Artificial Sequence
  derived and/or modified CDS sequence (wt) from hemagglutinin__InfluenzaA__AFM72323
augaaggcuaucauugcuuugagcuacauucuaugucugguuuucgcucaaaaacuucccggaaaugacaacagcacggcaacgcugugccuugggcaccaugcaguaccaaacggaacgauagugaaaacaaucacgaaugaccaaauugaaguuacuaaugcuacugagcugguucagaguuccucaacagguggaauaugcgacaguccucaucagauccuugauggagaaaacugcacacuaauagaugcucuauugggagacccucagugugauggcuuccaaaauaagaaaugggaccuuuuuguugaacgcagcaaagccuacagcaacuguuacccuuaugaugugccggauuaugccucccuuaggucacuaguugccucauccggcacacuggaguuuaacaaugaaagcuucaauuggacuggagucacucagaauggaacaagcucugcuugcaaaaggagaucuaauaaaaguuucuuuaguagauugaauugguugacccacuuaaaauacaaauacccagcauugaacgugacuaugccaaacaaugaaaaauuugacaaauuguacauuugggggguucaccacccgguuacggacagugaccaaaucaaccuauaugcucaagcaucaggaagaaucacaguuucuaccaaaagaagccaacaaacuguaaucccgaauaucggauauagacccaggguaagggauaaccccagcagaauaagcaucuauuggacaauaguaaaaccgggagacauacuuuugauuaacagcacagggaaucuaauugcuccucgggguuacuucaaaauacgaagugggaaaagcucaauaaugagaucagaugcacccauuggcaaaugcaauucugagugcaucacuccaaauggaagcauucccaaugacaaaccauuucaaaauguaaacaggaucacauauggggccugucccagauauguuaagcaaaacacucugaaauuggcaacagggaugcgaaauguaccagagaaacagacuagaggcauauuuggcgcaaucgcggguuucauagaaaaugguugggagggaaugguggacgguugguacgguuucaggcaucaaaauucugagggcacaggacaagcagcagaucucaaaagcacccaagcagcaaucaaccaaaucaaugggaaacugaauagguuaaucgggaaaacaaacgaaaaauuccaucagauugaaaaagaauucucagaaguagaagggagaauucaggaccucgagaaauauguugaggacacuaaaauagaucucuggucauacaacgcggagcuucuuguugcccuggagaaccaacauacaauugaucuaacugacucagaaaugaacaaacuguuugaaagaacaaagaagcaacugagggaaaaugcugaggacaugggcaaugguuguuucaaaauauaccacaaaugugacaaugccugcauagggucaaucagaaauggaacuuaugaccaugauguauacagagaugaagcauuaaacaaccgguuccagaucaaagguguugagcugaagucaggauacaaagauuggauccuauggauuuccuuugccauaucauguuuuuugcuuuguguugcuuuguugggguucaucaugugggccugccaaaaaggcaacauuaggugcaacauuugcauuuga

SEQ ID NO: 41138 - RNA, 1701 nt, Artificial Sequence
  derived and/or modified CDS sequence (wt) from hemagglutinin__InfluenzaA__AFM72334
augaagacuaucauugcuuugagcuacauucuaugucugguuuucgcucaaaaacuuccuggaaaugacaacagcacggcaacgcugugccuugggcaccaugcagugccaaacggaacgauagugaaaacaaucacgaaugaccaaauugaaguuacuaaugcuacugagcugguucagaguuccucaacaggugaaauaugcaacaguccucaucagauccuugauggagaaaacugcacacuaauagaugcucuauugggagacccucagugugauggcuuccaaaacaagaaaugggaccuuuuuguugaacgaagcaaagcccacagcaacuguuacccuuaugaugugccggauuaugccucccuuaggucacuaguugccucauccggcacacuggaguuuaacaaugaaagcuucaauuggacuggagucacucaaaacggaacaagcucugcuugcauaaggagaucuaauaauaguuucuuuaguagauugaauugguugacccacuuaaacuucaaauacccagcauugaacgugacuaugccaaacaaugaacaauuugacaaauuguacauuugggggguucuccacccggguacguacaaggaccaaaucuuccuguaugcucaagcaucaggaagaaucacaguaucuaccaaaagaagccaacaagcuguaauuccgaauaucggaucuagacccagaguaaggaauaucccuagcagaguaagcaucuauuggacaauaguaaaaccgggagacauacuuuugauuaacagcacagggaaucuaauugcuccuagggguuacuucaaaauacgaagugggaaaagcucaauaaugagaucagaugcacccauuggcaaaugcaauucugcaugcaucacuccaaauggaagcauucccaaugacaaaccauuccaaaauguaaacaggaucacauacggggccugucccagauauguuaagcaaaacacucugaaauuggcaacaggaaugagaaauguaccagagaaacaaacuagaggcauauuuggcgcaauagcggguuucauagaaaaugguugggagggaaugguggaugguugguacgguuucaggcaucaaaauucugagggaaggggacaagcagcagaucucaaaagcacucaagcagcaaucgaucaaaucaaugggaagcugaauagauugaucgggaaaaccaacgagaaauuucaucagauugaaaaagaauucucagaagucgaagggagaauucaggaccuugagaaauauguugaggacacuaaaauagaucucuggucauacaacgcggagcuucuuguugcccuggagaaccaacacacaauugaucuaacugacucagaaaugaacaaacuguuugaaaaaacaaagaagcaacugagggaaaaugcugaggauaugggcaaugguuguuucaaaauauaccacaaaugugacaaugccugcauaggaucaaucagaaauggaacuuaugaccacgauguguacagagaugaagcauuaaacaaccgauuccagaucaagggaguugagcugaagucaggguacaaagauuggauccuauggauuuccuuugccauaucauguuuuuugcuuuguguugcuuuguugggguucaucaugugggccugccaaaaaggcaacauuaggugcaacauuugcauuuga

SEQ ID NO: 41139 - RNA, 1701 nt, Artificial Sequence
  derived and/or modified CDS sequence (wt) from hemagglutinin__InfluenzaA__AFM72345
augaagacuaucauugcuuugagcuacauucuaugucugguuuucgcucaaaaacuucccggaaaugacaacagcacggcaacgcugugccuugggcaccaugcaguaccaaacggaacgauagugaaaacaaucacgaaugaccaaauugaaguuacuaaugcuacugagcugguacagaguuccucaacagguggaauaugcgacaguccucaucagauccuugauggagaaaacugcacacuaauagaugcucuauugggagacccucagugugauggcuuccaaaauaagaaaugggaccuuuuuguugaacgcagcaaagccuacagcaacuguuacccuuaugaugugccggauuaugccucccuuaggucacuaguugccucauccggcacacuggaguuuaacaaugaaagcuucgauuggacuggagucacucagaauggaacaagcucugcuugcaaaaggagaucuaauaaaaguuucuuuaguagauugaauugguugacccacuuaaaauacaaauacccagcauugaacgugacuaugccaaacaaugaaaaauuugacaaauuguacauuugggggguucaccacccgguuacggacagugaccaaaucagccuauauacucaagcaucaggaagaaucacagucucuaccaaaagaagccaacaaacuguaaucccgaauaucggauuuagacccaggguaagggauaucuccagccgaauaagcaucuauuggacaauaguaaaaccgggagacauacuuuugauuaacagcacagggaaucuaauugcuccucgggguuacuucaaaauacgaagugggaaaagcucaauaaugagaucagaugcacccauuggcaaaugcaauuccgaaugcaucacuccaaauggaagcauucccaaugacaaaccauuucaaaauguaaacaggaucacauauggggccugucccagauauguuaagcaaaacacucugaaauuggcaacagggaugcgaaauguaccagagaaacaaacuagaggcauauuuggcgcaaucgcggguuucauagaaaaugguugggagggaaugguggacgguugguacgguuucaggcaucaaaauucugagggcacaggacaagcagcagaucucaaaagcacucaagcagcaaucaaccaaaucaaugggaaacugaauagguuaaucgggaaaacaaacgagaaauuccaucagauugaaaaagaauucucagaaguagaagggagaauucaggaccucgagaaauauguugaggacacuaaaauagaucucuggucauacaacgcggagcuucuuguugcccuggagaaccaacauacaauugaucuaacugacucagaaaugaacaaacuguuugaaagaacaaagaagcaacugagggaaaaugcugaggauaugggcaaugguuguuucaaaauauaccacaaaugugacaaugccugcauagggucaaucagaaauggaacuuaugaccaugauguguacagagaugaagcauuaaacaaccgguuccagaucaaagguguugagcugaagucaggauacaaagauuggauccuauggauuuccuuugccauaucauguuuuuugcuuuguguugcuuuguugggguucaucaugugggccugccaaaaaggcaacauuaggugcaacauuugcauuuga

SEQ ID NO: 41140 - RNA, 1701 nt, Artificial Sequence
  derived and/or modified CDS sequence (wt) from hemagglutinin__InfluenzaA__AFM72356
augaagacuaucauugcuuugagcuacauucuaugucugguuuucgcucaaaaacuucccggaaaugacaacagcacggcaacgcugugccuugggcaccaugcaguaccaaacggaacgauagugaaaacaaucacgaaugaccaaauugaaguuacuaaugcuacugagcugguucagaguuccucaacagguggaauaugcgacaguccucaucagauccuugauggagaaaacugcacacuaauagaugcucuauugggagacccucagugugauggcuuccaaaauaagaaaugggaccuuuuuguugaacgcagcaaagccuacagcaacuguuacccuuaugaugugccggauuaugccucccuuaggucacuaguugccucauccggcacacuggaguuuaacaaugaaagcuucaauuggacuggagucacucaaaauggaacaagcucugcuugcaaaaggagaucuaauaaaaguuucuuuaguagauugaauugguugacccacuuaaaauucaaauacccagcauugaacgugacuaugccaaacaaugaaaaauuugacaaauuguacauuugggggguucaccacccggguacggacaaugaccaaaucaaccuauauguucaagcaucaggaagaaucacagucucuaccaaaagaagccaacaaacuguaaucccgaauaucggaucuagacccagaguaagggauguccccagcagaauaagcaucuauuggacaauaguaaaaccgggagacauacuuuugauuagcagcacagggaaucuaauugcuccucgggguuacuucaaaauacgaagugggaaaagcucaauaaugagaucagaugcacccauuggcaaaugcaauucugaaugcaucacuccaaauggaagcauucccaaugacaaaccauuucaaaauguaaacaggaucacauauggggccugucccagauauguuaagcaaaacacucugaaauuggcaacagggaugcgaaauguaccagagaaacaaacuagaggcauauuuggcgcaaucgcggguuucauagaaaaugguugggagggaaugguggacgguugguacgguuucaggcaucaaaauucugagggaacaggacaagcagcagaucucaaaagcacucaagcagcaaucaaccaaaucaaugggaagcugaauagguugaucgggaaaacaaacgagaaauuccaucagauugaaaaagaauucucagaaguagaagggagaauucaggaccucgagaaauauguugaggacacuaaaauagaucucuggucauacaacgcggagcuucuuguugcccuggagaaccaacauacaauugaucuaacugacucagaaaugaacaaacuguuugaaagaacaaagaagcaacugagggaaaaugcugaggauaugggcaaugguuguuucaaaauauaccacaaaugugacaaugccugcauagggucaaucagaaauggaacuuaugaccaugauguauacagagaugaagcauuaaacaaccgguuccagaucaaagguguugagcugaagucaggauacaaagauuggauccuauggauuuccuuugccauaucauguuuuuugcuuuguguugcuuuguugggguucaucaugugggccugccaaaaaggcaacauuaggugcaacauuugcauuuga

SEQ ID NO: 41141 - RNA, 1701 nt, Artificial Sequence
  derived and/or modified CDS sequence (wt) from hemagglutinin__InfluenzaA__AFM72367
augaagacuaucauugcuuugagcuacauucuaugucugguuuucgcucaaaaacuucccggaaaugacaacagcacggcaacgcugugccuugggcaccaugcaguaccaaacggaacgauagugaaaacaaucacgaaugaccaaauugaaguuacuaaugcuacugagcugguucagaguuccucaacagguggaauaugcgacaguccucaucagauccuugauggagaaaacugcacacuaauagaugcucuauugggagacccucagugugauggcuuccaaaauaagaaaugggaccuuuuuguugaacgcagcaaagccuacagcaacuguuacccuuaugaugugccggauuaugccucccuuaggucacuaguugccucauccggcacacuggaguuuaacaaugaaagcuucaauuggacuggagucacucaaaauggaacaagcucugcuugcaaaaggagaucuaauaaaaguuucuuuaguagauugaauugguugacccacuuaaaauucaaauacccagcauugaacgugacuaugccaaacaaugaaaaauuugacaaauuguacauuugggggguucaccacccgguuacggacaaugaccaaaucaaccuauaugcucaagcaucaggaagaaucacagucucuaccaaaagaagccaacaaacuguaaucccgaauaucggaucuagacccagaguaagggauguccccagcagaauaagcaucuauuggacaauaguaaaaccgggagacauacuuuugauuagcagcacagggaaucuaauugcuccucgggguuacuucaaaauacgaagugggaaaagcucaauaaugagaucagaugcacccauuggcaaaugcaauucugaaugcaucacuccaaauggaagcauucccaaugacaaaccauuucaaaauguaaacaggaucacauauggggccugucccagauauguuaagcaaaacacucugaaauuggcaacagggaugcgaaauguaccagagaaacaaacuagaggcauauuuggcgcaaucgcggguuucauagaaaaugguugggagggaaugguggacgguugguacgguuucaggcaucaaaauucugagggaacaggacaagcagcagaucuaaaaagcacucaagcagcaaucaaccaaaucaaugggaagcugaauagguugaucgggaaaacaaacgagaaauuccaucagauugaaaaagaauucucagaaguagaagggagaauucaggaccucgagaaauauguugaggacacuaaaauagaucucuggucauacaacgcggagcuucuuguugcccuggagaaccaacauacaauugaucuaacugacucagaaaugaacaaacuguuugaaagaacaaagaagcaacugagggaaaaugcugaggauaugggcaaugguuguuucaaaauauaccacaaaugugacaaugccugcauagggucaaucagaaauggaacuuaugaccaugauguauacagagaugaagcauuaaacaaccgguuccagaucaaagguguugagcugaagucaggauacaaagauuggauccuauggauuuccuuugccauaucauguuuuuugcuuuguguugcuuuguugggguucaucaugugggccugccaaaaaggcaacauuaggugcaacauuugcauuuga

SEQ ID NO: 41142 - RNA, 1701 nt, Artificial Sequence
  derived and/or modified CDS sequence (wt) from hemagglutinin__InfluenzaA__AFM72378
augaagacuaucauugcuuugagcuacauucuaugucugguuuucgcucaaaaacuuccuggaaaugacaacagcacggcaacgcugugccuugggcaccaugcagugccaaacggaacgauagugaaaacaaucacgaaugaccaaauugaaguuacuaaugcuacugagcugguucagaguuccucaacaggugaaauaugcaacaguccucaucagauccuugauggagaaaacugcacacuaauagaugcucuauugggagacccucagugugauggcuuccaaaacaagaaaugggaccuuuuuguugaacgaagcaaagcccacagcaacuguuacccuuaugaugugccggauuaugccucccuuaggucacuaguugccucauccggcacacuggaguuuaacaaugaaagcuucaauuggacuggagucacucaaaacggaacaagcucugcuugcauaaggagaucuaauaauaguuucuuuaguagauugaauugguugacccaauuaaacuucaaauacccagcauugaacgugacuaugccaaacaaugaacaauuugacaaauuguacauuugggggguucaccacccgguuacggacaaggaccaaaucuuccuguaugcucaagcaucaggaagaaucacaguaucuaccaaaagaagccaacaagcuguaauuccgaauaucggauauagacccagaguaaggaauaucccuagcagaguaagcaucuauuggacaauaguaaaaccgggagacauacuuuugauuaacagcacagggaaucuaauugcuccuagggguuacuucaaaauacgaagugggaaaagcucaauaaugagaucagaugcacccauuggcaaaugcaauucugcaugcaucacuccaaauggaagcauucccaaugacaaaccauuccaaaauguaaacaggaucacauacggggccugucccagauauguuaagcaaaacacucugaaauuggcaacaggaaugagaaauguaccagagaaacaaacuagaggcauauuuggcgcaauagcggguuucauagaaaaugguugggagggaaugguggaugguugguacgguuucaggcaucaaaauucugagggaaggggacaagcagcagaucucaaaagcacucaggcagcaaucgaucaaaucaaugggaagcugaauagauugaucgggaaaaccaacgagaaauuccaucagauugaaaaagaauucucagaagucgaagggagaauucaggaccuugagaaauauguugaggacacuaaaauagaucucuggucauacaacgcggagcuucuuguugcccuggagaaccaacacacaauugaucuaacugacucagaaaugaacaaacuguuugaaaaaacaaagaagcaacugagggaaaaugcugaggauaugggcaaugguuguuucaaaauauaccacaaaugugacaaugccugcauaggaucaaucagaaauggaacuuaugaccacgauguguacagagaugaagcauuaaacaaccgauuccagaucaagggaguugagcugaagucaggguacaaagauuggauccuauggauuuccuuugccauaucauguuuuuugcuuuguguugcuuuguugggguucaucaugugggccugccaaaaaggcaacauuaggugcaacauuugcauuuga

SEQ ID NO: 41143 - RNA, 1701 nt, Artificial Sequence
  derived and/or modified CDS sequence (wt) from hemagglutinin__InfluenzaA__AFM72389
augaagacuaucauugcuuugagcuacauucuaugucugguuuucgcucaaaaacuuccuggaaaugacaacagcacggcaacgcugugccuugggcaccaugcagugccaaacggaacgauagugaaaacaaucacgaaugaccaaauugaaguuacuaaugcuacugagcugguucagaguuccucaacaggugaaauaugcaacaguccucaucagauccuugauggagaaaacugcacacuaauagaugcucuauugggagacccucagugugauggcuuccaaaacaagaaaugggaccuuuuuguugaacgaagcaaagcccacagcaacuguuacccuuaugaugugccggauuaugccucccuuaggucacuaguugccucauccggcacacuggaguuuaacaaugaaagcuucaauuggacuggagucacucaaaacggaacaagcucugcuugcauaaggagaucuaauaauaguuucuuuaguagauugaauugguugacccacuuaaacuucaaauacccagcauugaacgugacuaugccaaacaaugaacaauuugacaaauuguacauuugggggguucaccacccgguuacggacaaggaccaaaucuuccuguaugcucaagcaucaggaagaaucacaguaucuaccaaaagaagccaacaagcuguaauuccgaauaucggauauagacccagaguaaggaauaacccuagcagaguaagcaucuauuggacaauaguaaaaccgggagacauacuuuugauuaacagcacagggaaucuaauugcuccuagggguuacuucaaaauacgaagugggaaaagcucaauaaugagaucagaugcacccauuggcaaaugcaauucugcaugcaucacuccaaauggaagcauucccaaugacaaaccauuccaaaauguaaacaggaucacauacggggccugucccagauauguuaagcaaaacacucugaaauuggcaacaggaaugagaaauguaccagagaaacaaacuagaggcauauuuggcgcaauagcggguuucauagaaaaugguugggagggaaugguggaugguugguacgguuucaggcaucaaaauucugagggaaggggacaagcagcagaucucaaaagcacucaggcagcaaucgaucaaaucaaugggaagcugaauagauugaucgggaaaaccaacgagaaauuccaucagauugaaaaagaauucucagaagucgaagggagaauucaggaccuugagaaauauguugaggacacuaaaauagaucucuggucauacaacgcggagcuucuuguugcccuggagaaccaacacacaauugaucuaacugacucagaaaugaacaaacuguuugaaaaaacaaagaagcaacugagggaaaaugcugaggauaugggcaaugguuguuucaaaauauaccacaaaugugacaaugccugcauaggaucaaucagaaauggaacuuaugaccacgauguguacagagaugaagcauuaaacaaccgauuccagaucaagggaguugagcugaagucaggguacaaagauuggauccuauggauuuccuuugccauaucauguuuuuugcuuuguguugcuuuguugggguucaucaugugggccugccaaaaaggcaacauuaggugcaacauuugcauuuga

SEQ ID NO: 41144 - RNA, 1701 nt, Artificial Sequence
  derived and/or modified CDS sequence (wt) from hemagglutinin__InfluenzaA__AFM72400
augaagacuaucauugcuuugagcuacauucuaugucugguuuucgcucaaaaacuucccggaauugacaacagcacggcaacgcugugccuugggcaccaugcaguaccaaacggaacgauagugaaaacaaucacgaaugaccaaauugaaguuacuaaugcuacugagcugguucagaguuccucaacaggugaaauaugcgacaguccucaucagauccuugauggagaaaacugcacacuaauagaugcucuauugggagacccucagugugauggcuuccaaaauaagaaaugggaccuuuuuguugaacgcagcaaagccuacagcaacuguuacccuuaugaugugccggauuaugccucccuuaggucacuaguugccucauccggcacacuggaguuuaacaaugaaagcuucaauugggcuggagucacucaaaauggaacaagcucugcuugcaaaaggggaucuaauaacaguuucuuuaguagauugaauugguugacccacucaaaauucaaauacccagcauugaacgugacuaugccaaacaaugaagaauuugacaaauuguacauuugggggguucuccacccggguacggacaaugaccaaaucuuccuguaugcucaagcaucaggaagaaucacagucucuaccaaaagaagccaacaaacuguaaucccgaauaucggaucuagacccagaguaaggaauauucccagcagaauaagcaucuauuggacaauaguaaaaccgggagacauacuuuugauuaacagcacagggaaucuaauugcuccuagggguuacuucaaaauacgaagugggaaaagcucaauaaugagaucagaugcacccauuggcaaaugcaauucugaaugcaucacuccaaauggaagcauucccaaugacaaaccauuucaaaauguaaacaggaucacauacggggccugucccagauauguuaagcaaaacacucugaaauuggcaacagggaugcgaaauguaccagagaaacaaacuagaggcauauuuggcgcaaucgcggguuucauagaaaaugguugggagggaaugguggaugguugguacgguuucaggcaucaaaauucugagggaauaggacaagcagcagaucucaaaagcacucaagcagcaaucgaucaaaucaaugggaagcugaauagguugaucgggaaaaccaacgagaaauuccaccagauugaaaaagaauucucagaaguagaagggagaauucaggaccucgagaaauauguugaggacacuaaaauagaucucuggucauacaacgcggagcuucuuguugcccuggagaaccaacauacaauugaucuaacugacucagaaaugaacaaacuguuugaaaagacaaagaagcaacugagggaaaaugcugaggauaugggcaaugguuguuucaaaauauaccacaaaugugacaaugccugcauaggaucaaucagaaauggaacuuaugaccaugauguauacagagaugaagcauuaaacaaccgguuucagaucaagggcguugagcugaagucaggauacaaagauuggauccuauggauuuccuuugccauaucauguuuuuugcuuuguguugcuuuguugggguucaucaugugggccugccaaaaaggcaacauuaggugcaacauuugcauuuga

SEQ ID NO: 41145 - RNA, 1701 nt, Artificial Sequence
  derived and/or modified CDS sequence (wt) from hemagglutinin__InfluenzaA__AFM72411
augaagacuaucauugcuuugagcuacauucuaugucugguuuucgcucaaaaacuucccggaauugacaacagcacggcaacgcugugccuugggcaccaugcaguaccaaacggaacgauagugaaaacaaucacgaaugaccaaauugaaguuacuaaugcuacugagcugguucagaguuccucaacaggugaaauaugcgacaguccucaucagauccuugauggagaaaacugcacacuaauagaugcucuauugggagacccucagugugauggcuuccaaaauaagaaaugggaccuuuuuguugaacgcagcaaagccuacagcaacuguuacccuuaugaugugccggauuaugccucccuuaggucacuaguugccucauccggcacacuggaguuuaacaaugaaagcuucaauugggcuggagucacucaaaauggaacaagcucugcuugcaaaaggggaucuaauaacaguuucuuuaguagauugaauugguugacccaaucaaaauucaaauacccagcauugaacgugacuaugccaaacaaugaagaauuugacaaauuguacauuugggggguucaccacccgguuacggacaaugaccaaaucuuccuguaugcucaagcaucaggaagaaucacagucucuaccaaaagaagccaacaaacuguaaucccgaauaucggaucuagacccagaguaaggaauauucccagcagaauaagcaucuauuggacaauaguaaaaccgggagacauacuuuugauuaacagcacagggaaucuaauugcuccuagggguuacuucaaaauacgaagugggaaaagcucaauaaugagaucagaugcacccauuggcaaaugcaauucugaaugcaucacuccaaauggaagcauucccaaugacaaaccauuucaaaauguaaacaggaucacauacggggccugucccagauauguuaagcaaaacacucugaaauuggcaacagggaugcgaaauguaccagagaaacaaacuagaggcauauuuggcgcaaucgcggguuucauagaaaaugguugggagggaaugguggaugguugguacgguuucaggcaucaaaauucugagggaauaggacaagcagcagaucucaaaagcacucaagcagcaaucgaucaaaucaaugggaagcugaauagguugaucgggaaaaccaacgagaaauuccaccagauugaaaaagaauucucagaaguagaagggagaauucaggacuucgagaaauauguugaggacacuaaaauagaucucuggucauacaacgcggagcuucuuguugcccuggagaaccaacauacaauugaucuaacugacucagaaaugaacaaacuguuugaaaagacaaagaagcaacugagggaaaaugcugaggauaugggcaaugguuguuucaaaauauaccacaaaugugacaaugccugcauaggaucaaucagaaauggaacuuaugaccaugauguauacagagaugaagcauuaaacaaccgguuucagaucaagggcguugagcugaagucaggauacaaagauuggauccuauggauuuccuuugccauaucauguuuuuugcuuuguguugcuuuguugggguucaucaugugggccugccaaaaaggcaacauuaggugcaacauuugcauuuga

SEQ ID NO: 41146 - RNA, 1701 nt, Artificial Sequence
  derived and/or modified CDS sequence (wt) from hemagglutinin__InfluenzaA__AFM72422
augaagacuaucauugcuuugagcuacauucuaugucugguuuucgcucaaaaacuuccuggaaaugacaacagcacggcaacgcugugccuugggcaccaugcaguaccaaacggaacgauagugaaaacaaucacgaaugaccaaauugaaguuacuaaugcuacugagcugguucagaguuccucaacaggugaaauaugcgacaguccucaucagauccuugauggagaaaacugcacacuaauagaugcucuauugggagacccucagugugauggcuuccaaaauaagaaaugggaccuuuuuguugaacgcagcaaagccuacagcaacuguuacccuuaugaugugccggauuaugccucccuuaggucacuaguugccucauccggcacacuggaguuuaacaaugaaagcuucaauuggacuggagucacucaaaacggaacaagcucugcuugcauaaggagaucuaauaacaguuucuuuaguagauugaauugguugacccacuuaaaauucaaauacccagcauugaacgugacuaugccaaacaaugaagaauuugacaaauuguacauuugggggguucaccacccgguuacggacaaugaccaaaucuuccuguaugcucaagcaucaggaagaaucacagucucuaccaaaagaagccaacaaacuguaaucccgaauaucggauuuagacccagaguaaggaauauccccagcagaauaagcaucuauuggacaauaguaaaaccgggagacauacuuuugauuaacagcacagggaaucuaauugcuccuagggguuacuucaaaauacgaagugggaaaagcucaauaaugagaucagaugcacccauuggcaaaugcaauucugaaugcaucacuccaaauggaagcauucccaaugacaaaccauuccaaaauguaaacaggaucacauacggggccugucccagauauguuaagcaaaacacucugaaauuggcaacagggaugcgaaauguaccagagaaacaaacuagaggcauauuuggcgcaaucgcggguuucauagaaaaugguugggagggaaugguggaugguugguacgguuucaggcaucaaaauucugagggaauaggacaagcagcagaucucaaaagcacucaagcagcaaucgaucaaaucaaugggaagcugaauagguugaucgggaaaaccaacgagaaauuccaucagauugaaaaagaauucucagaagucgaagggaggauucaggaccuugagaaauaugcugaggacaccaaaauagaucucuggucauacaacgcggagcuucuuguugcccuggagaaccaacauacaauugaucuaacugacucagaaaugaacaaacuguuugaaaaaacaaagaagcaacugagggaaaaugcugaggauaugggcaaugguuguuucaaaauauaccacaaaugugacaaugccugcauaggaucaaucagaaauggaacuuaugaccacgauguauacagagaugaagcauuaaacaaccgguuccagaucaagggcguugagcugaagucaggauacaaagauuggauccuauggauuuccuuugccauaucauguuuuuugcuuuguguugcuuuguugggguucaucaugugggccugccaaaaaggcaacauuaggugcaacauuugcauuuga

SEQ ID NO: 41147 - RNA, 1701 nt, Artificial Sequence
  derived and/or modified CDS sequence (wt) from hemagglutinin__InfluenzaA__AFM72433
augaagacuaucauugcuuugagcuacauucuaugucugguuuucgcucaaaaacuuccuggaaaugacaacagcacggcaacgcugugccuugggcaccaugcaguaccaaacggaacgauagugaaaacaaucacgaaugaccaaauugaaguuacuaaugcuacugagcugguucagaguuccucaacaggugaaauaugcgacaguccucaucagauccuugauggagaaaacugcacacuaauagaugcucuauugggagacccucagugugauggcuuccaaaauaagaaaugggaccuuuuuguugaacgcagcaaagccuacagcaacuguuacccuuaugaugugccggauuaugccucccuuaggucacuaguugccucauccggcacacuggaguuuaacaaugaaagcuucaauuggacuggagucacucaaaacggaacaagcucugcuugcauaaggagaucuaauaacaguuucuuuaguagauugaauugguugacccacuuaaaauucaaauacccagcauugaacgugacuaugccaaacaaugaagaauuugacaaauuguacauuugggggguucaccacccgguuacggacaaugaccaaaucuuccuguaugcucaagcaucaggaagaaucacagucucuaccaaaagaagccaacaaacuguaaucccgaauaucggauuuagacccagaguaaggaauaaccccagcagaauaagcaucuauuggacaauaguaaaaccgggagacauacuuuugauuaacagcacagggaaucuaauugcuccuagggguuacuucaaaauacgaagugggaaaagcucaauaaugagaucagaugcacccauuggcaaaugcaauucugaaugcaucacuccaaauggaagcauucccaaugacaaaccauuccaaaauguaaacaggaucacauacggggccugucccagauauguuaagcaaaacacucugaaauuggcaacagggaugcgaaauguaccagagaaacaaacuagaggcauauuuggcgcaaucgcggguuucauagaaaaugguugggagggaaugguggaugguugguacgguuucaggcaucaaaauucugagggaauaggacaagcagcagaucucaaaagcacucaagcagcaaucgaucaaaucaaugggaagcugaauagguugaucgggaaaaccaacgagaaauuccaucagauugaaaaagaauucucagaagucgaagggaggauucaggaccuugagaaauaugcugaggacaccaaaauagaucucuggucauacaacgcggagcuucuuguugcccuggagaaccaacauacaauugaucuaacugacucagaaaugaacaaacuguuugaaaaaacaaagaagcaacugagggaaaaugcugaggauaugggcaaugguuguuucaaaauauaccacaaaugugacaaugccugcauaggaucaaucagaaauggaacuuaugaccacgauguauacagagaugaagcauuaaacaaccgguuccagaucaagggcguugagcugaagucaggauacaaagauuggauccuauggauuuccuuugccauaucauguuuuuugcuuuguguugcuuuguugggguucaucaugugggccugccaaaaaggcaacauuaggugcaacauuugcauuuga

SEQ ID NO: 41148 - RNA, 1701 nt, Artificial Sequence
  derived and/or modified CDS sequence (wt) from hemagglutinin__InfluenzaA__AFM72444
augaagacuaucauugcuuugagcuacauucuaugucugguuuucgcucaaaaacuuccuggaaaugacaacagcacggcaacgcugugccuugggcaccaugcaguaccaaacggaacgauagugaaaacaaucacgaaugaccaaauugaaguuacuaaugcuacugagcugguucagaguuccucaacaggugaaauaugcgacaguccucaucagauccuugauggagaaaacugcacacuaauagaugcucuauugggagacccucagugugauggcuuccaaaauaagaaaugggaccuuuuuguugaacgcagcaaagccuacagcaacuguuacccuuaugaugugccggauuaugccucccuuaggucacuaguugccucauccggcacacuggaguuuaacaaugaaagcuucaauuggacuggagucacucaaaacggaacaagcucugcuugcauaaggagaucuaauaacaguuucuuuaguagauugaauugguugacccacuuaaaauucaaauacccagcauugaacgugacuaugccaaacaaugaagaauuugacaaauuguacauuugggggguucaccacccgguuacggacaaugaccaaaucuuacuguaugcucaagcaucaggaagaaucacaguaucuaccaaaagaagccaacaaacuguaaucccgaauaucggauuuagacccagaguaaggaauaaccccagcagaauaagcaucuauuggacaauaguaaaaccgggagacauacuuuugauuaacagcacagggaaucuaauugcuccuagggguuacuucaaaauacgaagugggaaaagcucaauaaugagaucagaugcacccauuggcaaaugcaauucugaaugcaucacuccaaauggaagcauucccaaugacaaaccauuccaaaauguaaacaggaucacauacggggccugucccagauauguuaagcaaaacacucugaaauuggcaacagggaugcgaaauguaccagagaaacaaacuagaggcauauuuggcgcaaucgcggguuucauagaaaaugguugggagggaaugguggaugguugguacgguuucaggcaucaaaauucugagggaauaggacaagcagcagaucucaaaagcacucaagcagcaaucgaucaaaucaaugggaagcugaauagguugaucgggaaaaccaacgagaaauuccaucagauugaaaaagaauucucagaagucgaagggaggauucaggaccuugagaaauaugcugaggacaccaaaauagaucucuggucauacaacgcggagcuucuuguugcccuggagaaccaacauacaauugaucuaacugacucagaaaugaacaaacuguuugaaaaaacaaagaagcaacugagggaaaaugcugaggauaugggcaaugguuguuucaaaauauaccacaaaugugacaaugccugcauaggaucaaucagaaauggaacuuaugaccacgauguauacagagaugaagcauuaaacaaccgguuccagaucaagggcguugagcugaagucaggauacaaagauuggauccuauggauuuccuuugccauaucauguuuuuugcuuuguguugcuuuguugggguucaucaugugggccugccaaaaaggcaacauuaggugcaacauuugcauuuga

SEQ ID NO: 41149 - RNA, 1701 nt, Artificial Sequence
  derived and/or modified CDS sequence (wt) from hemagglutinin__InfluenzaA__AFM72455
augaagacuaucauugcuuugagcuacauucuaugucugguuuucgcucaaaaacuuccuggaaaugacaacagcacggcaacgcugugccuugggcaccaugcaguaccaaacggaacgauagugaaaacaaucacgaaugaccaaauugaaguuacuaaugcuacugagcugguucagaguuccucaacaggugaaauaugcgacaguccucaucagauccuugauggagaaaacugcacacuaauagaugcucuauugggagacccucagugugauggcuuccaaaauaagaaaugggaccuuuuuguugaacgcagcaaagccuacagcaacuguuacccuuaugaugugccggauuaugccucccuuaggucacuaguugccucauccggcacacuggaguuuaacaaugaaagcuucaauuggacuggagucacucaaaacggaacaagcucugcuugcauaaggagaucuaauaacaguuucuuuaguagauugaauugguugacccaauuaaaauucaaauacccagcauugaacgugacuaugccaaacaaugaagaauuugacaaauuguacauuugggggguucaccacccgguuacggacaaugaccaaaucuuccuguaugcucaagcaucaggaagaaucacagucucuaccaaaagaagccaacaaacuguaaucccgaauaucggauuuagacccagaguaaggaauaaccccagcagaauaagcaucuauuggacaauaguaaaaccgggagacauacuuuugauuaacagcacagggaaucuaauugcuccuagggguuacuucaaaauacgaagugggaaaagcucaauaaugagaucagaugcacccauuggcaaaugcaauucugaaugcaucacuccaaauggaagcauucccaaugacaaaccauuccaaaauguaaacaggaucacauacggggccugucccagauauguuaagcaaaacacucugaaauuggcaacagggaugcgaaauguaccagagaaacaaacuagaggcauauuuggcgcaaucgcggguuucauagaaaaugguugggagggaaugguggaugguugguacgguuucaggcaucaaaauucugagggaauaggacaagcagcagaucucaaaagcacucaagcagcaaucgaucaaaucaaugggaagcugaauagguugaucgggaaaaccaacgagaaauuccaucagauugaaaaagaauucucagaagucgaagggaggauucaggaccuugagaaauaugcugaggacaccaaaauagaucucuggucauacaacgcggagcuucuuguugcccuggagaaccaacauacaauugaucuaacugacucagaaaugaacaaacuguuugaaaaaacaaagaagcaacugagggaaaaugcugaggauaugggcaaugguuguuucaaaauauaccacaaaugugacaaugccugcauaggaucaaucagaaauggaacuuaugaccacgauguauacagagaugaagcauuaaacaaccgguuccagaucaagggcguugagcugaagucaggauacaaagauuggauccuauggauuuccuuugccauaucauguuuuuugcuuuguguugcuuuguugggguucaucaugugggccugccaaaaaggcaacauuaggugcaacauuugcauuuga

SEQ ID NO: 41150 - RNA, 1701 nt, Artificial Sequence
  derived and/or modified CDS sequence (wt) from hemagglutinin__InfluenzaA__AFM72466
augaagacuaucauugcuuugagcuacauucuaugucugguuuucgcucaaaaacuuccuggaaaugacaacagcacggcaacgcugugccuugggcaccaugcaguaccaaacggaacgauagugaaaacaaucacgaaugaccaaauugaaguuacuaaugcuacugagcugguucagaguuccucaacaggugaaauaugcgacaguccucaucagauccuugauggagaaaacugcacacuaauagaugcucuauugggagacccucagugugauggcuuccaaaauaagaaaugggaccuuuuuguugaacgcagcaaagccuacagcaacuguuacccuuaugaugugccggauuaugccucccuuaggucacuaguugccucauccggcacacuggaguuuaacaaugaaagcuucaauuggacuggagucacucaaaacggaacaagcucugcuugcauaaggagaucuaauaacaguuucuuuaguagauugaauugguugacccacuuaaaauucaaauacccagcauugaacgugacuaugccaaacaaugaagaauuugacaaauuguacauuugggggguucaccacccgguuacggacaaagaccaaaucuuccuguaugcucaagcaucaggaagaaucacagucucuaccaaaagaagccaacaaacuguaaucccgaauaucggauuuagacccagaguaaggaauaaccccagcagaauaagcaucuauuggacaauaguaaaaccgggagacauacuuuugauuaacagcacagggaaucuaauugcuccuagggguuacuucaaaauacgaagugggaaaagcucaauaaugagaucagaugcacccauuggcaaaugcaauucugaaugcaucacuccaaauggaagcauucccaaugacaaaccauuccaaaauguaaacaggaucacauacggggccugucccagauauguuaagcaaaacacucugaaauuggcaacagggaugcgaaauguaccagagaaacaaacuagaggcauauuuggcgcaaucgcggguuucauagaaaaugguugggagggaaugguggaugguugguacgguuucaggcaucaaaauucugagggaauaggacaagcagcagaucucaaaagcacucaagcagcaaucgaucaaaucaaugggaagcugaauagguugaucgggaaaaccaacgagaaauuccaucagauugaaaaagaauucucagaagucgaagggaggauucaggaccuugagaaauaugcugaggacaccaaaauagaucucuggucauacaacgcggagcuucuuguugcccuggagaaccaacauacaauugaucuaacugacucagaaaugaacaaacuguuugaaaaaacaaagaagcaacugagggaaaaugcugaggauaugggcaaugguuguuucaaaauauaccacaaaugugacaaugccugcauaggaucaaucagaaauggaacuuaugaccacgauguauacagagaugaagcauuaaacaaccgguuccagaucaagggcguugagcugaagucaggauacaaagauuggauccuauggauuuccuuugccauaucauguuuuuugcuuuguguugcuuuguugggguucaucaugugggccugccaaaaaggcaacauuaggugcaacauuugcauuuga

SEQ ID NO: 41151 - RNA, 1701 nt, Artificial Sequence
  derived and/or modified CDS sequence (wt) from hemagglutinin__InfluenzaA__AFM72488
augaagacuaucauugcuuugagcuacauucuaugucugguuuucgcucaaaaacuucccggaaaugacaacagcacggcaacgcugugccuugggcaccaugcaguaccaaacggaacgauagugaaaacaaucacgaaugaccaaauugaaguuacuaaugcuacugagcugguucagaguuccucaacagguggaauaugcgacaguccucaucagauccuugauggagaaaacugcacacuaauagaugcucuauugggagacccucagugugauggcuuccaaaauaagaaaugggaccuuuuuguugaacgcagcaaagccuacagcaacuguuacccuuaugaugugccggauuaugccucccuuaggucacuaguugccucauccggcacacuggaguuuaacaaugaaagcuucaauuggacuggagucacucaaaacggaacaagcucugcuugcaaaaggagaucuaauaacaguuucuuuaguagauugaauugguugacccaauuaaaauucaaauacccagcauugaacgugacuaugccaaacaaugaaaaauuugacaaauuguacauuugggggguucaccacccgguuacggacaaugaacaaaucuuccuguaugcucaagcaucaggaagaaucacagucucuaccaaaagaagucaacaaacuguaaucccgaauaucggauuuagacccagaguaaggaauauccccagcagaauaagcaucuauuggacaauaguaaaaccgggagacauacuuuugauuaacagcacagggaaucuaauugcuccuagggguuacuucaaaauacgaagugggaaaagcucaauaaugagaucagaugcacccauuggcaaaugcaauucuaaaugcaucacuccaaauggaagcauucccaaugacaaaccauuucaaaauguaaacaggaucacauacggggccugucccagauauguuaagcaaaacacucugaaauuggcaacagggaugcgaaauguaccagagaaacaaacuagaggcauauuuggcgcaaucgcggguuucauagaaaaugguugggagggaaugguggaugguugguacgguuucaggcaucaaaauucugagggaauaggacaagcagcagaucucaaaagcacucaagcagcaaucgaucaaaucaaugggaagcugaauagguugaucgggaaaaccaaugagaaauuccaucagauugaaaaagaauucucagaaguagaagggagaauucaggaccucgagaaauauguugaggacacuaaaauagaucucuggucauacaacgcggagcuucuuguugcccuggagaaccaacauacaauugauuuaacugacucagaaaugaacaaacuguuugaaaaaacaaagaagcaacugagggaaaaugcugaggauaugggcaaugguuguuucaaaauauaccacaaaugugacaaugccugcauaggaucaaucagaaauggaacuuaugaccaugauguauacagagaugaagcauuaaacaaccgguuccagaucaagggcguugagcugaagucaggauacaaagauuggauccuauggauuuccuuugccauaucauguuuuuugcuuuguguugcuuuguugggguucaucaugugggccugccaaaaaggcaacauuaggugcaacauuugcauuuga

SEQ ID NO: 41152 - RNA, 1701 nt, Artificial Sequence
  derived and/or modified CDS sequence (wt) from hemagglutinin__InfluenzaA__AFM72499
augaagacuaucauugcuuugagcuacauucuaugucugguuuucgcucaaaaacuucccggaaaugacaacagcacggcaacgcugugccuugggcaccaugcaguaccaaacggaacgauagugaaaacaaucacgaaugaccaaauugaaguuacuaaugcuacugagcugguucagaguuccucaacagguggaauaugcgacaguccucaucagauccuugauggagaaaacugcacacuaauagaugcucuauugggagacccucagugugauggcuuccaaaauaagaaaugggaccuuuuuguugaacgcagcaaagccuacagcaacuguuacccuuaugaugugccggauuaugccucccuuaggucacuaguugccucauccggcacacuggaguuuaacaaugaaagcuucaauuggacuggagucacucaaaacggaacaagcucugcuugcaaaaggagaucuaauaacaguuucuuuaguagauugaauugguugacccaauuaaaauucaaauacccagcauugaacgugacuaugccaaacaaugaaaaauuugacaaauuguacauuugggggguucaccacccgguuacggacaaugaccaaaucuuccuguaugcucaagcaucaggaagaaucacagucucuaccaaaagaagucaacaaacuguaaucccgaauaucggaucuagacccagaguaaggaauauccccagcagaauaagcaucuauuggacaauaguaaaaccgggagacauacuuuugauuaacagcacagggaaucuaauugcuccuagggguuacuucaaaauacgaagugggaaaagcucaauaaugagaucagaugcacccauuggcaaaugcaauucugaaugcaucacuccaaauggaagcauucccaaugacaaaccauuucaaaauguaaacaggaucacauacggggccugucccagauauguuaagcaaaacacucugaaauuggcaacagggaugcgaaauguaccagagaaacaaacuagaggcauauuuggcgcaaucgcggguuucauagaaaaugguugggagggaaugguggaugguugguacgguuucaggcaucaaaauucugagggaauaggacaagcagcagaucucaaaagcacucaagcagcaaucgaucaaaucaaugggaagcugaauagguugaucgggaaaaccaaugagaaauuccaucagauugaaaaagaauucucagaaguagaagggagaauucaggaccucgagaaauauguugaggacacuaaaauagaucucuggucauacaacgcggagcuucuuguugcccuggagaaccaacauacaauugauuuaacugacucagaaaugaacaaacuguuugaaaaaacaaagaagcaacugagggaaaaugcugaggauaugggcaaugguuguuucaaaauauaccacaaaugugacaaugccugcauaggaucaaucagaaauggaacuuaugaccaugauguauacagagaugaagcauuaaacaaccgguuccagaucaagggcguugagcugaagucaggauacaaagauuggauccuauggauuuccuuugccauaucauguuuuuugcuuuguguugcuuuguugggguucaucaugugggccugccaaaaaggcaacauuaggugcaacauuugcauuuga

SEQ ID NO: 41153 - RNA, 1698 nt, Artificial Sequence
  derived and/or modified CDS sequence (wt) from hemagglutinin__InfluenzaA__AFM72521
augaaaguaaaacuacugguccuguuaugcacauuuacagcuacauaugcagacacaauauguauaggcuaccaugcuaacaacucgaccgacacuguugacacaguacuugaaaagaaugugacagugacacacucugucaaccugcuugagaacagucacaauggaagacuaugucuauuaaaaggaauagccccacuacaauuggguaacugcagcguugccggguggaucuuaggaaacccagaaugcgaauuacugauuuccaaggagucaugguccuacauuguagaaaaaccaaauccugagaauggaacauguuacccagggcauuucgcugacuaugaggaacugagggagcaauugaguucaguaucuucacuugagagguucgaaauauuccccaaagaaagcucauggcccaaccacaccguaaccggagugucagcaucaugcucccauaauggggaaagcaguuuuuacagaaauuugcuauggcugacggggaagaaugguuuguacccaaaccugagcaaguccuaugcaaacaacaaagaaaaagaaguccuuguacuaugggguguucaucacccgccaaacauagguaaccaaaaggcccucuaucauacagaaaaugcuuauguuucuguagugucuucacauuauagcagaaaauucaccccagaaauagccaaaagacccaaaguaagagaucaagaaggaagaaucaacuacuacuggacucugcuugaacccggggauacaauaauauuugaggcaaauggaaaucuaauagcgccaagauaugcuuucgcacugaguagaggcuuuggaucaggaaucaucaacucaaaugcaccaauggauaaaugugaugcgaagugccaaacaccucagggagcuauaaacagcagucuuccuuuccagaacguacacccagucacaauaggagaguguccaaaguaugucaggagugcaaaauuaaggaugguuacaggacugaggaacaucccauccauucaauccagagguuuguuuggagccauugccgguuucauugaagggggguggacuggaaugguagaugguugguaugguuaucaucaucagaaugagcaaggaucuggcuaugcugcagaucaaaaaagcacacaaaaugccauuaaugggauuacaaacaaggugaauucuguaauugagaaaaugaacacucaauucacagcagugggcaaagaauucaacaaauuggaaagaaggauggaaaacuugaauaaaaaaguugaugauggguuuauagacauuuggacauauaaugcagaacuguugguucuacuggaaaaugaaaggacuuuggauuuccaugacuccaaugugaagaaucuguaugagaaaguaaaaagccaguuaaagaauaaugcuaaagaaauaggaaauggguguuuugaauucuaucacaaguguaacgaugaaugcauggagaguguaaagaauggaacuuaugacuauccaaaauauuccgaagaaucaaaguuaaacagggagaaaauugauggagugaaauuggaaucaaugggagucuaucagauucuggcgaucuacucaacagucgccaguucucugguucuuuuggucucccugggggcaaucagcuucuggauguguuccaaugggucuuugcaguguagaauaugcaucuaa

SEQ ID NO: 41154 - RNA, 1698 nt, Artificial Sequence
  derived and/or modified CDS sequence (wt) from hemagglutinin__InfluenzaA__AFM72532
augaaaguaaaacuacugguccuguuaugcacauuuacagcuacauaugcagacacaauauguauaggcuaccaugcuaacaacucgaccgacacuguugacacaguacuugaaaagaaugugacagugacacacucugucaaccugcuugagaacagucacaauggaagacuaugucuauuaaaaggaauagccccacuacaauuggguaacugcagcguugccggguggaucuuaggaaacccagaaugcgaauuacugauuuccaaggagucaugguccuacauuguagaaaaaccaaauccugagaauggaacauguuacccagggcauuucgcugacuaugaggaacugagggagcaauugaguucaguaucuucacuugagagguucgaaauauuccccaaagaaagcucauggcccaaccacaccguaaccggagugucagcaucaugcucccauaauggggaaagcaguuuuuacagaaauuugcuauggcugacggggaagaaugguuuguacccaaaccugagcaaguccuaugcaaacaacaaagaaaaagaaguccuuguacuaugggguguucaucacccgccaaacauagguaaccaaaaggcccucuaucauacagaaaaugcuuauguuucuguagugucuucacauuauagcagaaaauucaccccagaaauagccaaaagacccaaaguaagagaucaagaaggaagaaucaacuacuacuggacucugcuugaacccggggauacaauaauauuugaggcaaauggaaaucuaauagcgccaagauaugcuuucgcacugaguagaggcuuuggaucaggaaucaucaacucaaaugcaccaauggauaaaugugaugcgaagugccaaacaccucagggagcuauaaacagcagucuuccuuuccagaacguacacccagucacaauaggagaguguccaaaguaugucaggagugcaaaauuaaggaugguuacaggacuaaggaacaucccauccauucaauccagagguuuguuuggagccauugccgguuucauugaagggggguggacuggaaugguagaugguugguaugguuaucaucaucagaaugagcaaggaucuggcuaugcugcagaucaaaaaagcacacaaaaugccauuaaugggauuacaaacaaggugaauucuguaauugagaaaaugaacacucaauucacagcagugggcaaagaauucaacaaauuggaaagaaggauggaaaacuugaauaaaaaaguugaugauggguuuauagacauuuggacauauaaugcagaacuguugguucuacuggaaaaugaaaggacuuuggauuuccaugacuccaaugugaagaaucuguaugagaaaguaaaaagccaguuaaagaauaaugcuaaagaaauaggaaauggguguuuugaauucuaucacaaguguaacgaugaaugcauggagaguguaaagaauggaacuuaugacuauccaaaauauuccgaagaaucaaaguuaaacagggagaaaauugauggagugaaauuggaaucaaugggagucuaucagauucuggcgaucuacucaacagucgccaguucucugguucuuuuggucucccugggggcaaucagcuucuggauguguuccaaugggucuuugcaguguagaauaugcaucuaa

SEQ ID NO: 41155 - RNA, 1698 nt, Artificial Sequence; identical to SEQ ID NO: 41154
  derived and/or modified CDS sequence (wt) from hemagglutinin__InfluenzaA__AFM72543

SEQ ID NO: 41156 - RNA, 1698 nt, Artificial Sequence
  derived and/or modified CDS sequence (wt) from hemagglutinin__InfluenzaA__AFM72554
augaaaguaaaacuacugguccuguuaugcacauuuacagcuacauaugcagacacaauauguauaggcuaccaugcuaacaacucgaccgacacuguugacacaguacuugaaaagaaugugacagugacacacucugucaaccugcuugagaacagucacaauggaagacuaugucuauuaaaaggaauagccccacuacaauuggguaacugcagcguugccggguggaucuuaggaaacccagaaugcgaauuacugauuuccaaggagucaugguccuacauuguagaaaaaccaaauccugagaauggaacauguuacccagggcauuucgcugacuaugaggaacugagggagcaauugaguucaguaucuucacuugagagguucgaaauauuccccaaagaaagcucauggcccaaccacaccguaaccggagugucagcaucaugcucccauaauggggaaagcaguuuuuacagaaauuugcuauggcugacggggaagaaugguuuguacccaaaccugagcaaguccuaugcaaacaacaaagaaaaagaaguccuuguacuaugggguguucaucacccgccaaacauagguaaccaaaaggcccucuaucauacagaaaaugcuuauguuucuguagugucuucacauuauagcagaaaauucaccccagaaauagccaaaagacccaaaguaagagaucaagaaggaagaaucaacuacuacuggacucugcuugaacccggggauacaauaauauuugaggcaaauggaaaucuaauagcgccaagauaugcuuucgcacugaguagaggcuuuggaucaggaaucaucaacucaaaugcaccaauggauaaaugugaugcgaagugccaaacaccucagggagcuauaaacagcagucuuccuuuccagaacguacacccagucacaauaggagaguguccaaaguaugucaggagugcaaaauuaaggaugguuacaggacuaaggaacaucccauccauucaauccagagguuuguuuggagccauugccgguuucauugaagggggguggacuggaaugguagaugguugguaugguuaucaucaucagaaugagcaaggaucuggcuaugcugcagaucaaaaaagcacacaaaaugccauuaaugggauuacaaacaaggugaauucuguaauugagaaaaugaacacucaauucacagcagugggcaaagaauucaacaaauuggaaagaaggauggaaaacuugaauaaaaaaguugaugauggguuuauagacauuuggacauauaaugcagaacuguugguucuacuggaaaaugaaaggacuuuggauuuccaugacuccaaugugaagaaucuguaugagaaaguaaaaagccaguugaagaauaaugcuaaagaaauaggaaauggguguuuugaauucuaucacaaguguaacgaugaaugcauggagaguguaaagaauggaacuuaugacuauccaaaauauuccgaagaaucaaaguuaaacagggagaaaauugaugaagugaaauuggaaucaaugggagucuaucagauucuggcgaucuacucaacagucgccaguucucugguucuuuuggucucccugggggcaaucagcuucuggauguguuccaaugggucuuugcaguguagaauaugcaucuaa

SEQ ID NO: 41157 - RNA, 1701 nt, Artificial Sequence
  derived and/or modified CDS sequence (wt) from hemagglutinin__InfluenzaA__AFM72565
augaagacuaucauugcuuugagcuacauucuaugucugguuuucgcucaaaaacuuccuggaaaugacaacagcacggcaacgcugugccuugggcaccaugcaguaccaaacggaacgauagugaaaacaaucacgaaugaccaaauugaaguuacuaaugcuacugagcugguucagaguuccucaacaggugaaauaugcgacaguccucaucagauccuugauggagaaaacugcacacuaauagaugcucuauugggagacccucagugugauggcuuccaaaauaagaaaugggaccuuuuuguugaacgcagcaaagccuacagcaacuguuacccuuaugaugugccggauuaugccucccuuaggucacuaguugccucauccggcacacuggaguuuaacaaugaaagcuucaauuggacuggagucacucaaaacggaacaagcucuucuugcauaaggagaucuaauaacaguuucuuuaguagauugaauugguugacccacuuaaaauucaaauacccagcauugaacgugacuaugccaaacaaugaaaaauuugacaaauuguacauuugggggguucaccacccggguacggacaaugaccaaaucuucccguaugcucaagcaucaggaagaaucacagucucuaccaaaagaagccaacaaacuguaaucccgaauaucggaucuagacccagaguaaggaauauccccagcagaauaagcaucuauuggacaauaguaaaaccgggagacauacuuuugauuaacagcacagggaaucuaauugcuccuagggguuacuucaaaauacgaagugggaaaagcucaauaaugagaucagaugcacccauuggcaaaugcaauucugaaugcaucacuccaaaugggagcauucccaaugacaaaccauuccaaaauguaaacaggaucacauacggggccugucccagauauguuaagcaaaacacucugaaauuggcaacagggaugcgaaauguaccagagaaacaaacuagaggcauauuuggcgcaaucgcggguuucauagaaaaugguugggagggaaugguggaugguugguacgguuucaggcaucaaaauucugagggaauaggacaagcagcagaucucaaaagcacucaagcagcaaucgaucaaaucaaugggaagcugaauagguugaucgggaaaaccaacgagaaauuccaucagauugaaaaggaauucucagaagucgaagggaggauucaggaccuugagaaauauguugaggacaccaaaauagaucucuggucauacaacgcggagcuucuuguugcccuggagaaccaacauacaauugaucuaacugacucagaaaugaacaaacuguuugaaaaaacaaagaagcaacugagggaaaaugcugaggauaugggcaaugguuguuucaaaauauaccacaaaugugacaaugccugcauaggaucaaucagaaauggaacuuaugaccacgauguauacagagaugaagcauuaaacaaccgguuccagaucaagggcguugagcugaagucaggauacaaagauuggauccuauggauuuccuuugccauaucauguuuuuugcuuuguguugcuuuguugggguucaucaugugggccugccaaaaaggcaacauuaggugcaacauuugcauuuga

SEQ ID NO: 41158 - RNA, 1701 nt, Artificial Sequence
  derived and/or modified CDS sequence (wt) from hemagglutinin__InfluenzaA__AFM72576
augaagacuaucauugcuuugagcuacauucuaugucugguuuucgcucaaaaacuuccuggaaaugacaacagcacggcaacgcugugccuugggcaccaugcaguaccaaacggaacgauagugaaaacaaucacgaaugaccaaauugaaguuacuaaugcuacugagcugguucagaguuccucaacaggugaaauaugcgacaguccucaucagauccuugauggagaaaacugcacacuaauagaugcucuauugggagacccucagugugauggcuuccaaaauaagaaaugggaccuuuuuguugaacgcagcaaagccuacagcaacuguuacccuuaugaugugccggauuaugccucccuuaggucacuaguugccucauccggcacacuggaguuuaacaaugaaagcuucaauuggacuggagucacucaaaacggaacaagcucuucuugcauaaggggaucuaauaacaguuucuuuaguagauugaauugguugacccacuuaaaauucaaauacccagcauugaacgugacuaugccaaacaaugaaaaauuugacaaauuguacauuugggggguucaccacccggguacggacaaugaccaaaucuucccguaugcucaagcaucaggaagaaucacagucucuaccaaaagaagccaacaaaccguaaucccgaauaucggaucuagacccagaguaaggaauauccccagcagaauaagcaucuauuggacaauaguaaaaccgggagacauacuuuugauuaacagcacagggaaucuaauugcuccuagggguuacuucaaaauacgaagugggaaaagcucaauaaugagaucagaugcacccauuggcaaaugcaauucugaaugcaucacuccaaaugggagcauucccaaugacaaaccauuccaaaauguaaacaggaucacauacggggccugucccagauauguuaagcaaaacacucugaaauuggcaacagggaugcgaaauguaccagagaaacaaacuagaggcauauuuggcgcaaucgcggguuucauagaaaaugguugggagggaaugguggaugguugguacgguuucaggcaucaaaauucugagggaauaggacaagcagcagaucucaaaagcacucaagcagcaaucgaucaaaucaaugggaagcugaauagguugaucgggaaaaccaacgagaaauuccaucagauugaaaaggaauucucagaagucgaagggaggauucaggaccuugagaaauauguugaggacaccaaaauagaucucuggucauacaacgcggagcuucuuguugcccuggagaaccaacauacaauugaucuaacugacucagaaaugaacaaacuguuugaaaaaacaaagaagcaacugagggaaaaugcugaggauaugggcaaugguuguuucaaaauauaccacaaaugugacaaugccugcauaggaucaaucagaaauggaacuuaugaccacgauguauacagagaugaagcauuaaacaaccgguuccagaucaagggcguugagcugaagucaggauacaaagauuggauccuauggauuuccuuugccauaucauguuuuuugcuuuguguugcuuuguugggguucaucaugugggccugccaaaaaggcaacauuaggugcaacauuugcauuuga

SEQ ID NO: 41159 - RNA, 1698 nt, Artificial Sequence
  derived and/or modified CDS sequence (wt) from hemagglutinin__InfluenzaA__AFM72799
augaaaguaaaacuacugguccuauuaugcacauuuacagcuacauaugcggacacaauauguaucggcuaccaugccaacaacucaaccgacacuguugacacaguacuugaaaagaaugugacagugacacacucugucaaccugcuugaggacaaccacaauggaaaacuaugucuauuaaaaggaaaagccccauuacaauuggguaacugcagcguugccggguggaucuuaggaaacccagaaugcggauuacugauuuccaaggagucaugguccuacauuguagaaagaccaaauccugagaauggaacauguuacccagggcauuucgccgacuaugaggaacugagggagcaauugaguucaguaucuucauuugagagguucgaaauauuccccaaagaaagcucauggcccaaccacaccguaaccggaguaucagcaucaugcucccauaacggggaaagcagcuuuuacaaaaauuugcuauggcugacgggaaagaaugguuuguacccaaaccugagcaaguccuaugcaaacaacaaagagaaagaaguccucguacuaugggguguucaucacccgccaaacauagguaaccaaaugacccucuaucauaaagaaaaugcuuaugucucuguagugucuucacauuauagcagaaaauucaccccagaaauagccaaaagacccaaaguaagagaucaagaaggaagaaucaauuacuacuggacucugcuugaacccggggauacaauaauauuugaggcaaaugggaaucuaauagcgccaagauaugcuuucgcacugaguagaggcuuuggaucaggaaucaucaacucaaaugcaccaauggaugaaugugaugcgaagugccaaacaccucagggagcuauaaacagcagucuuccuuuccagaauguacacccagucacaauaggagaauguccaaaguaugucaggagugcaaaauuaaggaugguuacaggacuaaggaacaucccauccauucaauccagagguuuguuuggagccauugccgguuucauugaagggggguggacuggaaugguagaugguugguaugguuaucaucaccagaaugagcaaggaucuggcuaugcugcagaucaaaaaagcacacaaaaugccauuaaugggauuacaaacaaggugaacucuguaauugagaagaugaacacucaauucacagcuguaggcaaagaauucaacaaauuggaaagaaggauggaaaacuuaaauaaaaaaguugaugacggguuuauagacguuuggacauauaaugcagaacuguugguucuacuggaaaaugaaaggacuuuggauuuccaugacuccaaugugaagaauuuguaugagaaaguaaaaaaccaauuaaaaaauaaugccaaagaaauaggaaauggguguuuugaauuuuaucacaaguguaacgaugaaugcauggagaguguaaaaaauggaacuuaugauuauccaaaauauuccgaagaaucaaaguuaagcagggagaaaauugauggagugaaauuggaaucaaugggagucuaucagauucuggcgaucuacucaacagucgccaguucucugguucuuuuggucucccugggggcaaucagcuucuggauguguuccaaugggucuuugcaguguagaauaugcaucuaa

SEQ ID NO: 41160 - RNA, 1698 nt, Artificial Sequence; identical to SEQ ID NO: 41159
  derived and/or modified CDS sequence (wt) from hemagglutinin__InfluenzaA__AFM72810

SEQ ID NO: 41161 - RNA, 1698 nt, Artificial Sequence; identical to SEQ ID NO: 41159
  derived and/or modified CDS sequence (wt) from hemagglutinin__InfluenzaA__AFM72821

SEQ ID NO: 41162 - RNA, 1701 nt, Artificial Sequence
  derived and/or modified CDS sequence (wt) from hemagglutinin__InfluenzaA__AFM72852
augaaggcaauacuaguaguucugcuauauacauuugcaaccgcaaaugcagacacauuauguauagguuaucaugcgaacaauucaacagacacuguagacacaguacuagaaaagaauguaacaguaacacacucuguuaaccuucuagaagacaagcauaacgggaaacuaugcaaacuaagagggguagccccauugcauuuggguaaauguaacauugcuggcuggauccugggaaauccagagugugaaucacucuccacagcaagcucaugguccuacauuguggaaacaccuaguucagacaauggaacguguuacccaggagauuucaucgauuaugaggagcuaagagagcaauugagcucagugucaucauuugaaagguuugagauauuccccaagacaaguucauggcccaaucaugacucggacaaagguguaacggcagcauguccucaugcuggagcaaaaagcuucuacaaaaauuuaauauggcuaguuaaaaaaggaaauucauacccaaagcucagcaaauccuacauuaaugauaaagggaaagaaguccucgugcuauggggcauucaccauccaucuacuagugcugaccaacaaagucucuaucagaaugcagaugcauauguuuuuguggggucaucaagauacagcaagacguucaagccggaaauagcaauaagacccaaagugagggaucgagaagggagaaugaacuauuacuggacacuaguagagccgggagacaaaauaacauucgaagcaacuggaaaucuagugguaccgagauaugcauucgcaauggaaagaaaugcuggaucugguauuaucauuucagauacaccaguccacgauugcaauacaacuugucaaacacccaagggugcuauaaacaccagccucccauuucagaauauacauccgaucacaauuggaaaauguccaaaauauguaaaaagcacaaaauugagacuggccacaggauugaggaauaucccgucuauucaaucuagaggccuauuuggggccauugccgguuucauugaagggggguggacagggaugguagauggaugguacgguuaucaccaucaaaaugagcaggggucaggauaugcagccgaccugaagagcacacagaaugccauugacgagauuacuaacaaaguaaauucuguuauugaaaagaugaauacacaguucacagcaguagguaaagaguucaaccaccuggaaaaaagaauagagaauuuaaauaaaaaaguugaugaugguuuccuggacauuuggacuuacaaugccgaacuguugguucuauuggaaaaugaaagaacuuuggacuaccacgauucaaaugugaagaacuuauaugaaaagguaagaagccagcuaaaaaacaaugccaaggaaauuggaaacggcugcuuugaauuuuaccacaaaugcgauaacacgugcauggaaagugucaaaaaugggacuuaugacuacccaaaauacucagaggaagcaaaauuaaacagagaagaaauagaugggguaaagcuggaaucaacaaggauuuaccagauuuuggcgaucuauucaacugucgccaguucauugguacugguagucucccugggggcaaucaguuucuggaugugcucuaaugggucucuacaguguagaauauguauuuaa

SEQ ID NO: 41163 - RNA, 1701 nt, Artificial Sequence
  derived and/or modified CDS sequence (wt) from hemagglutinin__InfluenzaA__AFM72862
augaaggcaauacuaguaguucugcuauauacauuugcaaccgcaaaugcagacacauuauguauagguuaucaugcgaacaauucaacagacacuguagacacaguacuagaaaagaauguaacaguaacacacucuguuaaccuucuagaagacaagcauaacgggaaacuaugcaaacuaagagggguagccccauugcauuuggguaaauguaacauugcuggcuggauccugggaaauccagagugugaaucacucuccacagcaagcucaugguccuacauuguggaaacaccuaguucagacaauggaacguguuacccaggagauuucaucgauuaugaggagcuaagagagcaauugagcucagugucaucauuugaaagguuugagauauuccccaagacaaguucauggcccaaucaugacucgaacaaagguguaacggcagcauguccucaugcuggagcaaaaagcuucuacaaaaauuuaauauggcuaguuaaaaaaggaaauucauacccaaagcucagcaacuccuacauuaaugauaaagggaaagaaguccucgugcuauggggcauucaccauccaucuacuagugcugaccaacaaagucucuaucagaaugcagaugcauauguuuuuguggggucaucaagauacagcaagacguucaagccggaaauagcaauaagacccaaagugagggaucgagaagggagaaugaacuauuacuggacacuaguagagccgggagacaaaauaacauucgaagcaacuggaaaucuagugguaccgagauaugcauucgcaauggaaagaaaugcuggaucugguauuaucauuucagauacaccaguccacgauugcaauacaacuugucaaacacccaagggugcuauaaacaccagccucccauuucagaauauacauccgaucacaauuggaaaauguccaaaauauguaaaaagcacaaaauugagacuggccacaggauugaggaauaucccgucuauucaaucuagaggccuauuuggggccauugccgguuucauugaagggggguggacagggaugguagauggaugguacgguuaucaccaucaaaaugagcaggggucaggauaugcagccgaccugaagagcacacagaaugccauugacgagauuacuaacaaaguaaauucuguuauugaaaagaugaauacacaguucacagcaguagguaaagaguucaaccaccuggaaaaaagaauagagaauuuaaauaaaaaaguugaugaugguuuccuggacauuuggacuuacaaugccgaacuguugguucuauuggaaaaugaaagaacuuuggacuaccacgauucaaaugugaagaacuuauaugaaaagguaagaagccagcuaaaaaacaaugccaaggaaauuggaaacggcugcuuugaauuuuaccacaaaugcgauaacacgugcauggaaagugucaaaaaugggacuuaugacuacccaaaauacucagaggaagcaaaauuaaacagagaagaaauagaugggguaaagcuggaaucaacaaggauuuaccagauuuuggcgaucuauucaacugucgccaguucauugguacugguagucucccugggggcaaucaguuucuggaugugcucuaaugggucucuacaguguagaauauguauuuaa

SEQ ID NO: 41164 - RNA, 1701 nt, Artificial Sequence
  derived and/or modified CDS sequence (wt) from hemagglutinin__InfluenzaA__AFM72872
augaagacuaucauugcuuugagcuacacucuaugucugguuuucgcucaaaaacuuccuggaaaugacaacagcacggcaacgcugugccuugggcaccaugcaguaccaaacggaacgauagugaaaacaaucacgaaugaccaaauugaaguuacuaaugcuacugagcugguucagaguuccucaacaggugaaauaugcgacaguccucaucagauccuugauggaaaaaacugcacacuaauagaugcucuauugggagacccucagugugauggcuuccaaaauaagaaaugggaccuuuuuguugaacgcagcaaagccuacagcaacuguuacccuuaugaugugccggauuaugccucccuuaggucacuaguugccucauccggcacacuggaguuuaacaaugaaagcuucaauuggacuggagucacucaaaacggaacaagcucugcuugcauaaggagaucuaaaaacaguuucuuuaguagauugaauugguugacccacuuaaacuucaaauacccagcauugaacgugacuaugccaaacaaugaacaauuugacaaauuguacauuugggggguucaccacccggguacggacaaagaccaaaucuucccguaugcucaagcaucaggaagaaucacagucucuaccaaaagaagccaacaaacugcaaucccgaauaucggaucuagacccagaguaaggaauaucccuagcagaauaagcaucuauuggacaauaguaaaaccgggagacauacuuuugauuaacagcacagggaaucuaauugcuccuagggguuacuucaaaauacgaagugggaaaagcucaauaaugagaucagaugcacccauuggcaaaugcaauucugaaugcaucacuccaaauggaagcauucccaaugacaaaccauuccaaaauguaaacaggaucacauacggggccugucccagauauguuaagcaaaacacucugaaauuggcaacagggaugcgaaauguaccagagaaacaaacuagaggcauauuuggcgcaaucgcggguuucauagaaaaugguugggagggaaugguggaugguugguacgguuucaggcaucaaaauucugagggaagaggacaagcagcagaucucaaaagcacucaagcagcaaucgaucaaaucaaugggaagcugaauagauugaucgggaaaaccaacgagaaauuccaucagauugaaaaggaauucucagaagucgaagggagaauucaggaccuugagaaauauguugaggacacuaaaauagaucucuggucauacaacgcggagcuucuuguugcccuggagaaccaacauacaauugaucuaacugacucagaaaugaacaaacuguuugaaaaaacaaagaagcaacugagggaaaaugcugaggauaugggcaaugguuguuucaaaauauaccacaaaugugacaaugccugcauaggaucaaucagaaauggaacuuaugaccacgauguauacagagaugaagcacuaaacaaccgguuucagaucaagggaguugagcugaagucaggguacaaagauuggauccuauggauuuccuuugccauaucauguuuuuugcuuuguguugcuuuguugggguucaucaugugggccugccaaaaaggcaacauuaggugcaacauuugcauuuga

SEQ ID NO: 41165 - RNA, 1701 nt, Artificial Sequence
  derived and/or modified CDS sequence (wt) from hemagglutinin__InfluenzaA__AFM72883
augaagacuaucauugcuuugagcuacauucuaugucugguuuucgcucaaaaacuuccuggaaaugacaacagcacggcaacgcugugccuugggcaccaugcaguaccaaacggaacgauagugaaaacaaucacgaaugaccaaauugaaguuacuaaugcuacugagcugguucagaauuccucaacaggugaaauaugcgacaguccucaucagauccuugauggaaaaaacugcacacuaauagaugcucuauugggagacccucagugugauggcuuccaaaauaagaaaugggaccuuuuuguugaacgcagcaaagccuacagcaacuguuacccuuaugaugugccggauuaugccucccuuaggucacuaguugccucauccggcacacuggaguuuaacaaugaaagcuucaauuggacuggagucacucaaaacggaacaagcucugcuugcauaaggagaucuaaaaacaguuucuuuaguagauugaauugguugacucacuuaaacuucaaauacccagcauugaacgugacuaugccgaacaaugaacaauuugacaaauuguacauuugggggguucaccacccgguuacggacaaagaccaaaucuuccuguaugcucaagcaucaggaagaaucacagucucuaccaaaagaagccaacaaacuguaaucccgaauaucggaucuagaccccgaguaaggaauaucccuaccagaauaagcaucuauuggacaauaguaaaaccgggagacauacuuuugauuaacagcacagggaaucuaauugcuccuagggguuacuucaaaaugcaaagugggaaaagcucaauaaugagaucagaugcacccauuggcaaaugcaauucugaaugcaucacuccaaauggaagcauucccaaugacaaaccauuccaaaauguaaacaggaucacauacggggccugucccagauauguuaagcaaaacacucugaaauuggcaacagggaugcgaaauguaccagagaaacaaacuagaggcauauuuggcgcaaucgcggguuucauagaaaaugguugggagggaaugguggaugguugguacgguuucaggcaucaaaauucugagggaagaggacaagcagcagaucucaaaagcacucaagcagcaaucgaucaaaucaaugggaagcugaauagauugaucgggaaaaccaacgagaaauuccaucagauugaaaaagaauucucagaagucgaagggagaauucaggaccuugagaaauauguugaggacacuaaaauagaucucuggucauacaacgcggagcuucuuguugcccuggagaaccaacauacaauugaucuaacugacucagaaaugaacaaacuguuugaaaaaacaaagaagcaacugagggaaaaugcugaggauaugggcaaugguuguuucaaaauauaccacaaaugugacaaugccugcauaggaucaaucagaaauggaacuuaugaccacaauguauacagagaugaagcauuaaacaaccgguuucagaucaagggaguugagcugaagucaggguacaaagauuggauccuauggauuuccuuugccauaucauguuuuuugcuuuguguugcuuuguugggguucaucaugugggccugccaaaaaggcaacauuaggugcaacauuugcauuuga

SEQ ID NO: 41166 - RNA, 1701 nt, Artificial Sequence
  derived and/or modified CDS sequence (wt) from hemagglutinin__InfluenzaA__AFM72894
augaagacuaucauugcuuugagcuacauucuaugucugguuuucgcucaaaaacuuccuggaaaugacaacagcacggcaacgcugugccuugggcaccaugcaguaccaaacggaacgauagugaaaacaaucacgaaugaccaaauugaaguuacuaaugcuacugagcugguucagaauuccucaacaggugaaauaugcgacaguccucaucagauccuugauggaaaaaacugcacacuaauagaugcucuauugggagacccucagugugauggcuuccaaaauaagaaaugggaccuuuuuguugaacgcagcaaagccuacagcaacuguuacccuuaugaugugccggauuaugccucccuuaggucacuaguugccucauccggcacacuggaguuuaacaaugaaagcuucaauuggacuggagucacucaaaacggaacaagcucugcuugcauaaggagaucuaaaaacaguuucuuuaguagauugaauugguugacucaauuaaacuucaaauacccagcauugaacgugacuaugccgaacaaugaacaauuugacaaauuguacauuugggggguucaccacccgguuacggacaaagaccaaaucuuccuguaugcucaagcaucaggaagaaucacagucucuaccaaaagaagccaacaaacuguaaucccgaauaucggaucuagaccccgaguaaggaauaucccuagcagaauaagcaucuauuggacaauaguaaaaccgggagacauacuuuugauuaacagcacagggaaucuaauugcuccuagggguuacuucaaaaugcaaagugggaaaagcucaauaaugagaucagaugcacccauuggcaaaugcaauucugaaugcaucacuccaaauggaagcauucccaaugacaaaccauuccaaaauguaaacaggaucacauacggggccugucccagauauguuaagcaaaacacucugaaauuggcaacagggaugcgaaauguaccagagaaacaaacuagaggcauauuuggcgcaaucgcggguuucauagaaaaugguugggagggaaugguggaugguugguacgguuucaggcaucaaaauucugagggaagaggacaagcagcagaucucaaaagcacucaagcagcaaucgaucaaaucaaugggaagcugaauagauugaucgggaaaaccaacgagaaauuccaucagauugaaaaagaauucucagaagucgaagggagaauucaggaccuugagaaauauguugaggacacuaaaauagaucucuggucauacaacgcggagcuucuuguugcccuggagaaccaacauacaauugaucuaacugacucagaaaugaacaaacuguuugaaaaaacaaagaagcaacugagggaaaaugcugaggauaugggcaaugguuguuucaaaauauaccacaaaugugacaaugccugcauaggaucaaucagaaauggaacuuaugaccacaauguauacagagaugaagcauuaaacaaccgguuucagaucaagggaguugagcugaagucaggguacaaagauuggauccuauggauuuccuuugccauaucauguuuuuugcuuuguguugcuuuguugggguucaucaugugggccugccaaaaaggcaacauuaggugcaacauuugcauuuga

SEQ ID NO: 41167 - RNA, 1701 nt, Artificial Sequence
  derived and/or modified CDS sequence (wt) from hemagglutinin__InfluenzaA__AFM72916
augaagacuaucauugcuuugagcuacauucuaugucugguuuucgcucaaaaaauuccuggaaaugacaacagcacggcaacgcugugccuugggcaccaugcaguaccaaacggaacgauagugaaaacaaucacgaaugaccaaauugaaguuacuaaugcuacugagcugguucagaguuccucaacaggugaaauaugcgacaguccucaucagauccuugauggaaaaaacugcacacuaauagaugcucuauugggagacccucagugugauggcuuccaaaauaagaaaugggaccuuuuuguugaacgcagcaaagccuacagcaacuguuacccuuaugaugugccggauuaugccucccuuaggucacuaguugccucauccggcacacuggaguuuaacaaugaaagcuucaauuggacuggagucacucaaaacggaacaagcucugcuugcauaaggagaucuaaaaacaguuucuuuaguagauugaauugguugacccacuuaaacuucaaauacccagcauugaacgugacuaugccaaacaaugaacaauuugacaaauuguacauuugggggguucaccacccggguacggacaaagaccaaaucuucccguaugcucaagcaucaggaagaaucacagucucuaccaaaagaagccaacaaacugcaaucccgaauaucggaucuagacccagaguaaggaauaucccuagcagaauaagcaucuauuggacaauaguaaaaccgggagacauacuuuugauuaacagcacagggaaucuaauugcuccuagggguuacuucaaaauacgaagugggaaaagcucaauaaugagaucagaugcacccauuggcaaaugcaauucuggaugcaucacuccaaauggaagcauucccaaugacaaaccauuccaaaauguaaacaggaucacauacggggccugucccagauauguuaagcaaaacacucugaaauuggcaacagggaugcgaaauguaccagagaaacaaacuagaggcauauuuggcgcaaucgcggguuucauagaaaaugguugggagggaaugguggaugguugguacgguuucaggcaucaaaauucugagggaagaggacaagcagcagaucucaaaagcacucaagcagcaaucgaucaaaucaaugggaagcugaauagauugaucgggaaaaccaacgagaaauuccaucagauugaaaaagaauucucagaagucgaagggagaauucaggaccuugagaaauauguugaggacacuaaaauagaucucuggucauacaacgcggagcuucuuguugcccuggagaaccaacauacaauugaucuaacugacucagaaaugaacaaacuguuugaaaaaacaaagaagcaacugagggaaaaugcugaggauaugggcaaugguuguuucaaaauauaccacaaaugugacaaugccugcauaggaucaaucagaaauggaacuuaugaccacgauguauacagagaugaagcacuaaacaaccgguuucagaucaagggaguugagcugaagucaggguacaaagauugguuccuauggauuuccuuugccauaucauguuuuuugcuuuguguugcuuuguugggguucaucaugugggccugccaaaaaggcaacauuaggugcaacauuugcauuuga

SEQ ID NO: 41168 - RNA, 1701 nt, Artificial Sequence
  derived and/or modified CDS sequence (wt) from hemagglutinin__InfluenzaA__AFM72927
augaagacuaucauugcuuugagcuacauucuaugucugguuuucgcucaaaaacuuccuggaaaugacaacagcacggcaacgcugugccuugggcaccaugcaguaccaaacggaacgauagugaaaacaaucacgaaugaccaaauugaaguuacuaaugcuacugagcugguucagaguuccucaacaggugaaauaugcgacaguccucaucagauccuugauggagaaaacugcacacuaauagaugcucuauugggagacccucagugugauggcuuccaaaauaagaaaugggaccuuuuuguugaacgcagcaaagccuacagcaacuguuacccuuaugaugugccggauuaugccucccuuaggucacuaguugccucauccggcacacuggaguuuaacaaugaaagcuucaauuggacuggagucacucaaaacggaacaagcucugcuugcauaaggagaucuaauaacaguuucuuuaguagauugaauugguugacccacuuaaaauucaaauacccagcauuaaaugugacuaugccaaacaaugaacaauuugacaaauuguacauuugggggguucaccacccggguacggacaaugaccaaaccucccuguaugcucaagcaucaggaagaaucacagucucuaccaaaagaagccaacaaacuguaaucccgaauaucggaucuagacccagaguaaggaauaucccuagcagaauaagcaucuauuggacaauaguaaaaccgggagacauacuuuugauuaacagcauagggaaucuaauugcuccuagggguuacuucaaaauacgaagugggaaaagcucaauaaugagaucagaugcacccauuggcaaaugcaauucugaaugcaucacuccaaauggaagcauucccaaugacaaaccauuccaaaauguaaacaggaucacauacggggccugucccagauauguuaagcaaaacacucugaaauuggcaacagggaugcgaaauguaccagagaaacaaacuagaggcauauuuggcgcaaucgcggguuucauagaaaaugguugggagggaaugguggaugguugguacgguuucaggcaucaaaauucugagggaagaggacaagcagcagaucucaaaagcacucaagcagcaaucgaucaaaucaaugggaagcugaauagauugaucgggaaaaccaacgagaaauuccaucagauugaaaaagaauucucagaagucgaagggagaauucaggaccuugagaaauauguugaggacaccaaaauagaucucuggucauacaacgcggagcuucuuguugcccuggagaaccaacauacaauugaucuaacugacucagaaaugaacaaacuguuugaaaaaacaaagaagcaacugagggaaaaugcugaggauaugggcaaugguuguuucaaaauauaccacaaaugugacaaugccugcauaggaucaaucagaaauggaacuuaugaccacaauguauacagagaugaagcauuaaacaaccgguuccagaucaagggaguugagcugaagucaggguacaaagauuggauccuauggauuuccuuugccauaucauguuuuuugcuuuguguugcuuuguugggguucaucaugugggccugccaaaaaggcaacauuaggugcaacauuugcauuuga

SEQ ID NO: 41169 - RNA, 1701 nt, Artificial Sequence
  derived and/or modified CDS sequence (wt) from hemagglutinin__InfluenzaA__AFM72938
augaagacuaucauugcuuugagcuacauucuaugucugguuuucgcucaaaaacuuccuggaaaugacaacagcacggcaacgcugugccuugggcaccaugcaguaccaaacggaacgauagugaaaacaaucacgaaugaccaaauugaaguuacuaaugcuacugagcugguucagaguuccucaacaggugaaauaugcgacaguccucaucagauccuugauggagaaaacugcacacuaauagaugcucuauugggagacccucagugugauggcuuccaaaauaagaaaugggaccuuuuuguugaacgcagcaaagccuacagcaacuguuacccuuaugaugugccggauuaugccucccuuaggucacuaguugccucauccggcacacuggaguuuaacaaugaaagcuucaauuggacuggagucacucaaaacggaacaagcucugcuugcauaaggagaucuaauaacaguuucuuuaguagauugaauugguugacccacuuaaaauucaaauacccagcauuaaaugugacuaugccaaacaaugaacaauuugacaaauuguacauuugggggguucaccacccggguacggacaaugaccaaaccucccuguaugcucaagcaucaggaagaaucacagucucuaccaaaagaagccaacaaacuguaaucccgaauaucggaucuagacccagaguaaggaauaacccuagcagaauaagcaucuauuggacaauaguaaaaccgggagacauacuuuugauuaacagcauagggaaucuaauugcuccuagggguuacuucaaaauacgaagugggaaaagcucaauaaugagaucagaugcacccauuggcaaaugcaauucugaaugcaucacuccaaauggaagcauucccaaugacaaaccauuccaaaauguaaacaggaucacauacggggccugucccagauauguuaagcaaaacacucugaaauuggcaacagggaugcgaaauguaccagagaaacaaacuagaggcauauuuggcgcaaucgcggguuucauagaaaaugguugggagggaaugguggaugguugguacgguuucaggcaucaaaauucugagggaagaggacaagcagcagaucucaaaagcacucaagcagcaaucgaucaaaucaaugggaagcugaauagauugaucgggaaaaccaacgagaaauuccaucagauugaaaaagaauucucagaagucgaagggagaauucaggaccuugagaaauauguugaggacaccaaaauagaucucuggucauacaacgcggagcuucuuguugcccuggagaaccaacauacaauugaucuaacugacucagaaaugaacaaacuguuugaaaaaacaaagaagcaacugagggaaaaugcugaggauaugggcaaugguuguuucaaaauauaccacaaaugugacaaugccugcauaggaucaaucagaaauggaacuuaugaccacaauguauacagagaugaagcauuaaacaaccgguuccagaucaagggaguugagcugaagucaggguacaaagauuggauccuauggauuuccuuugccauaucauguuuuuugcuuuguguugcuuuguugggguucaucaugugggccugccaaaaaggcaacauuaggugcaacauuugcauuuga

SEQ ID NO: 41170 - RNA, 1701 nt, Artificial Sequence
  derived and/or modified CDS sequence (wt) from hemagglutinin__InfluenzaA__AFM72949
augaagacuaucauugcuuugagcuacauucuaugucugguuuucgcucaaaaacuuccuggaaaugacaacagcacggcaacgcugugccuugggcaccaugcaguaccaaacggaacgauagugaaaacaaucacgaaugaccaaauugaaguuacuaaugcuacugagcugguucagaguuccucaacaggugaaauaugcgacaguccucaucagauccuugauggagaaaacugcacacuaauagaugcucuauugggagacccucagugugauggcuuccaaaauaagaaaugggaccuuuuuguugaacgcagcaaagccuacagcaacuguuacccuuaugaugugccggauuaugccucccuuaggucacuaguugccucauccggcacacuggaguuuaacaaugaaagcuucaauuggacuggagucacucaaaacggaacaagcucugcuugcauaaggagaucuaauaacaguuucuuuaguagauugaauugguugacccaauuaaaauucaaauacccagcauuaaaugugacuaugccaaacaaugaacaauuugacaaauuguacauuugggggguucaccacccggguacggacaaugaccaaaccucccuguaugcucaagcaucaggaagaaucacagucucuaccaaaagaagccaacaaacuguaaucccgaauaucggaucuagacccagaguaaggaauaacccuagcagaauaagcaucuauuggacaauaguaaaaccgggagacauacuuuugauuaacagcauagggaaucuaauugcuccuagggguuacuucaaaauacgaagugggaaaagcucaauaaugagaucagaugcacccauuggcaaaugcaauucugaaugcaucacuccaaauggaagcauucccaaugacaaaccauuccaaaauguaaacaggaucacauacggggccugucccagauauguuaagcaaaacacucugaaauuggcaacagggaugcgaaauguaccagagaaacaaacuagaggcauauuuggcgcaaucgcggguuucauagaaaaugguugggagggaaugguggaugguugguacgguuucaggcaucaaaauucugagggaagaggacaagcagcagaucucaaaagcacucaagcagcaaucgaucaaaucaaugggaagcugaauagauugaucgggaaaaccaacgagaaauuccaucagauugaaaaagaauucucagaagucgaagggagaauucaggaccuugagaaauauguugaggacaccaaaauagaucucuggucauacaacgcggagcuucuuguugcccuggagaaccaacauacaauugaucuaacugacucagaaaugaacaaacuguuugaaaaaacaaagaagcaacugagggaaaaugcugaggauaugggcaaugguuguuucaaaauauaccacaaaugugacaaugccugcauaggaucaaucagaaauggaacuuaugaccacaauguauacagagaugaagcauuaaacaaccgguuccagaucaagggaguugagcugaagucaggguacaaagauuggauccuauggauuuccuuugccauaucauguuuuuugcuuuguguugcuuuguugggguucaucaugugggccugccaaaaaggcaacauuaggugcaacauuugcauuuga

SEQ ID NO: 41171 - RNA, 1701 nt, Artificial Sequence
  derived and/or modified CDS sequence (wt) from hemagglutinin__InfluenzaA__AFM72960
augaagacuaucauugcuuugagcuacauucuaugucugguuuucgcucaaaaacuuccuggaaaugacaacagcacggcaacgcugugccuugggcaccaugcaguaccaaacggaacgauagugaaaacaaucacgaaugaccaaauugaaguuacuaaugcuacugagcugguucagaguuccucaacaggugaaauaugcgacaguccucaucagauccuugauggagaaaacugcacacuaauagaugcucuauugggagacccucagugugauggcuuccaaaauaagaaaugggaccuuuuuguugaacgcagcaaagccuacagcaacuguuacccuuaugaugugccggauuaugccucccuuaggucacuaguugccucauccggcacacuggaguuuaacaaugaaagcuucaaguggacuggagucacucaaaacggaacaagcucugcuugcauaaggagaucuaauaacaguuucuuuaguagauugaauugguugacccacuuaaaauucaaauacccagcauuaaaugugacuaugccaaacaaugaacaauuugacaaauuguacauuugggggguucaccacccggguacggacaaugaccaaaccucccuguaugcucaagcaucaggaagaaucacagucucuaccaaaagaagccaacaaacuguaaucccgaauaucggaucuagacccagaguaaggaauaucccuagcagaauaagcaucuauuggacaauaguaaaaccgggagacauacuuuugauuaacagcauagggaaucuaauugcuccuagggguuacuucaaaauacgaagugggaaaagcucaauaaugagaucagaugcacccauuggcaaaugcaauucugaaugcaucacuccaaauggaagcauucccaaugacaaaccauuccaaaauguaaacaggaucacauacggggccugucccagauauguuaagcaaaacacucugaaauuggcaacagggaugcgaaauguaccagagaaacaaacuagaggcauauuuggcgcaaucgcggguuucauagaaaaugguugggagggaaugguggaugguugguacgguuucaggcaucaaaauucugagggaagaggacaagcagcagaucucaaaagcacucaagcagcaaucgaucaaaucaaugggaagcugaauagauugaucgggaaaaccaacgagaaauuccaucagauugaaaaagaauucucagaagucgaagggagaauucaggaccuugagaaauauguugaggacaccaaaauagaucucuggucauacaacgcggagcuucuuguugcccuggagaaccaacauacaauugaucuaacugacucagaaaugaacaaacuguuugaaaaaacaaagaagcaacugagggaaaaugcugaggauaugggcaaugguuguuucaaaauauaccacaaaugugacaaugccugcauaggaucaaucagaaauggaacuuaugaccacaauguauacagagaugaagcauuaaacaaccgguuccagaucaagggaguugagcugaagucaggguacaaagauuggauccuauggauuuccuuugccauaucauguuuuuugcuuuguguugcuuuguugggguucaucaugugggccugccaaaaaggcaacauuaggugcaacauuugcauuuga

SEQ ID NO: 41172 - RNA, 1701 nt, Artificial Sequence
  derived and/or modified CDS sequence (wt) from hemagglutinin__InfluenzaA__AFM72971
augaagacuaucauugcuuugagcuacauucuaugucugguuuucgcucaaaaacuuccuggaaaugacaacagcacggcaacgcugugccuugggcaccaugcaguaccaaacggaacgauagugaaaacaaucacgaaugaccaaauugaaguuacuaaugcuacugagcugguucagaguuccucaacaggugaaauaugcgacaguccucaucagauccuugauggagaaaacugcacacuaauagaugcucuauugggagacccucagugugauggcuuccaaaauaagaaaugggaccuuuuuguugaacgcagcaaagccuacagcaacuguuacccuuaugaugugccggauuaugccucccuuaggucacuaguugccucauccggcacacuggaguuuaacaaugaaagcuucaaguggacuggagucacucaaaacggaacaagcucugcuugcauaaggagaucuaauaacaguuucuuuaguagauugaauugguugacccaauuaaacuucaaauacccagcauuaaaugugacuaugccaaacaaugaacaauuugacaaauuguacauuugggggguucaccacccggguacggacaaugaccaaaccucccuguaugcucaagcaucaggaagaaucacagucucuaccaaaagaagccaacaaacuguaaucccgaauaucggaucuagacccagaguaaggaauaucccuagcagaauaagcaucuauuggacaauaguaaaaccgggagacauacuuuugauuaacagcauagggaaucuaauugcuccuagggguuacuucaaaauacgaagugggaaaagcucaauaaugagaucagaugcacccauuggcaaaugcaauucugaaugcaucacuccaaauggaagcauucccaaugacaaaccauuccaaaauguaaacaggaucacauacggggccugucccagauauguuaagcaaaacacucugaaauuggcaacagggaugcgaaauguaccagagaaacaaacuagaggcauauuuggcgcaaucgcggguuucauagaaaaugguugggagggaaugguggaugguugguacgguuucaggcaucaaaauucugagggaagaggacaagcagcagaucucaaaagcacucaagcagcaaucgaucaaaucaaugggaagcugaauagauugaucgggaaaaccaacgagaaauuccaucagauugaaaaagaauucucagaagucgaagggagaauucaggaccuugagaaauauguugaggacaccaaaauagaucucuggucauacaacgcggagcuucuuguugcccuggagaaccaacauacaauugaucuaacugacucagaaaugaacaaacuguuugaaaaaacaaagaagcaacugagggaaaaugcugaggauaugggcaaugguuguuucaaaauauaccacaaaugugauaaugccugcauaggaucaaucagaaauggaacuuaugaccacaauguauacagagaugaagcauuaaacaaccgguuccagaucaagggaguugagcugaagucaggguacaaagauuggauccuauggauuuccuuugccauaucauguuuuuugcuuuguguugcuuuguugggguucaucaugugggccugccaaaaaggcaacauuaggugcaacauuugcauuuga

SEQ ID NO: 41173 - RNA, 1701 nt, Artificial Sequence
  derived and/or modified CDS sequence (wt) from hemagglutinin__InfluenzaA__AFM72982
augaagacuaucauugcuuugagcuacauucuaugucugguuuucgcucaaaaacuuccuggaaaugacaacagcacggcaacgcugugccuugggcaccaugcaguaccaaacggaacgauagugaaaacaaucacgaaugaccaaauugaaguuacuaaugcuacugagcugguucagaguuccucaacaggugaaauaugcgacaguccucaucagauccuugauggagaaaacugcacacuaauagaugcucuauugggagacccucagugugauggcuuccaaaauaagaaaugggaccuuuuuguugaacgaagcaaagccuacagcaacuguuacccuuaugaugugccggauuaugccucccuuaggucacuaguugccucauccggcacacuggaauuuaacagugaaagcuucaauuggacuggagucacucaaaacggaacaagcucugcuugcauaaggagaucuaauaauaguuucuuuaguagauugaauugguugacccacuuaaacuucaaauacccagcauugaacgugacuaugccaaacaaugaacaauuugacaaauuguacauuugggggguucaccacccggguacggacaaggaccaaaucuucccguaugcucaagcaucaggaagaaucacaguaucuaccaaaagaagccaacaagcuguaaucccgaauaucggaucuagacccagaguaaggaauaucccuagcagaauaagcaucuauuggacaauaguaaaaccgggagacauacuuuugauuaacagcacagggaaucuaauugcuccuagggguuacuucaaaauacgaagugggaaaagcucaauaaugagaucagaugcacccauuggcaaaugcaauucugaaugcaucacuccaaauggaagcauucccaaugacaaaccauuccaaaauguaaacaggaucacauacggggccugucccagauauauuaagcaaagcacucugaaauuggcaacaggaaugcgaaauguaccagagaaacaaacuagaggcauauuuggcgcaauagcggguuucauagaaaaugguugggagggaaugguggaugguugguacgguuucaggcaucaaaauucugagggaagaggacaagcagcagaucucaaaagcacucaagcagcaaucgaucaaaucaaugggaagcugaauagauugaucgggaaaaccaacgagaaauuccaucagauugaaaaagaauucucagaagucgaagggagaauucaggaccuugagaaauauguugaggacacuaaaauagaucucuggucauacaacgcagagcuucuuguugcccuugagaaccaacauacaauugaucuaacugacucagaaaugaacaaacuguuugaaaaaacaaagaagcaacugagggaaaaugcugaggauaugggcaaugguuguuucaaaauauaccacaaaugugacaaugccugcauaggaucaaucagaaauggaacuuaugaccacgauguauacagagaugaagcauuaaacaaccgguuccagaucaagggaguugagcugaagucaggguacaaagauuggauccuauggauuucccuugccauaucauguuuuuugcuuuguguugcuuuguugggguucaucaugugggccugccaaaaaggcaacauuaggugcaacauuugcauuuga

SEQ ID NO: 41174 - RNA, 1701 nt, Artificial Sequence
  derived and/or modified CDS sequence (wt) from hemagglutinin__InfluenzaA__AFM72993
augaagacuaucauugcuuugagcuacauucuaugucugguuuucgcccaaaaacuuccuggaaaugacaacagcacggcaacgcugugccuugggcaccaugcaguaccaaacggaacgauagugaaaacaaucacgaaugaccaaauagaaguuacuaaugcuacugagcugguucagaguuccucagcaggugaaauaugcgacaguccucaucagauccuugauggagaaaacugcacacuaauagaugcccuauugggagacccucagugugauggcuuccaaaauaagaaaugggaccuuuuuguugaacgaagcagagccuacagcaacuguuacccuuaugaugugccggauuaugccucccuuaggucacuaguugccucauccggcacacuggaguuuaacaaugaaagcuucaauuggacuggagucacucaaaacggaacaagcucugcuugcauaaggagaucuaauaauaguuucuuuaguagauugaauugguugacccacuuaaacuucaaauacccagcauugaacgugacuaugccaaacaaugaacaauuugacaaauuguacauuugggggguucuccacccggguacguacaaggaccaaaucuuccuguaugcucaagcaucaggaagaaucacaguaucuaccaaaagaagccaacaagcuguaaucccgaauaucggaucuagacccagaguaaggaauaucccuagcagaauaagcaucuauuggacaauaguaaaaccgggagacauacuuuugauuaacagcacagggaaucuaauugcuccuagggguuacuucaaaauacgaagugggaaaagcucaauaaugagaucagaugcacccauuggcaaaugcaauucugaaugcaucacuccaaauggaagcauucccaaugacaaaccauuccaaaauguaaacaggaucacauacggggccugucccagauauguuaagcaaagcacucugaaauuggcaacaggaaugcgaaauguaccagagaaacaaacuagaggcauauuuggcgcaauagcggguuucauagaaaaugguugggagggaaugguggaugguugguacgguuucaggcaucaaaauucugagggaagaggacaagcagcagaucucaaaagcacucaagcagcaaucgaucaaaucaauggaaagcugaauagauugaucgggaaaaccaacgagaaauuccaucagauugaaaaagaauucucagaagucgaagggagaauucaggaccuugagaaauauguugaggacacuaaaauagaucucuggucauacaacgcggagcuucuuguugcccuggagaaccaacauacaauugaucuaacugacucagaaaugaacaaacuguuugaaaaaacaaagaagcaacugagggaaaaugcugaggauaugggcaaugguuguuucaaaauauaccacaaaugugacaaugccugcauaggaucaaucagaaauggaacuuaugaccacgauguauacagagaugaagcauuaaacaaccgguuccagaucaagggaguugagcugaagucaggguacaaagauuggauccuauggauuuccuuugccauaucauguuuuuugcuuuguguugcuuuguugggguucaucaugugggccugccaaaaaggcaacauuaggugcaacauuugcauuuga

SEQ ID NO: 41175 - RNA, 1701 nt, Artificial Sequence
  derived and/or modified CDS sequence (wt) from hemagglutinin__InfluenzaA__AFM73004
augaagacuaucauugcuuugagcuacauucuaugucugguuuucgcccaaaaacuuccuggaaaugacaacagcacggcaacgcugugccuugggcaccaugcaguaccaaacggaacgauagugaaaacaaucacgaaugaccaaauagaaguuacuaaugcuacugagcugguucagaguuccucagcaggugaaauaugcgacaguccucaucagauccuugauggagaaaacugcacacuaauagaugcccuauugggagacccucagugugauggcuuccaaaauaagaaaugggaccuuuuuguugaacgaagcagagccuacagcaacuguuacccuuaugaugugccggauuaugccucccuuaggucacuaguugccucauccggcacacuggaguuuaacaaugaaagcuucaauuggacuggagucacucaaaacggaacaagcucugcuugcauaaggagaucuaauaauaguuucuuuaguagauugaauugguugacccacuuaaacuucaaauacccagcauugaacgugacuaugccaaacaaugaacaauuugacaaauuguacauuugggggguucuccacccggguacguacaaggaccaaaucuuccuguaugcucaagcaucaggaagagucacaguaucuaccaaaagaagccaacaagcuguaaucccgaauaucggaucuagacccagaguaaggaauaucccuagcagaauaagcaucuauuggacaauaguaaaaccgggagacauacuuuugauuaacagcacagggaaucuaauugcuccuagggguuacuucaaaauacgaagugggaaaagcucaauaaugagaucagaugcacccauuggcaaaugcaauucugaaugcaucacuccaaauggaagcauucccaaugacaaaccauuccaaaauguaaacaggaucacauacggggccugucccagauauguuaagcaaagcacucugaaauuggcaacaggaaugcgaaauguaccagagaaacaaacuagaggcauauuuggcgcaauagcggguuucauagaaaaugguugggagggaaugguggaugguugguacgguuucaggcaucaaaauucugagggaagaggacaagcagcagaucucaaaagcacucaagcagcaaucgaucaaaucaauggaaagcugaauagauugaucgggaaaaccaacgagaaauuccaucagauugaaaaagaauucucagaagucgaagggagaauucaggaccuugagaaauauguugaggacacuaaaauagaucucuggucauacaacgcggagcuucuuguugcccuggagaaccaacauacaauugaucuaacugacucagaaaugaacaaacuguuugaaaaaacaaagaagcaacugagggaaaaugcugaggauaugggcaaugguuguuucaaaauauaccacaaaugugacaaugccugcauaggaucaaucagaaauggaacuuaugaccacgauguauacagagaugaagcauuaaacaaccgguuccagaucaagggaguugagcugaagucaggguacaaagauuggauccuauggauuuccuuugccauaucauguuuuuuucuuuguguugcuuuguugggguucaucaugugggccugccaaaaaggcaacauuaggugcaacauuugcauuuga

SEQ ID NO: 41176 - RNA, 1701 nt, Artificial Sequence
  derived and/or modified CDS sequence (wt) from hemagglutinin__InfluenzaA__AFM73015
augaaggcaauacuaguaguucugcuauauacauuugcaaccgcaaaugcagacacauuauguauagguuaccaugcgaacaauucaacagacacuguagacacaguacuagaaaagaauguaacaguaacacacucuguuaaucuucuagaagacaagcauaacgggaaacuaugcaaacuaagagggguagccccauugcauuuggguaaauguaacauugcuggcuggauccugggaaauccagagugugaaucacucuccacagcaagcucaugguccuacauuguggaaacaucuaguucagacaauggaacguguuacccaggagauuucaucgauuaugaggagcuaagagagcaauugagcucagugucaucauuugaaagguuugagauauuccccaagacaaguucauggcccaaucaugacucgaacaaagguguaacggcagcauguccucaugcuggagcaaaaggcuucuacaaaaauuuaauauggcuaguuaaaaaaggaaauucauacccaaagcucagcaaauccuacauuaaugauaaagggaaagaaguccucgugcuauggggcauucaucauccaucuacuacugcugaccaacaaagucucuaucagaaugcagauacauauguuuuuguggggacaucaagauacagcaagaaguucaagccggaaauagcaauaagacccaaagugagggaucgagaagggagaaugaacuauuacuggacacuaguagaaccgggagacaaaauaacauucgaagcaacuggaaaucuagugguaccgagauaugcauucgcaauggaaagaaaugcuggaucugguauuaucauuucagauacaccaguccacgauugcaauacaacuugucagacacccaagggugcuauaaacaccagccucccauuucagaauauacauccgaucacaauuggaaaauguccaaaauauguaaaaagcacaaaauugagacuggccacaggauugaggaaugucccgucuauucaaucuagaggccuauuuggggccauugccggcuucauugaagggggguggacagggaugguagauggaugguacgguuaucaccaucaaaaugagcaggggucaggauaugcagccgaccugaagagcacacagaaugccauugacaagauuacuaacaaaguaaauucuguuauugaaaagaugaauacacaguucacagcaguagguaaagaguucaaccaccuggaaaaaagaauagagaauuuaaauaaaaaaguugaugaugguuuccuggacauuuggacuuacaaugccgaacuguugguucuauuggaaaaugaaagaacuuuggacuaccacgauucaaaugugaagaacuuauaugaaaagguaagaaaccaauuaaaaaacaaugccaaggaaauuggaaauggcugcuuugaauuuuaccacaaaugcgauaacacgugcauggaaaguguuaaaaaugggacuuaugacuacccaaaauacucagaggaagcaaaauuaaacagagaagaaauagaugggguaaagcuggaaucaacaaggauuuaccagauuuuggcgaucuauucaacugucgccaguucauugguacugguagucucccugggggcaaucaguuuuuggaugugcucuaaugggucucuacaguguagaauauguauuuaa

SEQ ID NO: 41177 - RNA, 1701 nt, Artificial Sequence
  derived and/or modified CDS sequence (wt) from hemagglutinin__InfluenzaA__AFM73025
augaaggcaauacuaguaguucugcuauauacauuugcaaccgcaaaugcagacacauuauguauagguuaccaugcgaacaauucaacagacacuguagacacaguacuagaaaagaauguaacaguaacacacucuguuaaucuucuagaagacaagcauaacgggaaacuaugcaaacuaagagggguagccccauugcauuuggguaaauguaacauugcuggcuggauccugggaaauccagagugugaaucacucuccacagcaagcucaugguccuacauuguggaaacaucuaguucagacaauggaacguguuacccaggagauuucaucgauuaugaggagcuaagagagcaauugagcucagugucaucauuugaaagguuugagauauuccccaagacaaguucauggcccaaucaugacucgaacaaagguguaacggcagcauguccucaugcuggagcaaaaggcuucuacaaaaauuuaauauggcuaguuaaaaaaggaaauucauacccaaagcucagcaaauccuacauuaaugauaaagggaaagaaguccucgugcuauggggcauucaucauccaucuacuacugaugaccaacaaagucucuaucagaaugcagauacauauguuuuuguggggacaucaagauacagcaagaaguucaagccggaaauagcaauaagacccaaagugagggaucgagaagggagaaugaacuauuacuggacacuaguagaaccgggagacaaaauaacauucgaagcaacuggaaaucuagugguaccgagauaugcauucgcaauggaaagaaaugcuggaucugguauuaucauuucagauacaccaguccacgauugcaauacaacuugucagacacccaagggugcuauaaacaccagccucccauuucagaauauacauccgaucacaauuggaaaauguccaaaauauguaaaaagcacaaaauugagacuggccacaggauugaggaaugucccgucuauucaaucuagaggccuauuuggggccauugccggcuucauugaagggggguggacagggaugguagauggaugguacgguuaucaccaucaaaaugagcaggggucaggauaugcagccgaccugaagagcacacagaaugccauugacaagauuacuaacaaaguaaauucuguuauugaaaagaugaauacacaguucacagcaguagguaaagaguucaaccaccuggaaaaaagaauagagaauuuaaauaaaaaaguugaugaugguuuccuggacauuuggacuuacaaugccgaacuguugguucuauuggaaaaugaaagaacuuuggacuaccacgauucaaaugugaagaacuuauaugaaaagguaagaaaccaauuaaaaaacaaugccaaggaaauuggaaauggcugcuuugaauuuuaccacaaaugcgauaacacgugcauggaaaguguuaaaaaugggacuuaugacuacccaaaauacucagaggaagcaaaauuaaacagagaagaaauagaugggguaaagcuggaaucaacaaggauuuaccagauuuuggcgaucuauucaacugucgccaguucauugguacugguagucucccugggggcaaucaguuuuuggaugugcucuaaugggucucuacaguguagaauauguauuuaa

SEQ ID NO: 41178 - RNA, 1701 nt, Artificial Sequence; identical to SEQ ID NO: 41177
  derived and/or modified CDS sequence (wt) from hemagglutinin__InfluenzaA__AFM73035

SEQ ID NO: 41179 - RNA, 1701 nt, Artificial Sequence
  derived and/or modified CDS sequence (wt) from hemagglutinin__InfluenzaA__AFM73045
augaaggcaauacuaguaguucugcuauauacauuugcaaccgcaaaugcagacacauuauguauagguuaucaugcgaacaauucaacagacacuguagacacaguacuagaaaggaauguaacaguaacacacucuguuaaccuucuagaagacaagcauaacgggaaacuaugcaaacuaagagggguggccccauugcauuuggguaaauguaacauugcuggcuggauccugggaaauccagagugugaaucacucuccacagcaagcucaugguccuacauuguggaaacaucuaguucagacaauggaacguguuacccaggagauuucaucgauuaugaggagcuaagagagcaauugagcucagugucaucauuugaaagguuugagauauuccccaagacaaguucauggcccaaucaugaaucgaacaaagguguaacggcagcauguccucaugcuggagcaaaaagcuucuacaaaaauuuaauauggcuaguuaaaaaaggaaauucauacccaaagcucagcaaauccuacauuaaugauaaagggaaagaaguccucgugcuauggggcauucaccauccaucuacuagugcugaccaacaaagucucuaucagaaugcagaugcauauguuuuuguggggacaucaagauacagcaagaaguucaagccggaaauagcaauaagacccaaagugagggaucaagaagggagaaugaacuauuacuggacacuaguagagccgggagacaaaauaacauucgaagcaacuggaaaucuagugguaccgagauaugcauucgcaauggaaagaaaugcuggaucugguauuaucauuucagauacaccaguccacgauugcaauacaacuugucagacacccaagggugcuauaaacaccagccucccauuucagaauauacauccgaucacaauuggaaaauguccaaaauauguaaaaagcacaaaauugagacuggccacaggauugaggaaugucccgucuauucaaucuagaggccuauuuggggccauugccgguuucauugaagggggguggacagggaugguagauggaugguacgguuaucaccaucaaaaugagcaggggucaggauaugcagccgaccugaagagcacacagaaugccauugacgagauuacuaacaaaguaaauucuguuauugaaaagaugaauacacaguucacagcaguagguaaagaguucaaccaccuggaaaaaagaauagagaauuuaaauaaaaaaguugaugaugguuuccuggacauuuggacuuacaaugccgaacuguugguucuauuggaaaaugaaagaacuuuggacuaccacgauucaaaugugaagaacuuauaugaaaagguaagaagccaguuaaaaaacaaugccaaggaaauuggaaacggcugcuuugaauuuuaccacaaaugcgauaacacgugcauggaaagugucaaaaaugggacuuaugacuacccaaaauacucagaggaagcaaaauuaaacagagaagaaauagaugggguaaagcuggaaucaacaaggauuuaccagauuuuggcgaucuauucaacugucgccaguucauugguacugguagucucccugggggcaaucaguuucuggaugugcucuaaugggucucuacaguguagaauauguauuuaa

SEQ ID NO: 41180 - RNA, 1701 nt, Artificial Sequence
  derived and/or modified CDS sequence (wt) from hemagglutinin__InfluenzaA__AFM73055
augaaggcaauacuaguaguucugcuauauacauuugcaaccgcaaaugcagacacauuauguauagguuaucaugcgaacaauucaacagacacuguagacacaguacuagaaaggaauguaacaguaacacacucuguuaaccuucuagaagacaagcauaacgggaaacuaugcaaacuaagagggguggccccauugcauuuggguaaauguaacauugcuggcuggauccugggaaauccagagugugaaucacucuccacagcaagcucaugguccuacauuguggaaacaucuaguucagacaauggaacguguuacccaggagauuucaucgauuaugaggagcuaagagagcaauugagcucagugucaucauuugaaagguuugagauauuccccaagacaaguucauggcccaaucaugacucgaacaaagguguaacggcagcauguccucaugcuggagcaaaaagcuucuacaaaaauuuaauauggcuaguugaaaaaggaaauucauacccaaagcucagcaaauccuacauuaaugauaaagggaaagaaguccucgugcuauggggcauucaccauccaucuacuagugcugaccaacaaagucucuaucagaaugcagaugcauauguuuuuguggggacaucaagauacagcaagaaguucaagccggaaauagcaauaagacccaaagugagggaucgagaagggagaaugaacuauuacuggacacuaguagagccgggagacaaaauaacauucgaagcaacuggaaaucuagugguaccgagauaugcauucgcaauggaaagaaaugcuggaucugguauuaucauuucagauacaccaguccacgauugcaauacaacuugucagacacccaagggugcuauaaacaccagccucccauuucagaauauacauccgaucacaauuggaaaauguccaaaauauguaaaaagcacaaaauugagacuggccacaggauugaggaaugucccgucuauucaaucuagaggccuauuuggggccauugccgguuucauugaagggggguggacagggaugguagauggaugguacgguuaucaccaucaaaaugagcaggggucaggauaugcagccgaccugaagagcacacagaaugccauugacgagauuacuaacaaaguaaauucuguuauugaaaagaugaauacacaguucacagcaguagguaaagaguucaaccaccuggaaaaaagaauagagaauuuaaauaaaaaaguugaugaugguuuccuggacauuuggacuuacaaugccgaacuguugguucuauuggaaaaugaaagaacuuuggacuaccacgauucaaaugugaagaacuuauaugaaaagguaagaagccaguuaaaaaacaaugccaaggaaauuggaaacggcugcuuugaauuuuaccacaaaugcgauaacacgugcauggaaagugucaaaaaugggacuuaugacuacccaaaauacucagaggaagcaaaauuaaacagagaagaaauagaugggguaaagcuggaaucaacaaggauuuaccagauuuuggcgaucuauucaacugucgccaguucauugguacugguagucucccugggggcaaucaguuucuggaugugcucuaaugggucucuacaguguagaauauguauuuaa

SEQ ID NO: 41181 - RNA, 1701 nt, Artificial Sequence
  derived and/or modified CDS sequence (wt) from hemagglutinin__InfluenzaA__AFM73065
augaaggcaauacuaguaguucugcuauauacauuugcaaccgcaaaugcagacacauuauguauagguuaucaugcgaacaauucaacagacacuguagacacaguacuagaaaggaauguaacaguaacacacucuguuaaccuucuagaagacaagcauaacgggaaacuaugcaaacuaagagggguggccccauugcauuuggguaaauguaacauugcuggcuggauccugggaaauccagagugugaaucacucuccacagcaagcucaugguccuacauuguggaaacaucuaguucagacaauggaacguguuacccaggagauuucaucgauuaugaggagcuaagagagcaauugagcucagugucaucauuugaaagguuugagauauuccccaagacaaguucauggcccaaucaugacucgaacaaagguguaacggcagcauguccucaugcuggagcaaaaagcuucuacaaaaauuuaauauggcuaguuaaagaaggaaauucauacccaaagcucagcaaauccuacauuaaugauaaagggaaagaaguccucgugcuauggggcauucaccauccaucuacuagugcugaccaacaaagucucuaucagaaugcagaugcauauguuuuuguggggacaucaagauacagcaagaaguucaagccggaaauagcaauaagacccaaagugagggaucgagaagggagaaugaacuauuacuggacacuaguagagccgggagacaaaauaacauucgaagcaacuggaaaucuagugguaccgagauaugcauucgcaauggaaagaaaugcuggaucugguauuaucauuucagauacaccaguccacgauugcaauacaacuugucagacacccaagggugcuauaaacaccagccucccauuucagaauauacauccgaucacaauuggaaaauguccaaaauauguaaaaagcacaaaauugagacuggccacaggauugaggaaugucccgucuauucaaucuagaggccuauuuggggccauugccgguuucauugaagggggguggacagggaugguagauggaugguacgguuaucaccaucaaaaugagcaggggucaggauaugcagccgaccugaagagcacacagaaugccauugacgagauuacuaacaaaguaaauucuguuauugaaaagaugaauacacaguucacagcaguagguaaagaguucaaccaccuggaaaaaagaauagagaauuuaaauaaaaaaguugaugaugguuuccuggacauuuggacuuacaaugccgaacuguugguucuauuggaaaaugaaagaacuuuggacuaccacgauucaaaugugaagaacuuauaugaaaagguaagaagccaguuaaaaaacaaugccaaggaaauuggaaacggcugcuuugaauuuuaccacaaaugcgauaacacgugcauggaaagugucaaaaaugggacuuaugacuacccaaaauacucagaggaagcaaaauuaaacagagaagaaauagaugggguaaagcuggaaucaacaaggauuuaccagauuuuggcgaucuauucaacugucgccaguucauugguacugguagucucccugggggcaaucaguuucuggaugugcucuaaugggucucuacaguguagaauauguauuuaa

SEQ ID NO: 41182 - RNA, 1701 nt, Artificial Sequence; identical to SEQ ID NO: 32928
  derived and/or modified CDS sequence (wt) from hemagglutinin__InfluenzaA__AFM73477

SEQ ID NO: 41183 - RNA, 1707 nt, Artificial Sequence
  derived and/or modified CDS sequence (wt) from hemagglutinin__InfluenzaA__AFM78567
auggagaaaauagugcuucuucuugcaauagucagucuuguuaaaagugaucagauuugcauugguuaccaugcaaacaauucaacagagcagguugacacaaucauggaaaagaacguuacuguuacacaugcccaagacauacuggaaaagacacacaacgggaagcucugcgaucuagauggagugaagccucuaauuuuaagagauuguaguguagcuggauggcuccucgggaacccaaugugugacgaauucaucaauguaccggaauggucuuacauaguggagaaggccaauccaaccaaugaccucuguuacccagggaguuucaacgacuaugaagaacugaaacaccuauugagcagaauaaaccauuuugagaaaauucaaaucauccccaaaaguucuugguccgaucaugaagccucaucaggagugagcucagcauguccauaccugggaagucccuccuuuuuuagaaaugugguauggcuuaucaaaaagaacaguacauacccaacaauaaagaaaagcuacaauaauaccaaccaagaagaucuuuugguacuguggggaauucaccauccuaaugaugcggcagagcagacaaggcuauaucaaaacccaaccaccuauauuuccauugggacaucaacacuaaaccagagauugguaccaaaaauagcuacuagauccaaaguaaacgggcaaaguggaaggauggaguucuucuggacaauuuuaaaaccuaaugaugcaaucaacuucgagaguaauggaaauuucauugcuccagaauaugcauacaaaauugucaagaaaggggacucagcaauuaugaaaagugaauuggaauaugguaacugcaacaccaagugucaaacuccaaugggggcgauaaacucuaguaugccauuccacaacauacacccucucaccaucggggaaugccccaaauaugugaaaucaaacagauuaguccuugcaacagggcucagaaauagcccucaaagagagagcagaagaaaaaagagaggacuauuuggagcuauagcagguuuuauagagggaggauggcagggaaugguagaugguugguauggguaccaccauagcaaugagcaggggaguggguacgcugcagacaaagaauccacucaaaaggcaauagauggagucaccaauaaagucaacucaaucauugacaaaaugaacacucaguuugaggccguuggaagggaauuuaauaacuuagaaaggagaauagagaauuuaaacaagaagauggaagacggguuucuagaugucuggacuuauaaugccgaacuucugguucucauggaaaaugagagaacucuagacuuucaugacucaaauguuaagaaccucuacgacaagguccgacuacagcuuagggauaaugcaaaggagcuggguaacgguuguuucgaguucuaucacaaaugugauaaugaauguauggaaaguauaagaaacggaacguacaacuauccgcaguauucagaagaagcaagauuaaaaagagaggaaauaagugggguaaaauuggaaucaauaggaacuuaccaaauacugucaauuuauucaacaguggcgaguucccuagcacuggcaaucaugauggcuggucuaucuuuauggaugugcuccaauggaucguuacaaugcagaauuugcauuuaa

SEQ ID NO: 41184 - RNA, 1701 nt, Artificial Sequence
  derived and/or modified CDS sequence (wt) from hemagglutinin__InfluenzaA__AFM78646
augaaggcaauacuaguaguucugcuauauacauuugcaaccgcaaaugcagacacauuauguauagguuaucaugcgaacaauucaacagacacuguagacacaguacuagaaaagaauguaacaguaacacacucuguuaaccuucuagaagacaagcauaacgggaaacuaugcaaacuaagagggguagccccauugcauuuggguaaauguaacauugcuggcuggauccugggaaauccagagugugaaucacucuccacagcaagcucaugguccuacauuguggaaacaucuaguucagacaauggaacguguuacccaggagauuucaucgauuaugaggagcuaagagagcaauugagcucagugucaucauuugaaagguuugagauauuccccaagacaaguucauggcccaaucaugacccgaacaaagguguaacggcagcauguccucaugcuggagcaaaaagcuucuacaaaaauuuaauauggcuaguuaaaaaaggaaauucauacccaaagcucagcaaauccuacauuaaugauaaagggaaagaaguccucgugcuauggggcauucaccauccaucuacuagugcugaccaacaaggucucuaucagaaugcagaugcauauguuuuuguggggacaucaagauacagcaagaaguucaagccggaaauagcaauaagacccaaagugagggaucaagaagggagaaugaacuauuacuggacacuaguagagccgggagacaaaauaacauucgaagcaacuggaaaucuagugguaccgagauaugcauucgcaauggaaagaaaugcuggaucugguauuaucauuucagauacaccaguccacgauugcaauacaacuugucagacacccaagggugcuauaaacaccagccucccauuucagaauauacauccgaucacaauuggaaaauguccaaaauauguaaaaagcacaaaauugagacuggccacaggauugaggaaugucccgucuauucaaucuagaggccuauuuggggccauugccgguuucauugaagggggguggacagggaugguagauggaugguacgguuaucaccaucaaaaugagcaggggucaggauaugcagccgaccugaagagcacacagaaugccauugacgagauuacuaacaaaguaaauucuguuauugaaaagaugaauacacaguucacagcaguagguaaagaguucaaccaccuggaaaaaagaauagagaauuuaaauaaaaaaguugaugaugguuuccuggacauuuggacuuacaaugccgaacuguugguucuauuggaaaaugaaagaacuuuggacuaccacgauucaaaugugaagaacuuauaugaaaagguaagaagccaguuaaaaaacaaugccaaggaaauuggaaacggcugcuuugaauuuuaccacaaaugcgauaacacgugcauggaaagugucaaaaaugggacuuaugacuacccaaaauacucagaggaagcaaaauuaaacagagaagaaauagaugggguaaagcuggaaucaacaaggauuuaccagauuuuggcgaucuauucaacugucgccaguucauugguacugguagucucccugggggcaaucaguuucuggaugugcucuaaugggucucuacaguguagaauauguauuuaa

SEQ ID NO: 41185 - RNA, 1698 nt, Artificial Sequence
  derived and/or modified CDS sequence (wt) from hemagglutinin__InfluenzaA__AFM85179
augaaaguaaaacuacugauccuguuauguacauuuacagcuacauaugcugacacaauauguauaggcuaccaugccaacaacucaaccgacacuguugacacaguacuugagaagaaugugacagugacacacucugucaaccuacuugagaacagucacaauggaaaacuaugucuacuaaaaggaauagccccccuacaauuggguaauugcagcguugccggauggaucuuaggaaacccagaaugcgaauuacugauuuccaaggaaucaugguccuacauuguagaaacaccaaauccugagaauggaacauguuacccaggguauuucgccgacuaugaggagcuaagggagcaauugaguucaguaucuucauuugagagauucgaaauauuccccaaagaaagcucauggcccaaccacaccguaaccggaguaucagcaucaugcucccauaaugggaaaagcaguuuuuacagaaauuugcuauggcugacggggaagaaugguuuguacccaaaccugagcaaguccuaugcaaacaacaaagagaaagaaguccuuauacuaugggguguucaucacccgccaaacauaggggaccaaaggacccucuauuauacagaaaaugcuuaugucucuguagugucuucacauuauagcagaagauucaccccagaaauaaccaaaaggcccaaaguaagagaucaggaaggaagaaucaacuacuacuggacucugcuggaacccggggauacaauaauauuugaggcaaauggaaaucuaauagcgccaugguaugcuuucgcacugaguagaggcuuuggaucaggaaucaucaucucaaaugcaccaauggaugaaugugacgcgaagugucaaacaccucagggagcuauaaacagcagucuuccuuuccagaauguacacccagucacaauaggagaguguccaaaguaugucaggagugcaaaauuaaggaugguuacaggacuaaggaacaucccguccauucaauccagagguuuguuuggagccauugccgguuucauugaagggggguggacuggaaugguagaugggugguaugguuaucaucaucaaaaugagcaaggaucuggcuaugcugcagaucaaaaaagcacacaaaacgccauuaacgggauuacaaacaaggugaauucuguaauugagaaaaugaacacucaauucacagcugugggcaaagaauucaacaaauuugaaagaaggauggaaaacuuaaauaaaaagguugaugauggauuucuagacauuuggacauauaaugcagaauuguugguucuacuggaaaaugaaaggacuuuggauuuccacgacuccaaugugaagaaucuguaugagaaaguaaaaagccaauuaaagaauaaugccaaagaaauaggaaauggguguuuugaauucuaucacaaguguaacaaugaaugcauggagagugugaaaaauggaacuuaugacuauccaaaauauuccgaagaaucaaaguuaaacagggaaaaaauugauggagugaaauuggaaucaaugggagucuaucagauucuggcgaucuacucaacugucgccaguucccugguucuuuuggucucccugggggcaaucagcuucuggauguguuccaaugggucuuugcaguguagaauaugcaucuga

SEQ ID NO: 41186 - RNA, 1701 nt, Artificial Sequence
  derived and/or modified CDS sequence (wt) from hemagglutinin__InfluenzaA__AFN11846
augaagacuaucauugcuuugagcuacauuuuaugucugguuuucgcucaaaaacuucccggaaaugacaacagcacagcaacgcugugccugggacaccaugcagugccaaacggaacgcuagugaaaacaaucacgaaugaucaaauugaagugacuaaugcuacugagcugguucagaguuccucaacagguagaauaugcgacaguccucaccgaauccuugauggaaaaaacugcacacugauagaugcucuauugggagacccucauugugauggcuuccaaaauaaggaaugggaccuuuuuguugaacgcagcaaagcuuacagcaacuguuacccuuaugaugugccggauuaugccucccuuaggucacuaguugccucaucaggcacccuggaguuuaccaaugaaggcuucaauuggacuggagucgcucaggaugggaaaagcuaugcuugcaaaaggggaucuguuaaaaguuucuuuaguagauugaauugguugcacaaauuagaauacaaauauccagcacugaacgugacuaugccaaacaaugacaaauuugacaaauuguacauuugggggguucaccacccgagcacggacagugaccaaaccagccuguauguucaagcaucagggagagucacagucucuaccaaaagaagccaacaaacuguaaucccgaauaucgggucuagacccugggugagggguaucuccaguagaauaagcaucuauuggacaauaguaaaaccgggagacauacuuuugauuaacagcacagggaaucuaauugcuccucgggguuacuucaaaauacgaaaugggaaaagcucaauaaugaggucagaugcacccauuggcaacugcaauucugaaugcaucacuccaaauggaagcauucccaaugacaaaccuuuucaaaauguaaacaggaucacguauggggccugucccagauauguuaagcaaaacacucugaaauuggcaacagggaugcggaauguaccagagaaacaaacuagaggcauauucggcgcaaucgcagguuucauagaaaaugguugggagggaaugguagacggcugguacgguuucaggcaucaaaauucugagggcacaggacaagcagcagaucuuaaaagcacucaagcagcaaucgaccaaaucaacgggaaacugaauagguuaaucgagaaaacgaacgagaaauuccaucaaaucgaaaaagaauucucagaaguagaagggagaauucaggaccucgagaaauauguugaagacacuaaaauagaucucuggucuuacaacgcggagcuucuuguugcccuggaaaaccaacauacaauugaucuaacugacucagaaaugaacaaacuguuugaaagaacaaggaagcaacugagggaaaaugcugaggacaugggcaaugguugcuucaaaauauaccacaaaugugacaaugccugcauagggucaaucagaaauggaacuuaugaccaugauguauacagagacgaagcauuaaacaaccgguuccagaucaaagguguugagcugaagucaggauacaaagauuggauccuauggauuuccuuugccauaucaugcuuuuugcuuuguguuguuuugcuggguuucaucaugugggccugccaaaaaggcaacauuaggugcaacauuugcauuuga

SEQ ID NO: 41187 - RNA, 1701 nt, Artificial Sequence; identical to SEQ ID NO: 35542
  derived and/or modified CDS sequence (wt) from hemagglutinin__InfluenzaA__AFN17371

SEQ ID NO: 41188 - RNA, 1701 nt, Artificial Sequence; identical to SEQ ID NO: 34681
  derived and/or modified CDS sequence (wt) from hemagglutinin__InfluenzaA__AFN17381

SEQ ID NO: 41189 - RNA, 1701 nt, Artificial Sequence; identical to SEQ ID NO: 34681
  derived and/or modified CDS sequence (wt) from hemagglutinin__InfluenzaA__AFN17391

SEQ ID NO: 41190 - RNA, 1701 nt, Artificial Sequence
  derived and/or modified CDS sequence (wt) from hemagglutinin__InfluenzaA__AFN17401
augaaggcaauacuaguaguucugcuauauacauuugcaaccgcaaaugcagacacauuauguauagguuaucaugcgaacaauucaacagacacuguagacacaguacuagaaaagaauguaacaguaacacacucuguuaaccuucuagaagacaagcauaacgggaaacuaugcaaacuaagagggguagccccauugcauuuggguaaauguaacauugcuggcuggauccugggaaauccagagugugaaucacucuccacagcaagcucaugguccuacauuguggaaacaucuaguucagacaauggaacguguuacccaggagauuucaucgauuaugaggagcuaagagagcaauugagcucagugucaucauuugaaagguuugagauauuccccaagacaaguucauggcccaaucaugacucgaacaaagguguaacggcagcauguccucaugcuggagcaaaaagcuucuacaaaaauuuaauauggcuaguuaaaaaaggaaauucauacccaaagcucagcaaauccuacauuaaugauaaagggaaagaaguccucgugcuauggggcauucaccauccaucuacuagugcugaccaacaaagucucuaucagaaugcagaugcauauguuuuuguggggacaucaagauacagcaagaaguucaagccggaaauagcaauaagacccaaagugagggaucaagaagggagaaugaacuauuacuggacacuaguagagccgggagacaaaauaacauucgaagcaacuggaaaucuagugguaccgagauaugcauuugcaauggaaagaaaugcuggaucugguauuaucauuucagauacaccaguccacgauugcaauacaacuugucagacacccaagggugcuauaaacaccagccuuccauuucagaauauacauccgaucacaauuggaaaauguccaaaauauguaaaaagcacaaaauugagacuggccacaggauugaggaaugucccgucuauucaaucuagaggccuauuuggggccauugccgguuucauugaagggggguggacagggaugguagauggaugguacgguuaucaccaucaaaaugagcaggggucaggauaugcagccgaccugaagagcacacagaaugccauugacgagauuacuaacaaaguaaauucuguuauugaaaagaugaauacacaguucacagcaguagguaaagaguucaaccaccuggaaaaaagaauagagaauuuaaauaaaaaaguugaugaugguuuccuggacauuuggacuuacaaugccgaacuguugguucuauuggaaaaugaaagaacuuuggacuaccacgauucaaaugugaagaacuuauaugaaaagguaagaagccaguuaaaaaacaaugccaaggaaauuggaaacggcugcuuugaauuuuaccacaaaugcgauaacacgugcauggaaagugucaaaaaugggacuuaugacuacccaaaauacucagaggaagcaaaauuaaacagagaagaaauagaugggguaaagcuggaaucaacaaggauuuaccagauuuuggcgaucuauucaacugucgccaguucauugguacugguagucucccugggggcaaucaguuucuggaugugcucuaaugggucucuacaguguagaauauguauuuaa

SEQ ID NO: 41191 - RNA, 1701 nt, Artificial Sequence; identical to SEQ ID NO: 34681
  derived and/or modified CDS sequence (wt) from hemagglutinin__InfluenzaA__AFN17411

SEQ ID NO: 41192 - RNA, 1701 nt, Artificial Sequence; identical to SEQ ID NO: 34681
  derived and/or modified CDS sequence (wt) from hemagglutinin__InfluenzaA__AFN17421

SEQ ID NO: 41193 - RNA, 1701 nt, Artificial Sequence
  derived and/or modified CDS sequence (wt) from hemagglutinin__InfluenzaA__AFN17431
augaaggcaauacuaguaguucugcuauauacauuugcaaccgcaaaugcagacacauuauguauagguuaucaugcgaacaauucaacagacacuguagacacaguacuagaaaagaauguaacaguaacacacucuguuaaccuucuagaagacaagcauaacgggaaacuaugcaaacuaagagggguagccccauugcauuuggguaaauguaacauugcuggcuggauccugggaaauccagagugugaaucacucuccacagcaagcucaugguccuacauuguggaaacaucuaguucagacaauggaacguguuacccaggagauuucaucgauuaugaggagcuaagagagcaauugagcucagugucaucauuugaaagguuugagauauuccccaagacaaguucauggcccaaucaugacucgaacaaagguguaacggcagcauguccacaugcuggagcaaaaagcuucuacaaaaauuuaauauggcuaguuaaaaaaggaaauucauacccaaagcucagcaaauccuacauuaaugauaaagggaaagaaguccucgugcuauggggcauucaccauccaucuaccagugcugaccaacaaagucucuaucagaaugcagaugcauauguuuuuguggggacaucaagauacagcaagaaguucaagccggaaauagcaauaagacccaaagugagggaucaagaagggagaaugaacuauuacuggacacuaguagagccgggagacaaaauaacauucgaagcaacuggaaaucuagugguaccgagauaugcauucgcaauggaaagaaaugcuggaucugguauuaucauuucagauacaccaguccacgauugcaauacaacuugucagacacccaagggugcuauaaacaccagccucccauuucagaauauacauccgaucacaauuggaaaauguccaaaauauguaaaaagcacaaaauugagacuggccacaggauugaggaaugucccgucuauucaaucuagaggccuauuuggggccauugccgguuucauugaagggggguggacagggaugguagauggaugguacgguuaucaccaucaaaaugagcaggggucaggauaugcagccgaccugaagagcacacagaaugccauugacgagauuacuaacaaaguaaauucugucauugaaaagaugaauacacaguucacagcaguagguaaagaguucaaccaccuggaaaaaagaauagagaauuuaaauaaaaaaauugaugaugguuuccuggacauuuggacuuacaaugccgaacuguugguucuauuggaaaaugaaagaacuuuggacuaccacgauucaaaugugaagaacuuauaugaaaagguaagaagccaguuaaaaaacaaugccaaggaaauuggaaacggcugcuuugaauuuuaccacaaaugcgauaacacgugcauggaaagugucaaaaaugggacuuaugacuacccaaaauacucagaggaagcaaaauuaaacagagaagaaauagaugggguaaagcuggaaucaacaaggauuuaccagauuuuggcgaucuauucaacugucgccaguucauugguacugguagucucccugggggcaaucaguuucuggaugugcucuaaugggucucuacaguguagaauauguauuuaa

SEQ ID NO: 41194 - RNA, 1701 nt, Artificial Sequence
  derived and/or modified CDS sequence (wt) from hemagglutinin__InfluenzaA__AFN17441
augaaggcaauacuaguaguucugcuauauacauuugcaaccgcaaaugcagacacauuauguauagguuaucaugcgaacaauucaacagacacuguagacacaguacuagaaaagaauguaacaguaacacacucuguuaaccuucuagaagacaagcauaacgggaaacuaugcaaacuaagagggguagccccauugcauuuggguaaauguaacauugcuggcuggauccugggaaauccagagugugaaucacucuccaaagcaagcucaugguccuacauuguggaaacaucuaguucagacaauggaacguguuacccaggagauuucaucgauuaugaggagcuaagagagcaauugagcucagugucaucauuugaaagguuugagauauuccccaagacaaguucauggcccaaucaugacucgaacaaagguguaacggcagcauguccucaugcuggagcaaaaagcuucuacaaaaauuuaauauggcuaguuaaaaaaggaaauucauacccaaagcucagcaaauccuacauuaaugauaaagggaaagaaguccucgugcuauggggcauucaccauccaucuacuagugcugaccaacaaagucucuaucagaaugcagaugcauauguuuuuguggggacaucaagauacagcaagaaguucaagccggaaauagcaauaagacccaaagugagggaucaagaagggagaaugaacuauuacuggacacuaguagagccgggagacaaaauaacauucgaagcaacuggaaaucuagugguaccgagauaugcauucgcaauggaaagaaaugcuggaucugguauuaucauuucagauacaccaguccacgauugcaauacaacuugucagacacccaagggugcuauaaacaccagccucccauuucagaauauacauccgaucacaauuggaaaauguccaaaauauguaaaaagcacaaaauugagacuggccacaggauugaggaaugucccgucuauucaaucuagaggccuauuuggggccauugccgguuucauugaagggggguggacagggaugguagauggaugguacgguuaucaccaucaaaaugagcaggggucaggauaugcagccgaccugaagagcacacagaaugccauugacgagauuacuaacaaaguaaauucuguuauugaaaagaugaauacacaguucacagcaguagguaaagaguucaaccaccuggaaaaaagaauagagaauuuaaauaaaaaaguugaugaugguuuccuggacauuuggacuuacaaugccgaacuguugguucuauuggaaaaugaaagaacuuuggacuaccacgauucaaaugugaagaacuuauaugaaaagguaagaagccaguuaaaaaacaaugccaaggaaauuggaaacggcugcuuugaauuuuaccacaaaugcgauaacacgugcauggaaagugucaaaaaugggacuuaugacuacccaaaauacucagaggaagcaaaauuaaacagagaagaaauagaugggguaaagcuggaaucaacaaggauuuaccagauuuuggcgaucuauucaacugucgccaguucauugguacugguagucucccugggggcaaucaguuucuggaugugcucuaaugggucucuacaguguagaauauguauuuaa

SEQ ID NO: 41195 - RNA, 1701 nt, Artificial Sequence; identical to SEQ ID NO: 40447
  derived and/or modified CDS sequence (wt) from hemagglutinin__InfluenzaA__AFN17451

SEQ ID NO: 41196 - RNA, 1701 nt, Artificial Sequence; identical to SEQ ID NO: 35523
  derived and/or modified CDS sequence (wt) from hemagglutinin__InfluenzaA__AFN17467

SEQ ID NO: 41197 - RNA, 1701 nt, Artificial Sequence; identical to SEQ ID NO: 38118
  derived and/or modified CDS sequence (wt) from hemagglutinin__InfluenzaA__AFN17477

SEQ ID NO: 41198 - RNA, 1701 nt, Artificial Sequence
  derived and/or modified CDS sequence (wt) from hemagglutinin__InfluenzaA__AFN17487
augaaggcaauacuaguaguucugcuauauacauuugcaaccgcaaaugcagacacauuauguauagguuaucaugcgaacaauucaacagacacuguagacacaguacuagaaaagaauguaacaguaacacacucuguuaaccuucuagaagacaagcauaacgggaaacuaugcaaacuaagagggguagccccauugcauuuggguaaauguaacauugcuggcuggauccugggaaauccagagugugaaucacucuccacagcaagcucaugguccuacauuguggaaacaucuaguucagacaauggaacguguuacccaggagauuucaucgauuaugaggagcuaagagagcaauugagcucagugucaucauuugaaagguuugagauauuccccaagacaaguucauggcccaaucaugacucgaacaaagguguaacggcagcauguccucaugcuggagcaaaaagcuucuacaaaaauuuaauauggcuaguuaaaaaaggaaauucauacccaaagcucagcaaauccuacauuaaugauaaagggaaagaaguccucgugcuauggggcauucaccauccaucuacuagugcugaccaacaaagucucuaucagaaugcagaugcauauguuuuuguggggacaucaagauacagcaagaaguucaagccggaaauagcaauaagacccaaagugagggaucaagaagggagaaugaacuauuacuggacacuaguagagccgggagacaaaauaacauucgaagcaacuggaaaucuagugguaccgagauaugcauucgcaaugguaagaaaugcuggaucugguauuaucauuucagauacaccaguccacgauugcaauacaacuugucagacacccaagggugcuauaaacaccagccucccauuucagaauauacauccgaucacaauuggaaaauguccaaaauauguaaaaagcacaaaauugagacuggccaccggauugaggaaugucccgucuauucaaucuagaggccuauuuggggccauugccgguuucauugaagggggguggacagggaugguagauggaugguacgguuaucaccaucaaaaugagcaggggucaggauaugcagccgaccugaagagcacacagaaugccauugacgagauuacuaacaaaguaaauucuguuauugaaaagaugaauacacaguucacagcaguagguaaagaguucaaccaccuggaaaaaagaauagagaauuuaaauaaaaaaguugaugaugguuuccuggacauuuggacuuacaaugccgaacuguugguucuauuggaaaaugaaagaacuuuggacuaccacgauucaaaugugaagaacuuauaugaaaagguaagaagccaguuaaaaaacaaugccaaggaaauuggaaacggcugcuuugaauuuuaccacaaaugcgauaacacgugcauggaaagugucaaaaaugggacuuaugacuacccaaaauacucagaggaagcaaaauuaaacagagaagaaauagaugggguaaagcuggaaucaacaaggauuuaccagauuuuggcgaucuauucaacugucgccaguucauugguacugguagucucccugggggcaaucaguuuuuggaugugcucuaaugggucucuacaguguagaauauguauuuaa

SEQ ID NO: 41199 - RNA, 1701 nt, Artificial Sequence
  derived and/or modified CDS sequence (wt) from hemagglutinin__InfluenzaA__AFN17497
augaaggcaauacuaguaguucugcuauauacauuugcaaccgcaaaugcagacacauuauguauagguuaucaugcgaacaauucaacagacacuguagacacaguacuagaaaagaauguaacaguaacacacucuguuaaccuucuagaagacaagcauaacgggaaacuaugcaaacuaagagggguagccccauugcauuuggguaaauguaacauugcuggcuggauccugggaaauccagagugugaaucacucuccacagcaagcucaugguccuacauuguggaaacaucuaguucagacaauggaacguguuacccaggagauuucaucgauuaugaggagcuaagagagcaauugagcucagugucaucauuugaaagguuugagauauuccccaagacaaguucauggcccaaucaugacucgaacaaagguguaacggcagcauguccucaugcuggagcaaaaagcuucuacaaaaauuuaauauggcuaguuaaaaaaggaaauucauacccaaagcucagcaaauccuacauuaaugauaaagggaaagaaguccucgugcuauggggcauucaccauccaucuacuagugcugaccaacaaagucucuaucagaaugcagaugcauauguuuuuguggggacaucaagauacagcaagaaguucaagccggaaauagcaauaagacccaaagugagggaucaagaagggagaaugaacuauuacuggacacuaguagagccgggagacaaaauaacauucgaagcaacuggaaaucuagugguaccgagauaugcauucgcaauggaaagaaaugcuggaucugguauuaucauuucagauacaccaguccacgauugcaauacaacuugucagacacccaagggugcuauaaacaccagccucccauuucagaauauacauccgaucacaauuggaaaauguccaaaauauguaaaaagcacaaaauugagacuggccacaggauugaggaaugucccgucuauucaaucuagaggccuauuuggggccauugccgguuuuauugaagggggguggacagggaugguagauggaugguacgguuaucaccaucaaaaugagcaggggucaggauaugcagccgaccugaagagcacacagaaugccauugacgagauuacuaacaaaguaaauucuguuauugaaaagaugaauacacaguucacagcaguagguaaagaguucaaccaccuggaaaaaagaauagagaauuuaaauaaaaaaguugaugaugguuuccuggacauuuggacuuacaaugccgaacuguugguucuauuggaaaaugaaagaacuuuggacuaccacgauucaaaugugaagaacuuauaugaaaagguaagaagccaguuaaaaaacaaugccaaggaaauuggaaacgguugcuuugaauuuuaccacaaaugcgauaacacgugcauggaaagugucaaaaaugggacuuaugacuacccaaaauacucagaggaagcaaaauuaaacagagaagaaauagaugggguaaagcuggaaucaacaaggauuuaccagauuuuggcgaucuauucaacugucgccaguucauugguacugguagucucccugggggcaaucaguuucuggaugugcucuaaugggucucuacaguguagaauauguauuuaa

SEQ ID NO: 41200 - RNA, 1701 nt, Artificial Sequence; identical to SEQ ID NO: 34681
  derived and/or modified CDS sequence (wt) from hemagglutinin__InfluenzaA__AFN17507

SEQ ID NO: 41201 - RNA, 1701 nt, Artificial Sequence; identical to SEQ ID NO: 35523
  derived and/or modified CDS sequence (wt) from hemagglutinin__InfluenzaA__AFN17517

SEQ ID NO: 41202 - RNA, 1701 nt, Artificial Sequence; identical to SEQ ID NO: 35542
  derived and/or modified CDS sequence (wt) from hemagglutinin__InfluenzaA__AFN17527

SEQ ID NO: 41203 - RNA, 1701 nt, Artificial Sequence; identical to SEQ ID NO: 34681
  derived and/or modified CDS sequence (wt) from hemagglutinin__InfluenzaA__AFN17537

SEQ ID NO: 41204 - RNA, 1701 nt, Artificial Sequence; identical to SEQ ID NO: 36785
  derived and/or modified CDS sequence (wt) from hemagglutinin__InfluenzaA__AFN17547

SEQ ID NO: 41205 - RNA, 1701 nt, Artificial Sequence; identical to SEQ ID NO: 36212
  derived and/or modified CDS sequence (wt) from hemagglutinin__InfluenzaA__AFN17557

SEQ ID NO: 41206 - RNA, 1701 nt, Artificial Sequence; identical to SEQ ID NO: 35523
  derived and/or modified CDS sequence (wt) from hemagglutinin__InfluenzaA__AFN17567

SEQ ID NO: 41207 - RNA, 1701 nt, Artificial Sequence; identical to SEQ ID NO: 36785
  derived and/or modified CDS sequence (wt) from hemagglutinin__InfluenzaA__AFN17574

SEQ ID NO: 41208 - RNA, 1701 nt, Artificial Sequence
  derived and/or modified CDS sequence (wt) from hemagglutinin__InfluenzaA__AFN17580
augaaggcaauacuaguaguucugcuauauacauuugcaaccgcaaaugcagacacauuauguauagguuaucaugcgaacaauucaacagacacuguagacacaguacuagaaaagaauguaacaguaacacacucuguuaaccuucuagaagacaagcauaacgggaaacuaugcaaacuaagagggguagccccauugcauuuggguaaauguaacauugcuggcuggauccugggaaauccagagugugaaucacucuccacagcaagcucaugguccuacauuguggaaacaucuaguucagacaauggaacguguuacccaggagauuucaucgauuaugaggagcuaagagagcaauugagcucagugucaucauuugaaagguuugagauauuccccaagacaaguucauggcccaaucaugacucgaacaaagguguaacggcagcauguccucaugcuggagcaaaaagcuucuacaaaaauuuaauauggcuaguuaaaaaaggaaauucauacccaaagcucagcaaauccuacauuaaugauaaagggaaagaaguccucgugcuauggggcauucaccauccaucuacuagugcugaccaacaaagucucuaucagaaugcagaugcauauguuuuuguggggacaucaagauacagcaagaaguucaagccggaaauagcaauaagacccaaagugagggaucaagaagggagaaugaacuauuacuggacacuaguagagccgggagacaaaauaacauucgaagcaacuggaaaucuagugguaccgagauaugcauucgcaauggaaagaaaugcuggaucugguauuaucauuucagauacaccaguccacgauugcaauacaacuugucagacacccaagggugcuauaaacaccagccucccauuucagaauauacauccgaucacaauuggaaaauguccaaaauauguaaaaagcacaaaauugagacuggccacaggauugaggaaugucccgucuauucaaucuagaggccuauuuggagccauugccgguuucauugaagggggguggacagggaugguagauggaugguacgguuaucaccaucaaaaugagcaggggucaggauaugcagccgaccugaagagcacacagaaugccauugacgagauuacuaacaaaguaaauucuguuauugaaaagaugaauacacaguucacagcaguagguaaagaguucaaccaccuggaaaaaagaauagagaauuuaaauaaaaaaguugaugaugguuuccuggacauuuggacuuacaaugccgaacuguugguucuauuggaaaaugaaagaacuuuggacuaccacgauucaaaugugaagaacuuauaugaaaagguaagaagccaguuaaaaaacaaugccaaggaaauuggaaacggcugcuuugaauuuuaccacaaaugcgauaacacgugcauggaaagugucaaaaaugggacuuaugacuacccaaaauacucagaggaagcaaaauuaaacagagaagaaauagaugggguaaagcuggaaucaacaaggauuuaccagauuuuggcgaucuauucaacugucgccaguucauugguacugguagucucccugggggcaaucaguuucuggaugugcucuaaugggucucuacaguguagaauauguauuuaa

SEQ ID NO: 41209 - RNA, 1701 nt, Artificial Sequence; identical to SEQ ID NO: 34681
  derived and/or modified CDS sequence (wt) from hemagglutinin__InfluenzaA__AFN17586

SEQ ID NO: 41210 - RNA, 1701 nt, Artificial Sequence; identical to SEQ ID NO: 35542
  derived and/or modified CDS sequence (wt) from hemagglutinin__InfluenzaA__AFN17595

SEQ ID NO: 41211 - RNA, 1701 nt, Artificial Sequence; identical to SEQ ID NO: 34681
  derived and/or modified CDS sequence (wt) from hemagglutinin__InfluenzaA__AFN17605

SEQ ID NO: 41212 - RNA, 1701 nt, Artificial Sequence; identical to SEQ ID NO: 34681
  derived and/or modified CDS sequence (wt) from hemagglutinin__InfluenzaA__AFN17615

SEQ ID NO: 41213 - RNA, 1701 nt, Artificial Sequence; identical to SEQ ID NO: 34681
  derived and/or modified CDS sequence (wt) from hemagglutinin__InfluenzaA__AFN17625

SEQ ID NO: 41214 - RNA, 1701 nt, Artificial Sequence; identical to SEQ ID NO: 34681
  derived and/or modified CDS sequence (wt) from hemagglutinin__InfluenzaA__AFN17635

SEQ ID NO: 41215 - RNA, 1701 nt, Artificial Sequence
  derived and/or modified CDS sequence (wt) from hemagglutinin__InfluenzaA__AFN17645
augaaggcaauacuaguaguucugcuauauacauuugcaaccgcaaaugcagacacauuauguauagguuaucaugcgaacaauucaacagacacuguagacacaguacuagaaaagaauguaacaguaacacacucuguuaaccuucuagaagacaagcauaacgggaaacuaugcaaacuaagagggguagccccauugcauuuggguaaauguaacauugcuggcuggauccugggaaauccagagugugaaucacucuccacagcaagcucaugguccuacauuguggaaacaucuaguucagacaauggaacguguuacccaggagauuucaucgauuaugaggagcuaagagagcaauugagcucagugucaucauuugaaaggguugagauauuccccaagacaaguucauggcccaaucaugacucgaacaaagguguaacggcagcauguccucaugcuggagcaaaaagcuucuacaaaaauuuaauauggcuaguuaaaaaaggaaauucauacccaaagcucagcaaauccuacauuaaugauaaagggaaagaaguccucgugcuauggggcauucaccauccaucuacuagugcugaccaacaaagucucuaucagaaugcagaugcauauguuuuuguggggacaucaagauacagcaagaaguucaagccggaaauagcaauaagacccaaagugagggaucaagaagggagaaugaacuauuacuggacacuaguagagccgggagacaaaauaacauucgaagcaacuggaaaucuagugguaccgagauaugcauucgcaauggaaagaaaugcuggaucugguauuaucauuucagauacaccaguccacgauugcaauacaacuugucagacacccaagggugcuauaaacaccagccucccauuucagaauauacauccgaucacaauuggaaaauguccaaaauauguaaaaagcacaaaauugagacuggccacaggauugaggaaugucccgucuauucaaucuagaggccuauuuggggccauugccgguuucauugaagggggguggacagggaugguagauggaugguacgguuaucaccaucaaaaugagcaggggucaggauaugcagccgaccugaagagcacacagaaugccauugacgagauuacuaacaaaguaaauucuguuauugaaaagaugaauacacaguucacagcaguagguaaagaguucaaccaccuggaaaaaagaauagagaauuuaaauaaaaaaguugaugaugguuuccuggacauuuggacuuacaaugccgaacuguugguucuauuggaaaaugaaagaacuuuggacuaccacgauucaaaugugaagaacuuauaugaaaagguaagaagccaguuaaaaaacaaugccaaggaaauuggaaacggcugcuuugaauuuuaccacaaaugcgauaacacgugcauggaaagugucaaaaaugggacuuaugacuacccaaaauacucagaggaagcaaaauuaaacagagaagaaauagaugggguaaagcuggaaucaacaaggauuuaccagauuuuggcgaucuauucaacugucgccaguucauugguacugguagucucccugggggcaaucaguuucuggaugugcucuaaugggucucuacaguguagaauauguauuuaa

SEQ ID NO: 41216 - RNA, 1701 nt, Artificial Sequence; identical to SEQ ID NO: 35542
  derived and/or modified CDS sequence (wt) from hemagglutinin__InfluenzaA__AFN17655

SEQ ID NO: 41217 - RNA, 1701 nt, Artificial Sequence; identical to SEQ ID NO: 35542
  derived and/or modified CDS sequence (wt) from hemagglutinin__InfluenzaA__AFN17665

SEQ ID NO: 41218 - RNA, 1701 nt, Artificial Sequence
  derived and/or modified CDS sequence (wt) from hemagglutinin__InfluenzaA__AFN17675
augaaggcaauacuaauaguucugcuauauacauuugcaaccgcaaaugcagacacauuauguauagguuaucaugcgaacaauucaacagacacuguagacacaguacuagaaaagaauguaacaguaacacacucuguuaaccuucuagaagacaagcauaacgggaaacuaugcaaacuaagagggguagccccauugcauuuggguaaauguaacauugcuggcuggauccugggaaauccagagugugaaucacucuccacagcaagcucaugguccuacauuguggaaacaucuaguucagacaauggaacguguuacccaggagauuucaucgauuaugaggagcuaagagagcaauugagcucagugucaucauuugaaagguuugagauauuccccaagacaaguucauggcccaaucaugacucgaacaaagguguaacggcagcauguccucaugcuggagcaaaaagcuucuacaaaaauuuaauauggcuaguuaaaaaaggaaauucauacccaaagcucagcgaauccuacauuaaugauaaagggaaagaaguccucgugcuauggggcauucaccauccaucuacuagugcugaccaacaaagucucuaucagaaugcagaugcauauguuuuuguggggacaucaagauacagcaagaaguucaagccggaaauagcaauaagacccaaagugagggaucaagaagggagaaugaacuauuacuggacacuaguagagccgggagacaaaauaacauucgaagcaacuggaaaucuagugguaccgagauaugcauucgcaauggaaagaaaugcuggaucugguauuaucauuucagauacaccaguccacgauugcaauacaacuugucagacacccaagggugcuauaaacaccagccucccauuucagaauauacauccgaucacaauuggaaaauguccaaaauauguaaaaagcacaaaauugagacuggccacaggauugaggaaugucccgucuauucaaucuagaggccuauuuggggccauugccgguuuuauugaagggggguggacagggaugguagauggaugguacgguuaucaccaucaaaaugagcaggggucaggauaugcagccgaccugaagagcacacagaaugccauugacgagauuacuaacaaaguaaauucuguuauugaaaagaugaauacacaguucacagcaguagguaaagaguucaaccaccuggaaaaaagaauagagaauuuaaauaaaaaaguugaugaugguuuccuggacauuuggacuuacaaugccgaacuguugguucuauuggaaaaugaaagaacuuuggacuaccacgauucaaaugugaagaacuuauaugaaaagguaagaagccaguuaaaaaacaaugccaaggaaauuggaaacggcugcuuugaauuuuaccacaaaugcgauaacacgugcauggaaagugucaaaaaugggacuuaugacuacccaaaauacucagaggaagcaaaauuaaacagagaagaaauagaugggguaaagcuggaaucaacaaggauuuaccagauuuuggcgaucuauucaacugucgccaguucauugguacugguagucucccugggggcaaucaguuucuggaugugcucuaaugggucucuacaguguagaauauguauuuaa

SEQ ID NO: 41219 - RNA, 1701 nt, Artificial Sequence
  derived and/or modified CDS sequence (wt) from hemagglutinin__InfluenzaA__AFN17685
augaaggcaauacuaguaguucugcuauauacauuugcaaccgcaaaugcagacacauuauguauagguuaucaugcgaacaauucaacagacacuguagacacaauacuagaaaagaauguaacaguaacacacucuguuaaccuucuagaagacaagcauaacgggaaacuaugcaaacuaagagggguagccccauugcauuuggguaaauguaacauugcuggcuggauccugggaaauccagagugugaaucacucuccacagcaagcucaugguccuacauuguggaaacaucuaguucagacaauggaacguguuacccaggagauuucaucgauuaugaggagcuaagagagcaauugagcucagugucaucauuugaaagguuugagauauuccccaagacaaguucauggcccaaucaugacucgaacaaagguguaacggcagcauguccucaugcuggagcaaaaagcuucuacaaaaauuuaauauggcuaguuaaaaaaggaaauucauacccaaagcucagcaaauccuacauuaaugauaaagggaaagaaguccucgugcuauggggcauucaccauccaucuacuagugcugaccaacaaagucucuaucagaaugcagaugcauauguuuuuguggggacaucaagauacagcaagaaguucaagccggaaauagcaauaagacccaaagugagggaucaagaagggagaaugaacuauuacuggacacuaguagagccgagagacaaaauaacauucgaagcaacuggaaaucuagugguaccgagauaugcauucgcaauggaaagaaaugcuggaucugguauuaucauuucagauacaccaguccacgauugcaauacaacuugucagacacccaagggugcuauaaacaccagccucccauuucagaauauacauccgaucacaauuggaaaauguccaaaauauguaaaaagcacaaaauugagacuggccacaggauugaggaaugucccgucuauucaaucuagaggccuauuuggggccauugccgguuucauugaagggggguggacagggaugguagauggaugguacgguuaucaccaucaaaaugagcaggggucaggauaugcagccgaccugaagagcacacagaaugccauugacgagauuacuaacaaaguaaauucuguuauugaaaagaugaauacacaguucacagcaguagguaaagaguucaaccaccuggaaaaaagaauagagaauuuaaauaaaaaaguugaugaugguuuccuggacauuuggacuuacaaugccgaacuguugguucuauuggaaaaugaaagaacuuuggacuaccacgauucaaaugugaagaacuuauaugaaaagguaagaagccaguuaaaaaacaaugccaaggaaauuggaaacggcugcuuugaauuuuaccacaaaugcgauaacacgugcauggaaagugucaaaaaugggacuuaugacuacccaaaauacucagaggaagcaaaauuaaacagagaagaaauagaugggguaaagcuggaaucaacaaggauuuaccagauuuuggcgaucuauucaacugucgccaguucauugguacugguagucucccugggggcaaucaguuucuggaugugcucuaaugggucucuacaguguagaauauguauuuaa

SEQ ID NO: 41220 - RNA, 1701 nt, Artificial Sequence; identical to SEQ ID NO: 34681
  derived and/or modified CDS sequence (wt) from hemagglutinin__InfluenzaA__AFN17695

SEQ ID NO: 41221 - RNA, 1701 nt, Artificial Sequence
  derived and/or modified CDS sequence (wt) from hemagglutinin__InfluenzaA__AFN17705
augaaggcaauacuaguaguucugcuauauacauuugcaaccgcaaaugcagacacauuauguauagguuaucaugcgaacaauucaacagacacuguagacacaguacuagaaaagaauguaacaguaacacacucuguuaaccuucuagaagacaagcauaacgggaaacuaugcaaacuaagagggguagccccauugcauuuggguaaauguaacauugcuggcuggauccugggaaauccagagugugaaucacucuccacagcaagcucaugguccuacauuguggaaacaucuaguucagacaauggaacguguuacccaggagauuucaucgauuaugaggagcuaagagagcaauugagcucagugucaucauuugaaagguuugagauauuccccaagacaaguucauggcccaaucaugacucgaacaaagguguaacggcagcauguccucaugcuggagcaaaaagcuucuacaaaaauuuaauauggcuaguuaaaaaaggaaauucauacccaaagcucagcaaauccuacauuaaugauaaagggaaagaaguccucgugcuauggggcauucaccauccaucuacuagugcugaccaacaaagucucuaucagaaugcagaugcauauguuuuuguggggacaucaagauacagcaagaaguucaagccggaaauagcaauaagacccaaagugagggaucaagaagggagaaugaacuauuacuggacacuaguagagccgggagacaaaauaacauucgaagcaacuggaaaucuagugguaccgagauaugcauucgcaauggaaagaaaugcuggaucugguauuaucauuucagauacaccaguccacgauugcaauacaacuugucagacacccaagggugcuauaaacaccagccucccauuucagaauauacauccgaucacaauuggaaaauguccaaaauauguaaaaagcacaaaauugagacuggccacaggauugaggaaugucccgucuauucaaucuagaggccuauuuggggccauugccgguuucauugaaggggguuggacagggaugguagauggaugguacgguuaucaccaucaaaaugagcaggggucaggauaugcagccgaccugaagagcacacagaaugccauugacgagauuacuaacaaaguaaauucuguuauugaaaagaugaauacacaguucacagcaguagguaaagaguucaaccaccuggaaaaaagaauagagaauuuaaauaaaaaaguugaugaugguuuccuggacauuuggacuuacaaugccgaacuguugguucuauuggaaaaugaaagaacuuuggacuaccacgauucaaaugugaaaaacuuauaugaaaagguaagaagccaguuaaaaaacaaugccaaggaaauuggaaacggcugcuuugaauuuuaccacaaaugcgauaacacgugcauggaaagugucaaaaaugggacuuaugacuacccaaaauacucagaggaagcaaaauuaaacagagaagaaauagaugggguaaagcuggaaucaacaaggauuuaccagauuuuggcgaucuauucaacugucgccaguucauugguacugguagucucccugggggcaaucaguuucuggaugugcucuaaugggucucuacaguguagaauauguauuuaa

SEQ ID NO: 41222 - RNA, 1701 nt, Artificial Sequence
  derived and/or modified CDS sequence (wt) from hemagglutinin__InfluenzaA__AFN17715
augaaggcaauacuaguaguucugcuauauacauuugcaaccgcaaaugcagacacauuauguauagguuaucaugcgaacaauucaacagacacuguagacacaguacuagaaaagaauguaacaguaacacacucuguuaaccuucuagaagacaagcauaacgggaaacuaugcaaacuaagagggguagccccauugcauuuggguaaauguaacauugcuggcuggauccugggaaauccagagugugaaucacucuccacagcaagcucaugguccuacauuguggaaacaucuaguucagacaauggaacguguuacccaggagauuucaucgauuaugaggagcuaagagagcaauugagcucagugucaucauuugaaagguuugagauauuccccaagacaaguucauggcccaaucaugacucgaacaaagguguaacggcagcauguccucaugcuggagcaaaaagcuucuacaaaaauuuaauauggcuaguuaaaaaaggaaauucauacccaaagcucagcaaauccuacauuaaugauaaagggaaagaaguccucgugcuauggggcauucaccauccaucuacuagugcugaccaacaaagucucuaucagaaugcagaugcauauguuuuuguggggacaucaagauacagcaagaaauucaagccggaaauagcaauaagacccaaagugagggaucaagaagggagaaugaacuauuacuggacacuaguagagccgggagacaaaauaacauucgaagcaacuggaaaucuagugguaccgagauaugcauucgcaauggaaagaaaugcuggaucugguauuaucauuucagauacaccaguccacgauugcaauacaacuugucagacacccgaaggugcuauaaacaccagccucccauuucagaauauacauccgaucacaauuggaaaauguccaaaauauguaaaaagcacaaaauugagacuggccacaggauugaggaaugucccgucuauucaaucuagaggccuauuuggggccauugccgguuucauugaagggggguggacagggaugguagauggaugguacgguuaucaccaucaaaaugagcaggguucaggauaugcagccgaccugaagagcacacagaaugccauugacgagauuacuaacaaaguaaauucuguuauugaaaagaugaauacacaguucacagcaguagguaaagaguucaaccaccuggaaaaaagaauagagaauuuaaauaaaaaaguugaugaugguuuccuggacauuuggacuuacaaugccgaacuguugguucuauuggaaaaugaaagaacuuuggacuaccacgauucaaaugugaagaacuuauaugaaaagguaagaagccaguuaaaaaacaaugccaaggaaauuggaaacggcugcuuugaauuuuaccacaaaugcgauaacacgugcauggaaagugucaaaaaugggacuuaugacuacccaaaauacucagaggaagcaaaauuaaacagagaagaaauagaugggguaaagcuggaaucaacaaggauuuaccagauuuuggcgaucuauucaacugucgccaguucauugguacugguagucucccugggggcaaucaguuucuggaugugcucuaaugggucucuacaguguagaauauguauuuaa

SEQ ID NO: 41223 - RNA, 1701 nt, Artificial Sequence
  derived and/or modified CDS sequence (wt) from hemagglutinin__InfluenzaA__AFN17725
augaaggcaauacuaguaguucugcuauauacauuugcaaccgcaaaugcagacacauuauguauagguuaucaugcgaacaauucaacagacacuguagacacaguacuagaaaagaauguaacaguaacacacucuguuaaccuucuagaagacaagcauaacgggaaacuaugcaaacuaagagggguagccccauugcauuuggguaaauguaacauugcuggcuggauccugggaaauccagagugugaaucacucuccacagcaagcucaugguccuacauuguggaaacaucuaguucagacaauggaacguguuacccaggagauuucaucgauuaugaggagcuaagagagcaauugagcucagugucaucauuugaaagguuugagauauuccccaagacaaguucauggcccaaucaugacucgaacaaagguguaacggcagcauguccucaugcuggagcaaaaagcuucuacaaaaauuuaauauggcuaguuaaaaaaggaaauucauacccaaagcucagcaaauccuacauuaaugauaaagggaaagaaguccucgugcuauggggcauucaccauccaucuacuagugcugaccaacaaagucucuaucagaaugcagaugcauauguuuuuguggggacaucaagauacagcaagaaguucaagccggaaauagcaauaagaccccaagugagggaucaagaagggagaaugaacuauuacuggacacuaguagagccgggagacaaaauaacauucgaagcaacuggaaaucuagugguaccgagauaugcauucgcaauggaaagaaaugcuggaucugguauuaucauuucagauacaccaguccacgauugcaauacaacuugucagacacccaagggugcuauaaacaccagccucccauuucagaauauacauccgaucacaauuggaaaauguccaaaauauguaaaaagcacaaaauugagacuggccacaggauugaggaaugucccgucuauucaaucuagaggccuauuuggggccauugccgguuucauugaagggggguggacagggaugguagauggaugguacgguuaucaccaucaaaaugagcaggggucaggauaugcagccgaccugaagagcacacagaaugccauugacgagauuacuaacaaaguaaauucuguuauugaaaagaugaauacacaguucacagcaguagguaaagaguucaaccaccuggaaaaaagaauagagaauuuaaauaaaaaaguugaugaugguuuccuggacauuuggacuuacaaugccgaacuguugguucuauuggaaaaugaaagaacuuuggacuaccacgauucaaaugugaagaacuuauaugaaaagguaagaagccaguuaaaaaacaaugccaaggaaauuggaaacggcugcuuugaauuuuaccacaaaugcgauaacacgugcauggaaagugucaaaaaugggacuuaugacuacccaaaauacucagaggaagcaaaauuaaacagagaagaaauagaugggguaaagcuggaaucaacaaggauuuaccagauuuuggcgaucuauucaacugucgccaguucauugguacugguagucucccugggggcaaucaguuucuggaugugcucuaaugggucucuacaguguagaauauguauuuaa

SEQ ID NO: 41224 - RNA, 1701 nt, Artificial Sequence; identical to SEQ ID NO: 35311
  derived and/or modified CDS sequence (wt) from hemagglutinin__InfluenzaA__AFN17735

SEQ ID NO: 41225 - RNA, 1701 nt, Artificial Sequence; identical to SEQ ID NO: 34681
  derived and/or modified CDS sequence (wt) from hemagglutinin__InfluenzaA__AFN17742

SEQ ID NO: 41226 - RNA, 1701 nt, Artificial Sequence; identical to SEQ ID NO: 38241
  derived and/or modified CDS sequence (wt) from hemagglutinin__InfluenzaA__AFN17748

SEQ ID NO: 41227 - RNA, 1701 nt, Artificial Sequence; identical to SEQ ID NO: 35509
  derived and/or modified CDS sequence (wt) from hemagglutinin__InfluenzaA__AFN17757

SEQ ID NO: 41228 - RNA, 1701 nt, Artificial Sequence; identical to SEQ ID NO: 41222
  derived and/or modified CDS sequence (wt) from hemagglutinin__InfluenzaA__AFN17767

SEQ ID NO: 41229 - RNA, 1701 nt, Artificial Sequence; identical to SEQ ID NO: 39691
  derived and/or modified CDS sequence (wt) from hemagglutinin__InfluenzaA__AFN17774

SEQ ID NO: 41230 - RNA, 1701 nt, Artificial Sequence; identical to SEQ ID NO: 34681
  derived and/or modified CDS sequence (wt) from hemagglutinin__InfluenzaA__AFN17783

SEQ ID NO: 41231 - RNA, 1701 nt, Artificial Sequence; identical to SEQ ID NO: 41222
  derived and/or modified CDS sequence (wt) from hemagglutinin__InfluenzaA__AFN17793

SEQ ID NO: 41232 - RNA, 1701 nt, Artificial Sequence
  derived and/or modified CDS sequence (wt) from hemagglutinin__InfluenzaA__AFN17803
augaaggcaauacuaguaguucugcuauauacauuugcaaccgcaaaugcagacacauuauguauagguuaucaugcgaacaauucaacagacacuguagacacaguacuagaaaagaauguaacaguaacacacucuguuaaccuucuagaagacaagcauaacgggaaacuaugcaaacuaagagggguagccccauugcauuuggguaaauguaacauugcuggcuggauccugggaaauccagagugugaaucacucuccacagcaagcucaugguccuacauuguggaaacaucuaguucagacaauggaacguguuacccaggagauuucaucgauuaugaggagcuaagagagcaauugaguucagugucaucauuugaaagguuugagauauuccccaagacaaguucauggcccaaucaugacucgaacaaagguguaacggcagcauguccucaugcuggagcaaaaagcuucuacaaaaauuuaauauggcuaguuaaaaaaggaaauucauacccaaagcucagcaaauccuacauuaaugauaaagggaaagaaguccucgugcuauggggcauucaccauccaucuacuagugcugaccaacaaagucucuaucagaaugcagaugcauauguuuuuguggggacaucaagauacagcaagaaguucaagccggaaauagcaauaagacccaaagugagggaucaagaagggagaaugaacuauuacuggacacuaguagagccgggagacaaaauaacauucgaagcaacuggaaaucuagugguaccgagauaugcauucgcaauggaaagaaaugcuggaucugguauuaucauuucagauacaccaguccacgauugcaauacaacuugucagacacccaagggugcuauaaacaccagccucccauuucagaauauacauccgaucacaauuggaaaauguccaaaauauguaaaaagcacaaaauugagacuggccacaggauugaggaaugucccgucuauucaaucuagaggccuauuuggggccauugccgguuucauugaaggaggguggacagggaugguagauggaugguacgguuaucaccaucaaaaugagcaggggucaggauaugcagccgaccugaagagcacacagaaugccauugacgagauuacuaacaaaguaaauucuguuauugaaaagaugaauacacaguucacagcaguagguaaagaguucaaccaccuggaaaaaagaauagagaauuuaaauaaaaaaguugaugaugguuuccuggacauuuggacuuacaaugccgaacuguugguucuauuggaaaaugaaagaacuuuggacuaccacgauucaaaugugaagaacuuauaugaaaagguaagaagccaguuaaaaaacaaugccaaggaaauuggaaacggcugcuuugaauuuuaccacaaaugcgauaacacgugcauggaaagugucaaaaaugggacuuaugacuacccaaaauacucagaggaagcaaaauuaaacagagaagaaauagaugggguaaagcuggaaucaacaaggauuuaccagauuuuggcgaucuauucaacugucgccaguucauugguacugguagucucccugggggcaaucaguuucuggaugugcucuaaugggucucuacaguguagaauauguauuuaa

SEQ ID NO: 41233 - RNA, 1701 nt, Artificial Sequence
  derived and/or modified CDS sequence (wt) from hemagglutinin__InfluenzaA__AFN17813
augaaggcaauacuaguaguucugcuauauacauuugcaaccgcaaaugcagacacauuauguauagguuaucaugcgaacaauucaacagacacuguagacacaguacuagaaaagaauguaacaguaacacacucuguuaaccuucuagaagacaagcauaacgggaaacuaugcaaacuaagagggguagccccauugcauuuggguaaauguaacauugcuggcuggauccugggaaauccagagugugaaucacucuccacagcaagcucaugguccuacauuguggaaacaucuaguucagacaauggaacguguuacccaggagauuucaucgauuaugaggagcuaagagagcaauugagcucagugucaucauuugaaagguuugagauauuccccaagacaaguucauggcccaaucaugacucgaacaaagguguaacggcagcauguccucaugcuggagcaaaaagcuucuacaaaaauuuaauauggcuaguuaaaaaaggaaauucauacccaaagcucagcaaauccuacauuaaugacaaagggaaagaaguccucgugcuauggggcauucaccauccaucuacuagugcugaccaacaaagucucuaucagaaugcagaugcauauguuuuuguggggacaucaagauacagcaagaaguucaagccggaaauagcaauaagacccaaagugagggaucaagaagggagaaugaacuauuacuggacacuaguagagccgggagacaaaauaacauucgaagcaacuggaaaucuagugguaccgagauaugcauucgcaauggaaagaaaugcuggaucugguauuaucauuucagauacaccaguccacgauugcaauacaacuugucagacacccaagggugcuauaaacaccagccucccauuucagaauauacauccgaucacaauuggaaaauguccaaaauauguaaaaagcacaaaauugagacuggccacaggauugaggaaugucccgucuauucaaucuagaggccuauuuggggccauugccgguuucauugaagggggguggacagggaugguagauggaugguacgguuaucaccaucaaaaugagcaggggucaggauaugcagccgaccugaagagcacacagaaugccauugacgagauuacuaacaaaguaaauucuguuauugaaaagaugaauacacaguucacagcaguagguaaagaguucaaccaccuggaaaaaagaauagagaauuuaaauaaaaaaguugaugaugguuuccuggacauuuggacuuacaaugccgaacuguugguucuauuggaaaaugaaagaacuuuggacuaccacgauucaaaugugaagaacuuauaugaaaagguaagaagccaguuaaaaaacaaugccaaggaaauuggaaacggcugcuuugaauuuuaccacaaaugcgauaacacgugcauggaaagugucaaaaaugggacuuaugacuacccaaaauacucagaggaagcaaaauuaaacagagaagaaauagaugggguaaagcuggaaucaacaaggauuuaccagauuuuggcgaucuauucaacugucgccaguucauugguacugguagucucccugggggcaaucaguuucuggaugugcucuaaugggucucuacaguguagaauauguauuuaa

SEQ ID NO: 41234 - RNA, 1701 nt, Artificial Sequence
  derived and/or modified CDS sequence (wt) from hemagglutinin__InfluenzaA__AFN17823
augaaggcaauacuaguaguucugcuauauacauuugcaaccgcaaaugcagacacauuauguauagguuaucaugcgaacaauucaacagacacuguagacacaguacuagaaaagaauguaacaguaacacacucuguuaaccuucuagaagacaagcauaacgggaaacuaugcaaacuaagagggguagccccauugcauuuggguaaauguaacauugcuggcuggauccugggaaauccagagugugaaucacucuccacagcaagcucaugguccuacauuguggaaacaucuaguucagacaauggaacgugcuacccaggagauuucaucgauuaugaggagcuaagagagcaauugagcucagugucaucauuugaaagguuugagauauuccccaagacaaguucauggcccaaucaugacucgaacaaagguguaacggcagcauguccucaugcuggagcaaaaagcuucuacaaaaauuuaauauggcuaguuaaaaaaggaaauucauacccaaagcucagcgaauccuacauuaaugauaaagggaaagaaguccucgugcuaugggguauucaccauccaucuacuagugcugaccaacaaagucucuaucagaaugcagaugcauauguuuuuguggggacaucaagauacagcaagaaguucaagccggaaauagcaauaagacccaaagugagggaucaagaagggagaaugaacuauuacuggacacuaguagagccgggagacaaaauaacauucgaagcaacuggaaaucuagugguaccgagauaugcauucgcaauggaaagaaaugcuggaucugguauuaucauuucagauacaccaguccacgauugcaauacaacuugucagacacccaagggugcuauaaacaccagccucccauuucagaauauacauccgaucacaauuggaaaauguccaaaauauguaaaaagcacaaaauugagacuggccacaggauugaggaaugucccgucuauucaaucuagaggccuauuuggggccauugccgguuucauugaagggggguggacagggaugguagauggaugguacgguuaucaccaucaaaaugagcaggggucaggauaugcagccgaccugaagagcacacagaaugccauugacgagauuacuaacaaaguaaauucuguuauugaaaagaugaauacacaguucacagcaguagguaaagaguucaaccaccuggaaaaaagaauagagaauuuaaauaaaaaaguugaugaugguuuccuggacauuuggacuuacaaugccgaacuguugguucuauuggaaaaugaaagaacuuuggacuaccacgauucaaaugugaagaacuuauaugaaaagguaagaagccaguuaaaaaacaaugccaaggaaauuggaaacggcugcuuugaauuuuaccacaaaugcgauaacacgugcauggaaagugucaaaaaugggacuuaugacuacccaaaauacucagaggaagcaaaauuaaacagagaagaaauagaugggguaaagcuggaaucaacaaggauuuaccagauuuuggcgaucuauucaacugucgccaguucauugguacugguagucucccugggggcaaucaguuucuggaugugcucuaaugggucucuacaguguagaauauguauuuaa

SEQ ID NO: 41235 - RNA, 1701 nt, Artificial Sequence
  derived and/or modified CDS sequence (wt) from hemagglutinin__InfluenzaA__AFN17833
augaaggcaauacuaguaguucugcuauauacauuugcaaccgcaaaugcagacacauuauguauagguuaucaugcgaacaauucaacagacacuguagacacaguacuagaaaagaauguaacaguaacacacucuguuaaccuucuagaagacaagcauaacgggaaacuaugcaaacuaagagggguagccccauugcauuuggguaaauguaacauugcuggcuggauccugggaaauccagagugugaaucacucuccacagcaagcucaugguccuacauuguggaaacaucuaguucagacaauggaacguguuacccaggagauuucaucgauuaugaggagcuaagagagcaauugagcucagugucaucauuugaaagguuugagauauuccccaagacaaguucauggcccaaucaugacucgaacaaagguguaacggcagcauguccuaaugcuggagcaaaaagcuucuacaaaaauuuaauauggcuaguuaaaaaaggaaauucauacccaaagcucagcaaauccuacauuaaugauaaagggaaagaaguccucgugcuauggggcauucaccauccaucuacuagugcugaccaacaaagucucuaucagaaugcagaugcauauguuuuuguggggacaucaagauacagcaagaaguucaagccggaaauagcaauaagacccaaagugagggaucaagaagggagaaugaacuauuacuggacacuaguagagccgggagacaaaauaacauucgaagcaacuggaaaucuagugguaccgagauaugcauucgcaauggaaagaaaugcuggaucugguauuaucauuucagauacaccaguccacgauugcaauacaacuugucagacacccaagggugcuauaaacaccagccucccauuucagaauauacauccgaucacaauuggaaaauguccaaaauauguaaaaagcacaaaauugagacuggccacaggauugaggaaugucccgucuauucaaucuagaggccuauuuggggccauugccgguuucauugaagggggguggacagggaugguagauggaugguacgguuaucaccaucaaaaugagcaggggucaggauaugcagccgaccugaagagcacacagaaugccauugacgagauuacuaacaaaguaaauucuguuauugaaaagaugaauacacaguucacagcaguagguaaagaguucaaccaccuggaaaaaagaauagagaauuuaaauaaaaaaguugaugaugguuuccuggacauuuggacuuacaaugccgaacuguugguucuauuggaaaaugaaagaacuuuggacuaccacgauucaaaugugaagaacuuauaugaaaagguaagaagccaguuaaaaaacaaugccaaggaaauuggaaacggcugcuuugaauuuuaccacaaaugcgauaacacgugcauggaaagugucaaaaaugggacuuaugacuacccaaaauacucagaggaagcaaaauuaaacagagaagaaauagaugggguaaagcuggaaucaacaaggauuuaccagauuuuggcgaucuauucaacugucgccaguucauugguacugguagucucccugggggcaaucaguuucuggaugugcucuaaugggucucuacaguguagaauauguauuuaa

SEQ ID NO: 41236 - RNA, 1701 nt, Artificial Sequence
  derived and/or modified CDS sequence (wt) from hemagglutinin__InfluenzaA__AFN17843
augaaggcaauacuaguaguucugcuauauacauuugcaaccgcaaaugcagacacauuauguauagguuaucaugcgaacaauucaacagacacuguagacacaguacuagaaaagaauguaacaguaacacacucuguuaaccuucuagaagacaagcauaacgggaaacuaugcaaacuaagagggguagccccauugcauuuggguaaauguaacauugcuggcuggauccugggaaauccagagugugaaucacucuccacagcaagcucaugguccuacauuguggaaacaucuaguucagacaauggaacguguuacccaggagauuucaucgauuaugaggagcuaagagagcaauugagcucagugucaucauuugaaagguuugagauauuccccaagacaaguucauggcccaaucaugacucgaacaaagguguaacggcagcauguccucaugcuggagcaaaaagcuucuacaaaaauuuaauauggcuaguuaaaaaaggaaauucauacccaaagcucagcaaauccuacauuaaugauaaagggaaagaaguccucgugcuauggggcauucaccauccaucuacuagugcugaccaacaaagucucuaucagaaugcagaugcauauguuuuuguggggacaucaagauacagcaagaaguucaagccggaaauagcaauaagacccaaagugagggaucaagaagggagaaugaacuauuacuggacacuaguagagccgggagacaaaauaacauucgaagcaacuggaaaucuagugguaccgagauaugcauucgcaauggaaagaaaugcuggaucugguauuaucauuucagauacaccaguccacgauugcaauacaacuugucagacacccaagggugcuguaaacaccagccucccauuucagaauauacauccgaucacaauuggaaaauguccaaaauauguaaaaagcacaaaauugagacuggccacaggauugaggaaugucccgucuauucaaucuagaggccuauuuggggccauugccgguuucauugaagggggguggacagggaugguagauggaugguacgguuaucaccaucaaaaugagcaggggucaggauaugcagccgaccugaagagcacacagaaugccauugacgagauuacuaacaaaguaaauucuguuauugaaaagaugaauacacaguucacagcaguagguaaagaguucaaccaccuggaaaaaagaauagagaauuuaaauaaaaaaguugaugaugguuuccuggacauuuggacuuacaaugccgaacuguugguucuauuggaaaaugaaagaacuuuggacuaccacgauucaaaugugaagaacuuauaugaaaagguaagaagccaguuaaaaaacaaugccaaggaaauuggaaacggcugcuuugaauuuuaccacaaaugcgauaacacgugcauggaaagugucaaaaaugggacuuaugacuacccaaaauacucagaggaagcaaaauuaaacagagaagaaauagaugggguaaagcuggaaucaacaaggauuuaccagauuuuggcgaucuauucaacugucgccaguucauugguacugguagucucccugggggcaaucaguuucuggaugugcucuaaugggucucuacaguguagaauauguauuuaa

SEQ ID NO: 41237 - RNA, 1701 nt, Artificial Sequence; identical to SEQ ID NO: 34681
  derived and/or modified CDS sequence (wt) from hemagglutinin__InfluenzaA__AFN17853

SEQ ID NO: 41238 - RNA, 1701 nt, Artificial Sequence
  derived and/or modified CDS sequence (wt) from hemagglutinin__InfluenzaA__AFN17863
auggaggcaauacuaguaguucugcuauauacauuugcaaccgcaaaugcagacacauuauguauagguuaucaugcgaacaauucaacagacacuguagacacaguacuagaaaagaauguaacaguaacacacucuguuaaccuucuagaagacaagcauaacgggaaacuaugcaaacuaagagggguagccccauugcauuuggguaaauguaacauugcuggcuggauccugggaaauccagagugugaaucacucuccacagcaagcucaugguccuacauuguggaaacaucuaguucagacaauggaacguguuacccaggagauuucaucgauuaugaggagcuaagagagcaauugagcucagugucaucauuugaaagguuugagauauuccccaagacaaguucauggcccaaucaugacucgaacaaagguguaacggcagcauguccucaugccggagcaaaaagcuucuacaaaaauuuaauauggcuaguuaaaaaaggaaauucauacccaaagcucagcaaauccuacauuaaugauaaagggaaagaaguccucgugcuauggggcauucaccauccaucuacuagugcugaccaacaaagucucuaucagaaugcagaugcauauguuuuuguggggucaucaagauacagcaagaaguucaagccggaaauagcaauaagacccaaagugagggaucaagaagggagaaugaacuauuacuggacacuaguagagccgggagacaaaauaacauucgaagcaacuggaaaucuagugguaccgagauaugcauucgcaauggaaagaaaugcuggaucugguauuaucauuucagauacaccaguccacgauugcaauacaacuugucagacacccaagggugcuauaaacaccagccucccauuucauaauauacauccgaucacaauuggaaaauguccaaaauauguaaaaagcacaaaauugagacuggccacaggauugaggaaugucccgucuauucaaucuagaggccuauuuggggccauugccgguuucauugaagggggguggacagggaugguggauggaugguacgguuaucaccaucaaaaugagcaggggucaggauaugcagccgaccugaagagcacacagaaugccauugacgagauuacuaacaaaguaaauucuguuauugaaaagaugaauacacaguucacagcaguagguaaagaguucaaccaucuggaaaaaagaauagagaauuuaaauaaaaaaguugaugaugguuuccuggacauuuggacuuacaaugccgaacuguugguucuauuggaaaaugaaagaacuuuggacuaccacgauucaaaugugaagaacuuauaugaaaagguaagaagccaguuaaaaaacaaugccaaggaaauuggaaacggcugcuuugaauuuuaccacaaaugcgauaacacgugcauggaaagugucaaaaaugggacuuaugacuacccaaaauacucagaggaagcaaaauuaaacagagaagaaauagaugggguaaagcuggaaucaacaaggauuuaccagauuuuggcgaucuauucaacugucgccaguucauugguacugguagucucccugggggcaaucaguuucuggaugugcucuaaugggucucuacaguguagaauauguauuuaa

SEQ ID NO: 41239 - RNA, 1701 nt, Artificial Sequence
  derived and/or modified CDS sequence (wt) from hemagglutinin__InfluenzaA__AFN17873
augaaggcaauacuaguaguucugcuauauacauuugcaaccgcaaaugcagacacauuauguauagguuaucaugcgaacaauucaacagacacuguagacacaguacuagaaaagaauguaacaguaacacacucuguuaaccuucuagaagacaagcauaacgggaaacuaugcaaacuaagagggguagccccauugcauuuggguaaauguaacauugcuggcuggauccugggaaauccagagugugaaucacucuccacagcaggcucaugguccuacauuguggaaacaucuaguucagacaauggaacguguuacccaggagauuucaucgauuaugaggagcuaagagagcaauugagcucagugucaucauuugaaagguuugagauauuccccaagacaaguucauggcccaaucaugacuugaacaaagguguaacggcagcauguccucaugcuggagcaaaaagcuucuacaaaaauuuaauauggcuaguuaaaaaaggaaauucauacccaaagcucagcaaauccuacauuaaugauaaagggaaagaaguccucgugcuauggggcauucaccauccaucuacuagugcugaccaacaaagucucuaucagaaugcagaugcauauguuuuuguggggacaucaagauacagcaagaaguucaagccggaaauagcaauaagacccaaagugagggaucaagaagggagaaugaacuauuacuggacacuaguagagccgggagacaaaauaacauucgaagcaacuggaaaucuagugguaccgagauaugcauucgcaauggaaagaaaugcuggaucugguauuaucauuucagauacaccaguccacgauugcaauacaacuugucagacacccaagggugcuauaaacaccagccucccauuucagaauauacauccgaucacaauuggaaaauguccaaaauauguaaaaagcacaaaauugagacuggccacaggauugaggaaugucccgucuauucaaucuagaggccuauuuggggccauugccgguuucauugaagggggguggacagggaugguagauggaugguacgguuaucaccaucaaaaugagcaggggucaggauaugcagccgaccugaagagcacacagaaugccauugacgagauuacuaacaaaguaaauucuguuauugaaaagaugaauacacaguucacagcaguagguaaagaguucaaccaccuggaaaaaagaauagagaauuuaaauaaaaaaguugaugaugguuuccuggacauuuggacuuacaaugccgaacuguugguucuauuggaaaaugaaagaacuuuggacuaccacgauucaaaugugaagaacuuauaugaaaagguaagaagccaguuaaaaaacaaugccaaggaaauuggaaacggcugcuuugaauuuuaccacaaaugcgauaacacgugcauggaaagugucaaaaaugggacuuaugacuacccaaaauacucagaggaagcaaaauuaaacagagaagaaauagaugggguaaagcuggaaucaacaaggauuuaccagauuuuggcgaucuauucaacugucgccaguucauugguacugguagucucccugggggcaaucaguuucuggaugugcucuaaugggucucuacaguguagaauauguauuuaa

SEQ ID NO: 41240 - RNA, 1701 nt, Artificial Sequence
  derived and/or modified CDS sequence (wt) from hemagglutinin__InfluenzaA__AFN17883
augaaggcaauacuaguaguucugcuauauacauuugcaaccgcaaaugcagacacauuauguauagguuaucaugcgaacaauucaacagacacuguagacacaguacuagaaaagaauguaacaguaacacacucuguuaaccuucuagaagacaagcauaacgggaaacuaugcaaacuaagagggguagccccauugcauuuggguaaauguaacauugcuggcuggauccugggaaauccagagugugaaucacucuccacagcaagcucaugguccuacauuguggaaacaucuaguucagacaauggaacguguuacccaggagauuucaucgauuaugaggagcuaagagagcaauugagcucagugucaucauuugaaagguuugagauauuccccaagacaaguucauggcccaaucaugacucgaacaaagguguaacggcagcauguccucaugcuggagcaaaaagcuucuacaaaaauuuaauauggcuaguuaaaaaaggaaauucauacccaaagcucagcaaauccuacauuaaugauaaagggaaagaaguccucgugcuauggggcauucaccauccaucuacuagugcugaccaacaaagucucuaucagaaugcagaugcauauguuuuuguggggacaucaagauacagcaagaaguucaagccggaaauagcaauaagacccaaagugagggaucaagaagggagaaugaacuauuacuggacacuaguagagccgggagacaaaauaacauucgaagcaacuggaaaucuagugguaccgagauaugcauucgcaauggaaagaaaugcuggaucugguauuaucauuucagauacaccaguccacgauugcaauacaacuugucagacacucaagggugcuauaaacaccagccucccauuucagaauauacauccgaucacaauuggaaaauguccaaaauauguaaaaagcacaaaauugagacuggccacaggauugaggaaugucccgucuauucaaucuagaggccuauuuggggccauugccgguuucauugaagggggguggacagggaugguagauggaugguacgguuaucaccaucaaaaugagcaggggucaggauaugcagccgaccugaagagcacacagaaugccauugacgagauuaccaacaaaguaaauucuguuauugaaaagaugaauacacaguucacagcaguagguaaagaguucaaccaccuggaaaaaagaauagagaauuuaaauaaaaaaguugaugaugguuuccuggacauuuggacuuacaaugccgaacuguugguucuauuggaaaaugaaagaacuuuggacuaccacgauucaaaugugaagaacuuauaugaaaagguaagaagccaguuaaaaaacaaugccaaggaaauuggaaacggcugcuuugaauuuuaccacaaaugcgauaacacgugcauggaaagugucaaaaaugggacuuaugacuacccaaaauacucagaggaagcaaaauuaaacagagaagaaauagaugggguaaagcuggaaucaacaaggauuuaccagauuuuggcgaucuauucaacugucgccaguucauugguacugguagucucccugggggcaaucaguuucuggaugugcucuaaugggucucuacaguguagaauauguauuuaa

SEQ ID NO: 41241 - RNA, 1701 nt, Artificial Sequence; identical to SEQ ID NO: 34681
  derived and/or modified CDS sequence (wt) from hemagglutinin__InfluenzaA__AFN17893

SEQ ID NO: 41242 - RNA, 1701 nt, Artificial Sequence
  derived and/or modified CDS sequence (wt) from hemagglutinin__InfluenzaA__AFN17903
augaaggcaauacuaguaguucugcuauauacauuugcaaccgcaaaugcagacacauuauguauagguuaucaugcgaacaauucaacagacacuguagacacaguacuagaaaagaauguaacaguaacacacucuguuaaccuucuagaagacaagcauaacgggaaacuaugcaaacuaagagggguagccccauugcauuuggguaaauguaacauugcuggcuggauccugggaaauccagagugugaaucacucuccacagcaagcucaugguccuacauuguggaaacaucuaguucagacaauggaacguguuacccaggagauuucaucgauuaugaggagcuaagagagcaauugagcucagugucaucauuugaaagguuugagauauuccccaagacaaguucauggcccaaucaugaaucgaacaaagguguaacggcagcauguccucaugcuggagcaaaaagcuucuacaaaaauuuaauauggcuaguuaaaaaaggaaauucauacccaaagcucagcaaauccuacguuaaugauaaagggaaagaaguccucgugcuauggggcauucaccauccaucuacuagugcugaccaacaaagucucuaucagaaugcagaugcauauguuuuuguggggacaucaagauacagcaagaaguucaagccggaaauagcaauaagacccaaagugagggaucaagaagggagaaugaacuauuacuggacacuaguagagccgggagacaaaauaacauucgaagcaacuggaaaucuagugguaccgagauaugcauucgcaauggaaagaaaugcuggaucugguauuaucauuucagauacaccaguccacgauugcaauacaacuugucagacacccaagggugcuauaaacaccagccucccauuucagaauauacauccgaucacaauuggaaaauguccaaaauauguaaaaagcacaaaauugagacuggccacaggauugaggaaugucccgucuauucaaucuagaggccuauuuggggccauugccgguuucauugaagggggguggacagggaugguagauggaugguacgguuaucaccaucaaaaugagcaggggucaggauaugcagccgaccugaagagcacacagaaugccauugacgagauuacuaacaaaguaaauucuguuauugaaaagaugaauacacaguucacagcaguagguaaagaguucaaccaccuggaaaaaagaauagagaauuuaaauaaaaaaguugaugaugguuuccuggacauuuggacuuacaaugccgaacuguugguucuauuggaaaaugaaagaacuuuggacuaccacgauucaaaugugaagaacuuauaugaaaagguaagaagccaguuaaaaaacaaugccaaggaaauuggaaacggcugcuuugaauuuuaccacaaaugcgauaacacgugcauggaaagugucaaaaaugggacuuaugacuacccaaaauacucagaggaagcaaaauuaaacagagaagaaauagaugggguaaagcuggaaucaacaaggauuuaccagauuuuggcgaucuauucaacugucgccaguucauugguacugguagucucccugggggcaaucaguuucuggaugugcucuaaugggucucuacaguguagaauauguauuuaa

SEQ ID NO: 41243 - RNA, 1701 nt, Artificial Sequence
  derived and/or modified CDS sequence (wt) from hemagglutinin__InfluenzaA__AFN17919
augaaggcaauacuaguaguucugcuauauacauuugcaaccgcaaaugcagacacauuauguauagguuaucaugcgaacaauucaacagacacuguagacacaguacuagaaaagaauguaacaguaacacacucuguuaaccuucuagaagacaagcauaacgggaaacuaugcaaacuaagagggguagccccauugcauuuggguaaauguaacauugcuggcuggauccugggaaauccagagugugaaucacucuccacagcaagcucaugguccuacauuguggaaacaucuaguucagacaauggaacguguuacccaggagauuucaucgauuaugaggagcuaagagagcaauugagcucagugucaucauuugaaagguuugagauauuccccaagacaaguucauggcccaaucaugacucgaacaaagguguaacggcagcauguccucaugcuggagcaaaaagcuucuacaaaaauuuaauauggcuaguuaaaaaaggaaauucauacccaaagcucagcaaauccuacauuaaugauaaagggaaagaaguccucgugcuauggggcauucaccauccaucuacuagugcugaccaacaaagucucuaucagaaugcagaugcauauguuuuuguggggacaucaagauacagcaagaaguucaagccggaaauagcaauaagacccaaagugagggagcaagaagggagaaugaacuauuacuggacacuaguagagccgggagacaaaauaacauucgaagcaacuggaaaucuagugguaccgagauaugcauucgcaauggaaagaaaugcuggaucugguauuaucauuucagauacaccaguccacgauugcaauacaacuugucagacacccaagggugcuauaaacaccagccucccauuucagaauauacauccgaucacaauuggaaaauguccaaaauauguaaaaagcacaaaauugagacuggccacaggauugaggaaugucccgucuauucaaucuagaggccuauuuggggccauugccgguuucauugaagggggguggacagggaugguagauggaugguacgguuaucaccaucaaaaugagcaggggucaggauaugcagccgaccugaagagcacacagaaugccauugacgagauuacuaacaaaguaaauucuguuauugaaaagaugaauacacaguucacagcaguagguaaagaguucaaccaccuggaaaaaagaauagagaauuuaaauaaaaaaguugaugaugguuuccuggacauuuggacuuacaaugccgaacuguugguucuauuggaaaaugaaagaacuuuggacuaccacgauucaaaugugaagaacuuauaugaaaagguaagaagccaguuaaaaaacaaugccaaggaaauuggaaacggcugcuuugaauuuuaccacaaaugcgauaacacgugcauggaaagugucaaaaaugggacuuaugacuacccaaaauacucagaggaagcaaaauuaaacagagaagaaauagaugggguaaagcuggaaucaacaaggauuuaccagauuuuggcgaucuauucaacugucgccaguucauugguacugguagucucccugggggcaaucaguuucuggaugugcucuaaugggucucuacaguguagaauauguauuuaa

SEQ ID NO: 41244 - RNA, 1701 nt, Artificial Sequence; identical to SEQ ID NO: 41238
  derived and/or modified CDS sequence (wt) from hemagglutinin__InfluenzaA__AFN17929

SEQ ID NO: 41245 - RNA, 1701 nt, Artificial Sequence; identical to SEQ ID NO: 40939
  derived and/or modified CDS sequence (wt) from hemagglutinin__InfluenzaA__AFN17939

SEQ ID NO: 41246 - RNA, 1701 nt, Artificial Sequence
  derived and/or modified CDS sequence (wt) from hemagglutinin__InfluenzaA__AFN17949
augaaggcaauacuaguaguucugcuauauacauuugcaaccgcaaaugcagacacauuauguauagguuaucaugcgaacaauucaacagacacuguagacacaguacuagaaaagaauguaacaguaacacacucuguuaaccuuuuagaagacaagcauaacgggaaacuaugcaaacuaagagggguagccccauugcauuuggguaaauguaacauugcuggcuggauccugggaaauccagagugugaaucacucuccacagcaagcucaugguccuacauuguggaaacaucuaguucagacaauggaacguguuacccaggagauuucaucgauuaugaggagcuaagagagcaauugagcucagugucaucauuugaaagguuugagauauuccccaagacaaguucauggcccaaucaugacucgaacaaagguguaacggcagcauguccucaugcuggagcaaaaagcuucuacaaaaauuuaauauggcuaguuaaaaaaggaaauucauacccaaagcucagcaaauccuacauuaaugauaaagggaaagaaguccucgugcuauggggcauucaccauccaucuacuagugcugaccaacaaagucucuaucagaaugcagaugcauauguuuuuguggggacaucaagauacagcaagaaguucaagccggaaauagcaauaagacccaaagugagggaucaagaagggagaaugaacuauuacuggacacuaguagagccgggagacaaaauaacauucgaagcaacuggaaaucuagugguaccgagauaugcauucgcaaugguaagaaaugcuggaucugguauuaucauuucagauacaccaguccacgauugcaauacaacuugucagacacccaagggugcuauaaacaccagccucccauuucagaauauacauccgaucacaauuggaaaauguccaaaauauguaaaaagcacaaaauugagacuggccacaggauugaggaaugucccgucuauucaaucuagaggccuauuuggggccauugccgguuucauugaagggggguggacagggaugguagauggaugguacgguuaucaccaucaaaaugagcaggggucaggauaugcagccgaccugaagagcacacagaaugccauugacgagauuacuaacaaaguaaauucuguuauugaaaagaugaauacacaguucacagcaguagguaaagaguucaaccaccuggaaaaaagaauagagaauuuaaauaaaaaaguugaugaugguuuccuggacauuuggacuuacaaugccgaacuguugguucuauuggaaaaugaaagaacuuuggacuaccacgauucaaaugugaagaacuuauaugaaaagguaagaagccaguuaaaaaacaaugccaaggaaauuggaaacggcugcuuugaauuuuaccacaaaugcgauaacacgugcauggaaagugucaaaaaugggacuuaugacuacccaaaauacucagaggaagcaaaauuaaacagagaagaaauagaugggguaaagcuggaaucaacaaggauuuaccagauuuuggcgaucuauucaacugucgccaguucauugguacugguagucucccugggggcaaucaguuucuggaugugcucuaaugggucucuacaguguagaauauguauuuaa

SEQ ID NO: 41247 - RNA, 1701 nt, Artificial Sequence
  derived and/or modified CDS sequence (wt) from hemagglutinin__InfluenzaA__AFN17959
augaaggcaauacuaguaguucugcuauauacauuugcaaccgcaaaugcagacacauuauguauagguuaucaugcgaacaauucaacagacacuguagacacaguacuagaaaagaauguaacaguaacacacucuguuaaccuucuagaagacaagcauaacgggaaacuaugcaaacuaagagggguagccccauugcauuuggguaaauguaacauugcuggcuggauccugggaaauccagagugugaaucacucuccacagcaagcucaugguccuacauuguggaaacaucuaguucagacaauggaacguguuacccaggagauuucaucgauuaugaggagcuaagagagcaauugagcucagugucaucauuugaaagguuugagauauuccccaagacaaguucauggcccaaucaugacucgaacaaagguguaacggcagcauguccucaugcuggagcaaaaagcuucuacaaaaauuuaauauggcuaguuaaaaaaggaaauucauacccaaagcucagcaaauccuacguuaaugauaaagggaaagaaguccucgugcuauggggcauucaccauccaucuacuagugcugaccaacaaagucucuaucagaaugcagaugcauauguuuuuguggggacaucaagauacagcaagaaguucaagccggaaauagcaauaagacccaaagugagggaucaagaagggagaaugaacuauuacuggacacuaguagagccgggagacaaaauaacauucgaagcaacaggaaaucuagugguaccgagauaugcauuugcaauggaaagaaaugcuggaucugguauuaucauuucagauacaccaguccacgauugcaauacaacuugucagacacccaagggugcuauaaacaccagccucccauuucagaauauacauccgaucacaauuggaaaauguccaaaauauguaaaaagcacaaaauugagacuggccacaggauugaggaaugucccgucuauucaaucuagaggccuauuuggggccauugccgguuucauugaagggggguggacagggaugguagauggaugguacgguuaucaccaucaaaaugagcaggggucaggauaugcagccgaccugaagagcacacagaaugccauugacgagauuacuaacaaaguaaauucuguuauugaaaagaugaauacacaguucacagcaguagguaaagaguucaaccaccuggaaaaaagaauagagaauuuaaauaaaaaaguugaugaugguuuccuggacauuuggacuuacaaugccgaacuguugguucuauuggaaaaugaaagaacuuuggacuaccacgauucaaaugugaagaacuuauaugaaaagguaagaagccaguuaaaaaacaaugccaaggaaauuggaaacggcugcuuugaauuuuaccacaaaugcgauaacacgugcauggaaagugucaaaaaugggacuuaugacuacccaaaauacucagaggaagcaaaauuaaacagagaagaaauagaugggguaaagcuggaaucaacaaggauuuaccagauuuuggcgaucuauucaacugucgccaguucauugguacugguagucucccugggggcaaucaguuucuggaugugcucuaaugggucucuacaguguagaauauguauuuaa

SEQ ID NO: 41248 - RNA, 1701 nt, Artificial Sequence
  derived and/or modified CDS sequence (wt) from hemagglutinin__InfluenzaA__AFN17969
augaaggcaauacuaguaguucugcuauauacauuugcaaccgcaaaugcagacacauuauguauagguuaucaugcgaacaauucaacagacacuguagacacaguacuagaaaagaauguaacaguaacacacucuguuaaccuucuagaagacaagcauaacgggaaacuaugcaaacuaagagggguagccccauugcauuuggguaaauguaacauugcuggcuggauccugggaaauccagagugugaaucacucuccacagcaagcucaugguccuacauuguggaaacaucuaguucagacaauggaacguguuacccaggagauuucaucgauuaugaggagcuaagagagcaauugagcucagugucaucauuugaaagguuugagauauuccccaagacaaguucauggcccaaucaugacucgaacaaagguguaacggcagcauguccucaugcuggagcaaaaagcuucuacaaaaauuuaauauggcuaguuaaaaaaggaaauucauacccaaagcucagcaaauccuacauuaaugauaaagggaaagaaguccucgugcuauggggcauucaccauccaucuacuagugcugaccaacaaagucucuaucagaaugcagaugcauauguuuuuguggggacaucaagauacagcaagaaguucaagccggaaauagcaauaagacccaaagugagggaucaagaagggagaaugaacuauuacuggacacuaguagagccgggagacaaaauaacauucgaagcaacuggaaaucuagugguaccgagauaugcauucgcaauggaaagaaaugcuggaucugguauuaucauuucagauacaccaguccacgauugcaauacaacuugucagacacccaagggugcuauaaacaccagccucccauuucagaauauacauccgaucacaauuggaaaauguccaaaauauguaaaaagcacaaaauugagaauggccacaggauugaggaaugucccgucuauucaaucuagaggccuauuuggggccauugccgguuucauugaagggggguggacagggaugguagauggaugguacgguuaucaccaucaaaaugagcaggggucaggauaugcagccgaccugaagagcacacagaaugccauugacgagauuacuaacaaaguaaauucuguuauugaaaagaugaauacacaguucacagcaguagguaaagaguucaaccaccuggaaaaaagaauagagaauuuaaauaaaaaaguugaugaugguuuccuggacauuuggacuuacaaugccgaacuguugguucuauuggaaaaugaaagaacuuuggacuaccacgauucaaaugugaagaacuuauaugaaaagguaagaagccaguuaaaaaacaaugccaaggaaauuggaaacggcugcuuugaauuuuaccacaaaugcgauaacacgugcauggaaagugucaaaaaugggacuuaugacuacccaaaauacucagaggaagcaaaauuaaacagagaagaaauagaugggguaaaguuggaaucaacaaggauuuaccagauuuuggcgaucuauucaacugucgccaguucauugguacugguagucucccugggggcaaucaguuucuggaugugcucuaaugggucucuacaguguagaauauguauuuaa

SEQ ID NO: 41249 - RNA, 1701 nt, Artificial Sequence
  derived and/or modified CDS sequence (wt) from hemagglutinin__InfluenzaA__AFN17979
augaaggcaauacuaguaguucugcuauauacauuugcaaccgcaaaugcagacacauuauguauagguuaucaugcgaacaauucaacagacacuguagacacaguacuagaaaagaauguaacaguaacacacucuguuaaccuucuagaagacaagcauaacgggaaauuaugcaaacuaagagggguagccccauugcauuuggguaaauguaacauugcuggcuggauccugggaaauccagagugugaaucacucuccacagcaagcucaugguccuacauuguggaaacaucuaguucagacaauggaacguguuacccaggagauuucaucgauuaugaggagcuaagagagcaauugagcucagugucaucauuugaaagguuugagauauuccccaagacaaguucauggcccaaucaugacucgaacaaagguguaacggcagcauguccucaugcuggagcaaaaagcuucuacaaaaauuuaauauggcuaguuaaaaaaggaaauucauacccaaagcucagcaaauccuacauuaaugauaaagggaaagaaguccuagugcuauggggcauucaccauccaucuacuagugcugaccaacaaagucucuaucagaaugcagaugcauauguuuuuguggggacaucaagauacagcaagaaguucaagccggaaauagcaauaagacccaaagugagggaucaagaagggagaaugaacuauuacuggacacuaguagagccgggagacaaaauaacauucgaagcaacuggaaaucuagugguaccgagauaugcauucgcaaugguaagaaaugcuggaucugguauuaucauuucagauacaccaguccacgauugcaauacaacuugucagacacccaagggugcuauaaacaccagccucccauuucagaauauacauccgaucacaauuggaaaauguccaaaauauguaaaaagcacaaaauugagacuggccacaggauugaggaaugucccgucuauucaaucuagaggccuauuuggggccauugccgguuucauugaagggggguggacagggaugguagauggaugguacgguuaucaccaucaaaaugagcaggggucaggauaugcagccgaccugaagagcacacagaaugccauugacgagauuacuaacaaaguaaauucuguuauugaaaagaugaauacacaguucacagcaguagguaaagaguucaaccaccuggaaaaaagaauagagaauuuaaauaaaaaaguugaugaugguuuccuggacauuuggacuuacaaugccgaacuguugguucuauuggaaaaugaaagaacuuuggacuaccacgauucaaaugugaagaacuuauaugaaaagguaagaagccaguuaaaaaacaaugccaaggaaauuggaaacggcugcuuugaauuuuaccacaaaugcgauaacacgugcauggaaagugucaaaaaugggacuuaugacuacccaaaauacucagaggaagcaaaauuaaacagagaagaaauagaugggguaaagcuggaaucaacaaggauuuaccagauuuuggcgaucuauucaacugucgccaguucauugguacugguagucucccugggggcaaucaguuucuggaugugcucuaaugggucucuacaguguagaauauguauuuaa

SEQ ID NO: 41250 - RNA, 1701 nt, Artificial Sequence
  derived and/or modified CDS sequence (wt) from hemagglutinin__InfluenzaA__AFN17989
augaaggcaauacuaguaguucugcuauauacauuugcaaccgcaaaugcagacacauuauguauagguuaucaugcgaacaauucaacagacacuguagacacaguacuagaaaagaauguaacaguaacacacucuguuaaccuucuagaagacaagcauaacgggaaacuaugcaaacuaagagggguagccccauugcauuuggguaaauguaacauugcuggcuggauccugggaaauccagagugugaaucacucuccacagcaagcucaugguccuacauuguggaaacaucuaguucagacaauggaacguguuacccaggagauuucaucgauuaugaggagcuaagagagcaauugagcucagugucaucauuugaaagguuugagauauuccccaagacaaguucauggcccaaucaugacucgaacaaagguguaacggcagcauguccucaugcuggagcaaaaagcuucuacaaaaauuuaauauggcuaguuaaaaaaggaaauucauacccaaagcucagcaaauccuacauuaaugauaaagggaaagaaguccucgugcuauggggcauucaccauccaucuacuagugcugaccaacaaagucucuaucagaaugcagaugcauauguuuuuguggggacaucaagauacagcaagaaguucaagccggaaauagcaauaagacccaaagugagggaucaagaagggagaaugaacuauuacuggacacuaguagagccgggagacaaaauaacauucgaagcaacuggaaaucuagugguaccgagauaugcauucgcaauggaaagaaaugcuggaucugguauuaucauuucagauacaccaguccacgauugcaauacaacuugucagacacccaagggugcuauaaacaccagccucccauuucagaauauacauccgaucacaauuggaaaauguccaaaauauguaaaaagcacaaaauugagacuggccacaggauugaggaaugucccgucuauucaaucuagaggccuauuuggggccauugccgguuucauugaagggggguggacagggaugguagauggaugguacgguuaucaccaucaaaaugagcaggggucaggauaugcagccgaccugaagagcacacagaaugccauugacgagauuacuaacaaaguaaauucuguuauuggaaagaugaauacacaguucacagcaguagguaaagaguucaaccaccuggaaaaaagaauagagaauuuaaauaaaaaaguugaugaugguuuccuggacauuuggacuuacaaugccgaacuguugguucuauuggaaaaugaaagaacuuuggacuaccacgauucaaaugugaagaacuuauaugaaaagguaagaagccaguuaaaaaacaaugccaaggaaauuggaaacggcugcuuugaauuuuaccacaaaugcgauaacacgugcauggaaagugucaaaaaugggacuuaugacuacccaaaauacucagaggaagcaaaauuaaacagagaagaaauagaugggguaaagcuggaaucaacaaggauuuaccagauuuuggcgaucuauucaacugucgccaguucauugguacugguagucucccugggggcaaucaguuucuggaugugcucuaaugggucucuacaguguagaauauguauuuaa

SEQ ID NO: 41251 - RNA, 1701 nt, Artificial Sequence; identical to SEQ ID NO: 34681
  derived and/or modified CDS sequence (wt) from hemagglutinin__InfluenzaA__AFN17999

SEQ ID NO: 41252 - RNA, 1701 nt, Artificial Sequence
  derived and/or modified CDS sequence (wt) from hemagglutinin__InfluenzaA__AFN18019
augaaggcaauacuaguaguucugcuauauacauuugcaaccgcaaaagcagacacauuauguauagguuaucaugcgaacaauucaacagacacuguagacacaguacuagaaaagaauguaacaguaacacacucuguuaaccuucuagaagacaagcauaacgggaaacuaugcaaacuaagagggguagccccauugcauuuggguaaauguaacauugcuggcuggauccugggaaauccagagugugaaucacucuccacagcaagcucaugguccuacauuguggaaacaucuaguucagacaauggaacguguuacccaggagauuucaucgauuaugaggagcuaagagagcaauugagcucagugucaucauuugaaagguuugagauguuccccaagacaaguucauggcccaaucaugacucgaacaaagguguaacggcagcauguccucaugcuggagcaaaaagcuucuacaaaaauuuaauauggcuaguuaaaaaaggaaauucauacccaaagcucagcaaauccuacauuaaugauaaagggaaagaaguccucgugcuauggggcauucaccauccaucuacuagugcugaccaacaaagucucuaucagaaugcagaugcauauguuuuuguggggacaucaagauacagcaagaaguucaagccggaaauagcaauaagacccaaagugagggaucaagaagggagaaugaacuauuacuggacacuaguagagccgggagacaaaauaacauucgaagcaacuggaaaucuagugguaccgagauaugcauucgcaauggaaagaaaugcuggaucugguauuaucauuucagauacaccaguccacgauugcaauacaacuugucagacacccaagggugcuauaaacaccagccucccauuucagaauauacauccgaucacaauuggaaaaugucccaaauauguaaaaagcacaaaauugagacuggccacaggauugaggaaugucccuucuauucaaucuagaggccuauuuggggccauugccgguuucauugaagggggguggacagggaugguagauggaugguacgguuaucaccaucaaaaugagcaggggucaggauaugcagccgaccugaagagcacacagaaugccauugacgagauuacuaacaaaguaaauucuguuauugaaaagaugaauacacaguucacagcaguagguaaagaguucaaccaccuggaaaaaagaauagagaauuuaaauaaaaaaguugaugaugguuuccuggacauuuggacuuacaaugccgaacuguugguucuauuggaaaaugaaagaacuuuggacuaccacgauucaaaugugaagaacuuauaugaaaagguaagaagccaguuaaaaaacaaugccaaggaaauuggaaacggcugcuuugaauuuuaccacaaaugcgauaacacgugcauggaaagugucaaaaaugggacuuaugacuacccaaaauacucagaggaagcaaaauuaaacagagaagaaauagaugggguaaagcuggaaucaacaaggauuuaccagauuuuggcgaucuauucaacugucgccaguucauugguacugguagucucccugggggcaaucaguuucuggaugugcucuaaugggucucuacaguguagaauauguauuuaa

SEQ ID NO: 41253 - RNA, 1701 nt, Artificial Sequence; identical to SEQ ID NO: 35542
  derived and/or modified CDS sequence (wt) from hemagglutinin__InfluenzaA__AFN18039

SEQ ID NO: 41254 - RNA, 1701 nt, Artificial Sequence; identical to SEQ ID NO: 34681
  derived and/or modified CDS sequence (wt) from hemagglutinin__InfluenzaA__AFN18049

SEQ ID NO: 41255 - RNA, 1701 nt, Artificial Sequence
  derived and/or modified CDS sequence (wt) from hemagglutinin__InfluenzaA__AFN18059
augaaggcaauacuaguaguucugcuauauacauuugcaaccgcaaaugcagacacauuauguauagguuaucaugcgaacaauucaacagacacuguagacacaguacuagaaaagaauguaacaguaacacacucuguuaaccuucuagaagacaagcauaacgggaaacuaugcaaacuaagagggguagccccauugcauuuggguaaauguaacauugcuggcuggauccugggaaauccagagugugaaucacucuccacagcaagcucaugguccuacauuguggaaacaucuaguucagacaauggaacguguuacccaggagauuucaucgauuaugaggagcuaagagagcaauugagcucagugucaucauuugaaagguuugagauauuccccaagacaaguucauggcccaaucaugacucgaacaaagguguaacggcagcauguccucaugcuggagcaaaaagcuucuacaaaaauuuaauauggcuaguuaaaaaaggaaauucauacccaaagcucagcaaauccuacauuaaugauaaagggaaagaaguccucgugcuauggggcauucaccauccaucuacuagugcugaccaacaaagucucuaucagaaugcagaugcguauguuuuuguggggacaucaagauacagcaagaaguucaagccggaaauagcaauaagacccaaagugagggaucaagaagggagaaugaacuauuacuggacacuaguagagccgggagacaaaauaacauucgaagcaacuggaaaucuagugguaccgagauaugcauucgcaauggaaagaaaugcuggaucugguauuaucauuucagauacaccaguccacgauugcaauacaacuugucagacacccaagggugcuauaaacaccagccucccauuucagaauauacauccgaucacaauuggaaaauguccaaaauauguaaaaagcacaaaauugagacuggccacaggauugaggaaugucccgucuauucaaucuagaggccuauuuggggccauugccgguuucauugaagggggguggacagggaugguagauggaugguacgguuaucaccaucaaaaugagcaggggucaggauaugcagccgaccugaagagcacacagaaugccauugacgagauuacuaacaaaguaaauucuguuauugaaaagaugaauacacaguucacagcaguagguaaagaguucaaccaccuggaaaaaagaauagagaauuuaaauaaaaaaguugaugaugguuuccuggacauuuggacuuacaaugccgaacuguugguucuauuggaaaaugaaagaacuuuggacuaccacgauucaaaugugaagaacuuauaugaaaagguaagaagccaguuaaaaaacaaugccaaggaaauuggaaacggcugcuuugaauuuuaccacaaaugcgauaacgcgugcauggaaagugucaaaaaugggacuuaugacuacccaaaauacucagaggaagcaaaauuaaacagagaagaaauagaugggguaaagcuggaaucaacaaggauuuaccagauuuuggcgaucuauucaacuguugccaguucauugguacugguagucucccugggggcaaucaguuucuggaugugcucuaaugggucucuacaguguagaauauguauuuaa

SEQ ID NO: 41256 - RNA, 1701 nt, Artificial Sequence; identical to SEQ ID NO: 34980
  derived and/or modified CDS sequence (wt) from hemagglutinin__InfluenzaA__AFN18078

SEQ ID NO: 41257 - RNA, 1701 nt, Artificial Sequence
  derived and/or modified CDS sequence (wt) from hemagglutinin__InfluenzaA__AFN18088
augaaggcaauacuaguaguucugcuauauacauuugcaaccgcaaaugcagacacauuauguauagguuaucaugcgaacaauucaacagacacuguagacacaguacuagaaaagaauguaacaguaacacacucuguuaaccuucuagaagacaagcauaacgggaaacuaugcaaacuaagagggguagccccauugcauuuggguaaauguaacauugcuggcuggauccugggaaauccagagugugaaucacucuccacagcaagcucaugguccuacauuguggaaacaucuaguucagacaauggaacguguuacccaggagauuucaucgauuaugaggagcuaagagagcaauugagcucagugucaucauuugaaagguuugagauauuccccaagacaaguucauggcccaaucaugacucgaacaaagguguaacggcagcauguccucaugcuggagcaaaaagcuucuacaaaaauuuaauauggcuaguuaaaaaaggaaauucauacccaaagcucagcaaauccuacauuaaugauaaagggaaagaaguccuagugcuauggggcauucaccauccaucuacuagugcugaccaacaaagucucuaucagaaugcagauacauauguuuuuguggggacaucaagauacagcaagaaguucaagccggaaauagcaauaagacccaaagugagggaucaagaagggagaaugaacuauuacuggacacuaguagagccgggagacaaaauaacauucgaagcaacuggaaaucuagugguaccgagauaugcauucgcaaugguaagaaaugcuggaucugguauuaucauuucagauacaccaguccacgauugcaauacaacuugucagacacccaagggugcuauaaacaccagccucccauuucagaauauacauccgaucacaauuggaaaauguccaaaauauguaaaaagcacaaaauugagacuggccacaggauugaggaaugucccgucuauucaaucuagaggccuauuuggggccauugccgguuucauugaagggggguggacagggaugguagauggaugguacgguuaucaccaucaaaaugagcaggggucaggauaugcagccgaccugaagagcacacagaaugccauugacgagauuacuaacaaaguaaauucuguuauugaaaagaugaauacacaguucacagcaguagguaaagaguucaaccaccuggaaaaaagaauagagaauuuaaauaaaaaaguugaugaugguuuccuggacauuuggacuuacaaugccgaacuguugguucuauuggaaaaugaaagaacuuuggacuaccacgauucaaaugugaagaacuuauaugaaaagguaagaagccaguuaaaaaacaaugccaaggaaauuggaaacggcugcuuugaauuuuaccacaaaugcgauaacacgugcauggaaagugucaaaaaugggacuuaugacuacccaaaauacucagaggaagcaaaauuaaacagagaagaaauagaugggguaaagcuggaaucaacaaggauuuaccagauuuuggcgaucuauucaacugucgccaguucauugguacugguagucucccugggggcaaucaguuucuggaugugcucuaaugggucucuacaguguagaauaugcauuuaa

SEQ ID NO: 41258 - RNA, 1701 nt, Artificial Sequence
  derived and/or modified CDS sequence (wt) from hemagglutinin__InfluenzaA__AFN18098
augaaggcaauacuaguaguucugcuauauacauuugcaaccgcaaaugcagacacauuauguauagguuaucaugcgaacaauucaacagacacuguagacacaguacuagaaaagaauguaacaguaacacacucuguuaaccuucuagaagacaagcauaacgggaaacuaugcaaacuaagagggauagccccauugcauuuggguaaauguaacauugcuggcuggauccugggaaauccagagugugaaucacucuccacagcaagcucaugguccuacauuguggaaacaucuaguucagacaauggaacguguuacccaggaaauuucaucgauuaugaggagcuaagagagcaauugagcucagugucaucauuugaaagguuugagauauuccccaagacaaguucauggcccaaucaugacucgaacaaagguguaacggcagcauguccucaugcuggagcaaaaagcuucuacaaaaauuuaauauggcuaguuaaaaaaggaaauucauacccaaagcucagcaaauccuacauuaaugauaaagggaaagaaguccucgugcuauggggcauucaccauccaucuacuagugcugaccaacaaagucucuaucagaaugcagaugcauauguuuuuguggggacaucaagauacagcaagaaguucaagccggaaauagcaauaagacccaaagugagggaucaagaagggagaaugaacuauuacuggacacuaguagagccgggagacaaaauaacauucgaagcaacuggaaaucuagugguaccgagauaugcauucgcaguggaaagaaaugcuggaucugguauuaucauuucagauacaccaguccacgauugcaauacaacuugucagacacccaagggugcuauaaacaccagccucccauuucagaauauacauccgaucacaauuggaaaauguccaaaauauguaaaaagcacaaaauugagacuggccacaggauugaggaaugucccgucuauucaaucuagaggccuauuuggggccauugccgguuucauugaagggggguggacagggaugguagauggaugguacgguuaucaccaucaaaaugagcaggggucaggauaugcagccgaccugaagagcacacagaaugccauugacgagauuacuaacaaaguaaauucuguuauugaaaagaugaauacacaguucacagcaguagguaaagaguucaaccaccuggaaaaaagaauagagaauuuaaauaaaaagguugaugaugguuuccuggacauuuggacuuacaaugccgaacuguugguucuauuggaaaaugaaagaacuuuggacuaccacgauucaaaugugaagaacuuauaugaaaagguaagaagccaguuaaaaaacaaugccaaggaaauuggaaacggcugcuuugaauuuuaccacaaaugcgauaacacgugcauggaaagugucaaaaaugggacuuaugacuacccaaaauacucagaggaagcaaaauuaaacagagaagaaauagaugggguaaagcuggaaucaacaaggauuuaccagauuuuggcgaucuauucaacugucgccaguucauugguacugguagucucccugggggcaaucaguuucuggaugugcucuaaugggucucuacaguguagaauauguauuuaa

SEQ ID NO: 41259 - RNA, 1701 nt, Artificial Sequence
  derived and/or modified CDS sequence (wt) from hemagglutinin__InfluenzaA__AFN18105
augaaggcaauacuaauaguucugcuauauacauuugcaaccgcaaaugcagacacauuauguauagguuaucaugcgaacaauucaacagacacuguagacacaguacuagaaaagaauguaacaguaacacacucuguuaaccuucuagaagacaagcauaacgggaaacuaugcaaacuaagagggguagccccauugcauuuggguaaauguaacauugcuggcuggauccugggaaauccagagugugaaucacucuccacagcaagcucaugguccuacauuguggaaacaucuaguucagacaauggaacguguuacccaggagauuucaucgauuaugaggagcuaagagagcaauugagcucagugucaucauuugaaagguuugagauauuccccaagacaaguucauggcccaaucaugacucgaacaaagguguaacggcagcauguccucaugcuggagcaaaaagcuucuacaaaaauuuaauauggcuaguuaaaaaaggaaauucauacccaaagcucagcaaauccuacauuaaugauaaagggaaagaaguccucgugcuauggggcauucaccauccaucuacuagugcugaccaacaaagucucuaucagaaugcagaugcauauguuuuuguggggacaucaagauacagcaagaaguucaagccggaaauagcaauaagacccaaagugagggaucaagaagggagaaugaacuauuacuggacacuaguagagccgggagacaaaauaacauucgaagcaacuggaaaucuagugguaccgagauaugcauucgcaauggaaagaaaugcuggaucugguauuaucauuucagauacaccaguccacgauugcaauacaaauugucagacacccaagggugcuauaaacaccagccucccauuucagaauauacauccgaucacaauuggaaaauguccaaaauauguaaaaagcacaaaauugagacuggccacaggauugaggaaugucccgucuauucaaucuagaggccuauuuggggccauugccgguuuuauugaagggggguggacagggaugguagauggaugguacgguuaucaccaucaaaaugagcaggggucaggauaugcagccgaccugaagagcacacagaaugccauugacgagauuacuaacaaaguaaauucuguuauugaaaagaugaauacacaguucacagcaguagguaaagaguucaaccaccuggaaaaaagaauagagaauuuaaauaaaaaaguugaugaugguuuccuggacauuuggacuuacaaugccgaacuguugguucuauuggaaaaugaaagaacuuuggacuaccacgauucaaaugugaagaacuuauaugaaaagguaagaagccaguuaaaaaacaaugccaaggaaauuggaaacggcugcuuugaauuuuaccacaaaugcgauaacacgugcauggaaagugucaaaaaugggacuuaugacuacccaaaauacucagaggaagcaaaauuaaacagagaagaaauagaugggguaaagcuggaaucaacaaggauuuaccagauuuuggcgaucuauucaacugucgccaguucauugguacugguagucucccugggggcaaucaguuucuggaugugcucuaaugggucucuacaguguagaauauguauuuaa

SEQ ID NO: 41260 - RNA, 1701 nt, Artificial Sequence; identical to SEQ ID NO: 41238
  derived and/or modified CDS sequence (wt) from hemagglutinin__InfluenzaA__AFN18107

SEQ ID NO: 41261 - RNA, 1701 nt, Artificial Sequence
  derived and/or modified CDS sequence (wt) from hemagglutinin__InfluenzaA__AFN18117
augaaggcaauacuaguaguucugcuauauacauuugcaaccgcaaaugcagacacauuauguauagguuaucaugcgaacaauucaacagacacuguagacacaguacuagaaaagaauguaacaguaacacacucuguuaaccuucuagaagacaagcauaacgggaaacuaugcaaacuaagagggguagccccauugcauuuggguaaauguaacauugcuggcuggauccugggaaauccagagugugaaucacucuccacagcaagcucaugguccuacauuguggaaacaucuaguucagacaauggaacguguuacccaggagauuucaucgauuaugaggagcuaagagagcaauugagcucagugucaucauuugaaagguuugagauauuccccaagacaaguucauggcccaaucaugacucgaacaaagguguaacggcagcauguccucaugcuggagcaaaaagcuucuacaaaaauuuaauauggcuaguuaaaaaaggaaauucauacccaaagcucagcaaauccuacauuaaugauaaagggaaagaaguccucgugcuauggggcauucaccauccaucuacuagugcugaccaacaaagucucuaucagaaugcagaugcauauguuuuuguggggacaucaagauacagcaagaaguucaagccggaaauagcaauaagacccaaagugagggaucaagaagggagaaugaacuauuacuggacacuaguagagccgggagacaaaauaacauucgaagcaacuggaaaucuagugguaccgagauaugcauucgcaauggaaagaaaugcuggaucugguauuaucauuucagauacaccaguccacgauugcaauacaacuugucagacacccaagggugcuauaaacaccagccucccauuucagaauauacauccgaucacaauuggaaaauguccaaaauauguaaaaagcacaaaauugagacuggccacaggauugaggaaugucccgucuauucaaucuagaggccuauuuggggccauugccgguuucauugaagggggguggacagggaugguagauggaugguacgguuaucaccaucaaaaugagcaggggucaggauaugcagccgaccugaagagcacacagaaugccauugacgagauuacuaacaaaguaaauucuguuauugaaaagaugaauacacaguucacagcaguagguaaagaguucaaccaccuggaaaaaagaauagagaauuuaaauaaaaaaguugaugaugguuuccuggacauuuggacuuacaaugccgaacuguugguucuauuggaaaaugaaagaacuuuggacuaccacgauucaaaugugaagaacuuauaugaaaagguaagaagccaguuaaaaaacaaugccaaggaaauuggaaacggcugcuuugaauuuuaccacaaaugcgauaacgcgugcauggaaagugucaaaaaugggacuuaugacuacccaaaauacucagaggaagcaaaauuaaacagagaagaaauagaugggguaaagcuggaaucaacaaggauuuaccagauuuuggcgaucuauucaacugucgccaguucauugguacugguagucucccugggggcaaucaguuucuggaugugcucuaaugggucucuacaguguagaauauguauuuaa

SEQ ID NO: 41262 - RNA, 1701 nt, Artificial Sequence
  derived and/or modified CDS sequence (wt) from hemagglutinin__InfluenzaA__AFN18119
augaaggcaauacuaguaguucugcuauauacauuugcaaccgcaaaugcagacacauuauguauagguuaucaugcgaacaauucaacagacacuguagacacaguacuagaaaagaauguaacaguaacacacucuguuaaccuucuagaagacaagcauaacgggaaacuaugcaaacuaagagggguagccccauugcauuuggguaaauguaacauugcuggcuggauccugggaaauccagagugugaaucacucuccacagcaagcucaugguccuacauuguggaaacaucuaguucagacaauggaacguguuacccaggagauuucaucgauuaugaggagcuaagagagcaauugagcucagugucaucauuugaaagguuugagauauuccccaagacaaguucauggcccaaucaugacucgaacaaagguguaacggcagcauguccucaugcuggagcaaaaagcuucuacaaaaauuuaauauggcuaguuaaaaaaggaaauucauacccaaagcucagcaaauccuacauuaaugauaaagggaaagaaguccucgugcuauggggcauucaccauccaucuacuagugcugaccaacaaagucucuaucagaaugcagaugcauauguuuuuguggggacaucaagauacagcaagaaguucaagccggaaauagcaauaagacccaaagugagggaucaagaagggagaaugaacuauuacuggacacuaguagagccgggagacaaaauaacauucgaagcaacuggaaaucuagugguaccgagauaugcauucgcaauggaaagaaaugcuggaucugguauuaucauuucagauacaccaguccacgauugcaauacaacuugucagacacccaagggugcuauaaacaccagccucccauuucagaauauacauccgaucacaauuggaaaauguccaaaauauguaaaaagcacaaaauugagacuggccacaggauugaggaaugucccgucuauucaaucuagaggccuauuuggggccauugccgguuucauugaagggggguggacagggaugguagauggaugguacgguuaucaccaucaaaaugagcaggggucaggauaugcagccgaccugaagagcacacagaaugccauugacgagauuacuaacaaaguaaauucuguuauugaaaagaugaauacacaauucacagcaguagguaaagaguucaaccaccuggaaaaaagaauagagaauuuaaauaaaaaaguugaugaugguuuccuggacauuuggacuuacaaugccgaacuguugguucuauuggaaaaugaaagaacuuuggacuaccacgauucaaaugugaagaacuuauaugaaaagguaagaagccaguuaaaaaacaaugccaaggaaauuggaaacggcugcuuugaauuuuaccacaaaugcgauaacacgugcauggaaagugucaaaaaugggacuuaugacuacccaaaauacucagaggaagcaaaauuaaacagagaagaaauagaugggguaaagcuggaaucaacaaggauuuaccagauuuuggcgaucuauucaacugucgccaguucauugguacugguagucucccugggggcaaucaguuucuggaugugcucuaaugggucucuacaguguagaauauguauuuaa

SEQ ID NO: 41263 - RNA, 1701 nt, Artificial Sequence
  derived and/or modified CDS sequence (wt) from hemagglutinin__InfluenzaA__AFN18121
augaaggcaauacuaguaguucugcuauauacauuugcaaccgcaaaugcagacacauuauguauagguuaucaugcgaacaauucaacagacacuguagacacaguacuagaaaagaauguaacaguaacacacucuguuaaccuucuagaagacaagcauaacgggaaacuaugcaaacuaagagggguagccccauugcauuuggguaaauguaacauugcuggcuggauccugggaaauccagagugugaaucacucuccacagcaagcucaugguccuacauuguggaaacaucuaguucagacaauggaacguguuacccaggagauuucaucgauuaugaggagcuaagagagcaauugagcucagugucaucauuugaaagguuugagauauuccccaagacaaguucauggcccaaucaugacucgaacaaagguguaacggcagcauguccucaugcuggagcaagaagcuucuacaaaaauuuaauauggcuaguuaaaaaaggaaauucauacccaaagcucagcaaauccuacauuaaugauaaagggaaagaaguccucgugcuauggggcauucaccauccaucuacuagugcugaccaacaaagucucuaucagaaugcagaugcauauguuuuuguggggacaucaagauacagcaagaaguucaagccggaaauagcaauaagacccaaagugagggaucaagaagggagaaugaacuauuacuggacacuaguagagccgggagacaaaauaacauucgaagcaacuggaaaucuagugguaccgagauaugcauucgcaaugguaagaaaugcuggaucugguauuaucauuucagauacaccaguccacgauugcaauacaacuugucagacacccaagggugcuauaaacaccagccucccauuucagaauauacauccgaucacaauuggaaaauguccaaaauauguaaaaagcacaaaauugagacuggccacaggauugaggaaugucccgucuauucaaucuagaggccuauuuggggccauugccgguuucauugaagggggguggacagggaugguagauggaugguacgguuaucaccaucaaaaugagcaggggucaggauaugcagccgaccugaagagcacacagaaugccauugacgagauuacuaacaaaguaaauucuguuauugaaaagaugaauacacaguucacagcaguagguaaagaguucaaccaccuggaaaaaagaauagagaauuuaaauaaaaaaguugaugaugguuuccuggacauuuggacuuacaaugccgaacuguugguucuauuggaaaaugaaagaacuuuggacuaccacgauucaaaugugaagaacuuauaugaaaagguaagaagccaguuaaaaaacaaugccaaggaaauuggaaacggcugcuuugaauuuuaccacaaaugcgauaacacgugcauggaaagugucaaaaaugggacuuaugacuacccaaaauacucagaggaagcaaaauuaaacagagaagaaauagaugggguaaagcuggaaucaacaaggauuuaccagauuuuggcgaucuauucaacugucgccaguucauugguacugguagucucccugggggcaaucaguuucuggaugugcucuaaugggucucuacaguguagaauauguauuuaa

SEQ ID NO: 41264 - RNA, 1701 nt, Artificial Sequence; identical to SEQ ID NO: 41261
  derived and/or modified CDS sequence (wt) from hemagglutinin__InfluenzaA__AFN18133

SEQ ID NO: 41265 - RNA, 1701 nt, Artificial Sequence
  derived and/or modified CDS sequence (wt) from hemagglutinin__InfluenzaA__AFN18135
augaaggcaauacuaguaguucugcuauauacauuugcaaccgcaaaugcagacacauuauguauagguuaucaugcgaacaauucaacagacacuguagacacaguacuagaaaagaauguaacaguaacacacucuguuaaccuucuagaagacaagcauaacgggaaacuaugcaaacuaagagggguagccccauugcauuuggguaaauguaacauugcuggcuggauccugggaaauccagagugugaaucacucuccacagcaagcucaugguccuacauuguggaaacaucuaguucagacaauggaacauguuacccaggagauuucaucgauuaugaggagcuaagagagcaauugagcucagugucaucauuugaaagguuugagauauuccccaagacaaguucauggcccaaucaugacucgaacaaagguguaacggcagcauguccucaugcuggagcaaaaagcuucuacaaaaauuuaauauggcuaguuaaaaaaggaaauucauacccaaagcucagcaaauccuacauuaaugauaaagggaaagaaguccucgugcuauggggcauucaccauccaucuacuagugcugaccaacaaagucucuaucagaaugcagaugcauauguuuuuguggggacaucaagauacagcaagaaguucaagccggaaauagcaauaagacccaaagugagggaucaagaagggagaaugaacuauuacuggacacuaguagagccgggagacaaaauaacauucgaagcaacuggaaaucuagugguaccgagauaugcauucgcaauggaaagaaaugcuggaucugguauuaucauuucagauacaccaguccacgauugcaauacaacuugucagacacccaaggguucuauaaacaccagccucccauuucagaauauacauccgaucacaauuggaaaauguccaaaauauguaaaaagcacaaaauugagacuggccacaggauugaggaaugucccuucuauucaaucuagaggccuauuuggggccauugccgguuucauugaagggggguggacagggaugguagauggaugguacgguuaucaccaucaaaaugagcaggggucaggauaugcagccgaccugaagagcacacagaaugccauugacgagauuacuaacaaaguaaauucuguuauugaaaagaugaauacacaguucacagcaguagguaaagaguucaaccaccuggaaaaaagaauagagaauuuaaauaaaaaaguugaugaugguuuccuggacauuuggacuuacaaugccgaacuguugguucuauuggaaaaugaaagaacuuuggacuaccacgauucaaaugugaagaacuuauaugaaaagguaagaagccaguuaaaaaacaaugccaaggaaauuggaaacggcugcuuugaauuuuaccacaaaugcgauaacacgugcauggaaagugucaaaaaugggacuuaugacuacccaaaauacucagaggaagcaaaauuaaacagagaagaaauagaugggguaaagcuggaaucaacaaggauuuaccagauuuuggcgaucuauucaacugucgccaguucauugguacugguagucucccugggggcaaucaguuucuggaugugcucuaaugggucucuacaguguagaauauguauuuaa

SEQ ID NO: 41266 - RNA, 1701 nt, Artificial Sequence; identical to SEQ ID NO: 35523
  derived and/or modified CDS sequence (wt) from hemagglutinin__InfluenzaA__AFN18137

SEQ ID NO: 41267 - RNA, 1701 nt, Artificial Sequence
  derived and/or modified CDS sequence (wt) from hemagglutinin__InfluenzaA__AFN18139
auggaggcaauacuaguaguucugcuauauacauuugcaaccgcaaaugcagacacauuauguauagguuaucaugcgaacaauucaacagacacuguagacacaguacuagaaaagaauguaacaguaacacacucuguuaaccuucuagaagacaagcauaacgggaaacuaugcaaacuaagagggguagccccauugcauuuggguaaauguaacauugcuggcuggauccugggaaauccagagugugaaucacucuccacagcaagcucaugguccuacauuguggaaacaucuaguucagacaauggaacguguuacccaggagauuucaucgauuaugaggagcuaagagagcaauugagcucagugucaucauuugaaagguuugagauauuccccaagacaaguucauggcccaaucaugacucgaacaaagguguaacggcagcauguccucaugccggagcaaaaagcuucuacaaaaauuuaauauggcuaguuaaaaaaggaaauucauacccaaagcucagcaaauccuacauuaaugauaaagggaaagaaguccucgugcuauggggcauucaccauccaucuacuagugcugaccaacaaggucucuaucagaaugcagaugcauauguuuuuguggggucaucaagauacagcaagaaguucaagccggaaauagcaauaagacccaaagugagggaucaagaagggagaaugaacuauuacuggacacuaguagagccgggagacaaaauaacauucgaagcaacuggaaaucuagugguaccgagauaugcauucgcaauggaaagaaaugcuggaucugguauuaucauuucagauacaccaguccacgauugcaauacaacuugucagacacccaagggugcuauaaacaccagccucccauuucauaauauacauccgaucacaauuggaaaauguccaaaauauguaaaaagcacaaaauugagacuggccacaggauugaggaaugucccgucuauucaaucuagaggccuauuuggggccauugccgguuucauugaagggggguggacagggaugguggauggaugguacgguuaucaccaucaaaaugagcaggggucaggauaugcagccgaucugaagagcacacagaaugccauugacgagauuacuaacaaaguaaauucuguuauugaaaagaugaauacacaguucacagcaguagguaaagaguucaaccaucuggaaaaaagaauagagaauuuaaauaaaaaaguugaugaugguuuccuggacauuuggacuuacaaugccgaacuguugguucuauuggaaaaugaaagaacuuuggacuaccacgauucaaaugugaagaacuuauaugaaaagguaagaagccaguuaaaaaacaaugccaaggaaauuggaaacggcugcuuugaauuuuaccacaaaugcgauaacacgugcauggaaagugucaaaaaugggacuuaugacuacccaaaauacucagaggaagcaaaauuaaacagagaagaaauagaugggguaaagcuggaaucaacaaggauuuaccagauuuuggcgaucuauucaacugucgccaguucauugguacugguagucucccugggggcaaucaguuucuggaugugcucuaaugggucucuacaguguagaauauguauuuaa

SEQ ID NO: 41268 - RNA, 1701 nt, Artificial Sequence; identical to SEQ ID NO: 41263
  derived and/or modified CDS sequence (wt) from hemagglutinin__InfluenzaA__AFN18141

SEQ ID NO: 41269 - RNA, 1701 nt, Artificial Sequence; identical to SEQ ID NO: 35542
  derived and/or modified CDS sequence (wt) from hemagglutinin__InfluenzaA__AFN18148

SEQ ID NO: 41270 - RNA, 1701 nt, Artificial Sequence; identical to SEQ ID NO: 35845
  derived and/or modified CDS sequence (wt) from hemagglutinin__InfluenzaA__AFN18155

SEQ ID NO: 41271 - RNA, 1701 nt, Artificial Sequence
  derived and/or modified CDS sequence (wt) from hemagglutinin__InfluenzaA__AFN18157
augaaggcaauacuaguaguucugcuauauacauuugcaaccgcaaaugcagacacauuauguauagguuaucaugcgaacaauucaacagacacuguagacacaguacuagaaaagaauguaacaguaacacacucuguuaaccuucuagaagacaagcauaacgggaaacuaugcaaacuaagagggguagccccauugcauuuggguaaauguaacauugcuggcuggauccugggaaauccagagugugaaucacucuccacagcaagcucaugguccuacauuguggaaacaucuaguucaggcaauggaacguguuacccaggagauuucaucgauuaugaggagcuaagagagcaauugagcucagugucaucauuugaaagguuugaaauauuccccaagacaaguucauggcccaaucaugacucgaacaaagguguaacggcagcauguccucaugcuggagcaaaaagcuucuacaaaaauuuaauauggcuaguuaaaaaaggaaacucauacccaaagcucagcaaauccuacauuaaugauaaagggaaagaaguccucgugcuauggggcauucaccauccaucuacuagugcugaccaacaaagucucuaucagaaugcagaugcauaugcuuuuguggggacaucaagauacagcaagaaguucaagccggaaauagcaauaagacccaaagugagggaucaagaagggagaaugaacuauuacuggacacuaguagagccgggagacaaaauaacauucgaagcaacuggaaaucuagugguaccgagauaugcauucgcaauggaaagaaaugcuggaucugguauuaucauuucagauacaccaguccacgauugcaauacaacuugucagacacccaagggugcuauaaacaccagccucccauuucagaacauacauccgaucacaauuggaaaauguccaaaauauguaaaaagcacaaaauugagacuggccacaggauugaggaaugucccgucuauucaaucuagaggccuauuuggggccauugccgguuucauugaagggggguggacagggaugguagauggaugguacgguuaucaccaucaaaaugagcaggggucaggauaugcagccgaccugaagagcacacagaaugccauugacgagauuacuaacaaaguaaauucuguuauugaaaagaugaauacacaguucacagcaguagguaaagaguucaaccaccuggaaaaaagaauagagaauuuaaauaaaaagguugaugaugguuuccuggacauuuggacuuacaaugccgaacuguugguucuauuggaaaaugaaagaacuuuggacuaccacgauucaaaugugaagaacuuauaugaaaagguaagaagccaguuaaaaaacaaugccaaggaaauuggaaacggcugcuuugaauuuuaccacaaaugcgauaacacgugcauggaaagugucaaaaaugggacuuaugacuacccaaaauacucagaggaagcaaaauuaaacagagaagaaauagaugggguaaagcuggaaucaacaaggauuuaccagauuuuggcgaucuauucaacugucgccaguucauugguacugguagucucccugggggcaaucaguuucuggaugugcucuaaugggucucuacaguguagaauauguauuuaa

SEQ ID NO: 41272 - RNA, 1701 nt, Artificial Sequence
  derived and/or modified CDS sequence (wt) from hemagglutinin__InfluenzaA__AFN18159
auggaggcaauacuaguaguucugcuauauacauuugcaaccgcaaaugcagacacauuauguauagguuaucaugcgaacaauucaacagacacuguagacacaguacuagaaaagaauguaacaguaacacacucuguuaaccuucuagaagacaagcauaacgggaaacuaugcaaacuaagagggguagccccauugcauuuggguaaauguaacauugcuggcuggauccugggaaauccagagugugaaucacucuccacagcaagcucaugguccuacauuguggaaacaucuaguucagacaauggaacguguuacccaggagauuucaucgauuaugaggagcuaagagagcaauugagcucagugucaucauuugaaagguuugagauauuccccaagacaaguucauggcccaaucaugacucgaacaaagguguaacggcagcauguccucaugccggaucaaaaagcuucuacaaaaauuuaauauggcuaguuaaaaaaggaaauucauacccaaagcucagcaaauccuacauuaaugauaaagggaaagaaguccucgugcuauggggcauucaccauccaucuacuagugcugaccaacaaagucucuaucagaaugcagaugcauauguuuuuguggggucaucaagauacagcaagaaguucaagccggaaauagcaauaagacccaaagugagggaucaagaagggagaaugaacuauuacuggacacuaguagagccgggagacaaaauaacauucgaagcaacuggaaaucuagugguaccgagauaugcauucgcaauggaaagaaaugcuggaucugguauuaucauuucagauacaccaguccacgauugcaauacaacuugucagacacccaagggugcuauaaacaccagccucccauuucauaauauacauccgaucacaauuggaaaauguccaaaauauguaaaaagcacaaaauugagacuggccacaggauugaggaaugucccgucuauucaaucuagaggccuauuuggggccauugccgguuucauugaagggggguggacagggaugguggauggaugguacgguuaucaccaucaaaaugagcaggggucaggauaugcagccgaccugaagagcacacagaaugccauugacgagauuacuaacaaaguaaauucuguuauugaaaagaugaauacacaguucacagcaguagguaaagaguucaaccaucuggaaaaaagaauagagaauuuaaauaaaaaaguugaugaugguuuccuggacauuuggacuuacaaugccgaacuguugguucuauuggaaaaugaaagaacuuuggacuaccacgauucaaaugugaagaacuuauaugaaaagguaagaaaccaguuaaaaaacaaugccaaggaaauuggaaacggcugcuuugaauuuuaccacaaaugcgauaacacgugcauggaaagugucaaaaaugggacuuaugacuacccaaaauacucagaggaagcaaaauuaaacagagaagaaauagaugggguaaagcuggaaucaacaaggauuuaccagauuuuggcgaucuauucaacugucgccaguucauugguacugguagucucccugggggcaaucaguuucuggaugugcucuaaugggucucuacaguguagaauauguauuuaa

SEQ ID NO: 41273 - RNA, 1701 nt, Artificial Sequence
  derived and/or modified CDS sequence (wt) from hemagglutinin__InfluenzaA__AFN18164
augaaggcaauacuaguaguucugcuauauacauuugcaaccacaaaugcagacacauuauguauagguuaucaugcgaacaauucaacagacacuguagacacagugcuagaaaagaauguaacaguaacacacucuguuaaccuucuagaagacaagcauaacgggaaacuaugcaaacuaagagggguagccccauugcauuuggguaaauguaacauugcuggcuggauccugggaaauccagagugugaaucacucuccacagcaagcucaugguccuacauuguggaaacaucuaguucagacaauggaacguguuacccaggagauuucaucgauuaugaggagcuaagagagcaauugagcucagugucaucauuugaaagguuugagauauuccccaagacaaguucauggcccaaucaugacucgaacaaagguguaacggcagcauguccucaugcuggagcaaaaagcuucuacaaaaauuuaauauggcuaguuaaaaaaggaaauucauacccaaagcucagcaaauccuacauuaaugauaaagggaaagaaguccucgugcuauggggcauucaccauccaucuacuagugcugaccaacaaagucucuaucagaaugcagaugcauauguuuuuguggggacaucaagauacagcaagaaguucaagccggaaauagcaauaagacccaaagugagggaucaagaagggagaaugaacuauuacuggacacuaguagagccgggagacaaaauaacauucgaagcaacuggaaaucuaauaguaccgagauaugcauucgcaauggaaagaaaugcuggaucugguauuaucauuucaaauacaccaguccacgauugcaauacaacuugucagacacccaagggugcuauaaacaccagccucccauuucagaauauacauccgaucacaauuggaaaauguccaaaauauguaaaaagcacaaaauugagacuggccacaggauugaggaaugucccgucuauucaaucuagaggccuauuuggggccauugccgguuucauugaagggggguggacagggaugguagauggaugguacgguuaucaccaucaaaaugagcaggggucaggauaugcagccgaccugaagagcacacagaaugccauugacaagauuacuaacaaaguaaauucuguuauugaaaagaugaauacacaguucacagcaguagguaaagagcucaaccaccuggaaaaaagaauagagaauuuaaauaaaaaaguugaugaugguuuccuggacauuuggacuuacaaugccgaacuguugguucuauuggaaaaugaaagaacuuuggacuaccacgauucaaaugugaagaacuuauaugaaaagguaagaagccaguuaaaaaacaaugccaaggaaauuggaaacggcugcuuugaauuuuaccacaaaugcgauaacacgugcauggaaagugucaaaaaugggacuuaugacuacccaaaauacucagaggaagcaaaauuaaacagagaagaaauagaugggguaaagcuggaaucaacaaggauuuaccagauuuuggcggucuauucaacugucgccaguucauugguacugguagucucccugggggcaaucaguuucuggaugugcucuaaugggucucuacaguguagaauauguauuuaa

SEQ ID NO: 41274 - RNA, 1701 nt, Artificial Sequence
  derived and/or modified CDS sequence (wt) from hemagglutinin__InfluenzaA__AFN18171
augaaggcaauacuaguaguucugcuauauacauuugcaaccgcaaaugcagacacauuauguauagguuaucaugcgaacaauucaacagacacuguagacacaguacuagaaaagaauguaacaguaacacacucuguuaaccuucuagaagacaagcauagcgggaaacuaugcaaacuaagagggguagccccauugcauuuggguaaauguaacauugcuggcuggauccugggaaauccagagugugaaucacucuccacagcaagcucaugguccuacauuguggaaacaucuaguucagacaauggaaaguguuacccaggagauuucaucgauuaugaggagcuaagagagcaauugagcucagugucaucauuugaaagguuugagauauuccccaagacaaguucauggcccaaucaugacucgaacaaagguguaacggcagcauguccucaugcuggagcaaaaagcuucuacaaaaauuuaauauggcuaguuaaaaaaggaaauucauacccaaagcucagcaaauccuacauuaaugauaaagggaaagaaguccucgugcuauggggcauucaccauccaucuacuagugcugaccaacaaagucucuaucagaaugcagaugcauauguuuuuguggggacaucaaaauacagcaagaaguucaagccggaaauagcaauaagacccaaagugagggaucaagaagggagaaugaacuauuacuggacacuaguagagccgggagacaaaauaacauucgaagcaacuggaaaucuagugguaccgagauaugcauucgcaauggaaagaaaugcuggaucugguauuaucauuucagauacaccagucaaagauugcaauacaacuugucagacacccaagggugcuauaaacaccagccucccauuucagaauauacauccgaucacaauuggaaaauguccaaaauauguaaaaagcacaaaauugagacuggccacaggauugaggaaugucccgucuauucaaucuagaggccuauuuggggccauugccgguuucauugaagggggguggacagggaugguagauggaugguacgguuaucaccaucaaaaugagcaggggucaggauaugcagccgaccugaagagcacacagaaugccauugacgagauuacuaacaaaguaaauucuguuauugaaaagaugaauacacaguucacagcaguagguaaagaguucaaccaccuggaaaaaagaauagagaauuuaaauaaaaaaguugaugaugguuuccuggacauuuggacuuacaaugccgaacuguugguucuauuggaaaaugaaagaacuuuggacuaccacgauucaaaugugaagaacuuauaugaaaagguaagaagccaguuaaaaaacaaugccaaggaaauuggaaacggcugcuuugaauuuuaccacaaaugcgauaacacgugcauggaaagugucaaaaaugggacuuaugacuacccaaaauacucagaggaagcaaaauuaaacagagaagaaauagaugggguaaagcuggaaucaacaaggauuuaccagauuuuggcgaucuauucaacugucgccaguucauugguacugguagucucccugggggcaaucaguuucuggaugugcucuaaugggucucuacaguguagaauauguauuuaa

SEQ ID NO: 41275 - RNA, 1701 nt, Artificial Sequence
  derived and/or modified CDS sequence (wt) from hemagglutinin__InfluenzaA__AFN18176
augaaggcaauacuaguaguucugcuauauacauuugcaaccgcaaaugcagacacauuauguauagguuaucaugcgaacaauucaacagacacuguagacacaguacuggaaaagaauguaacaguaacacacucuguuaaccuucuagaagacaagcauaacgggaaacuaugcaaacuaagagggguagccccauugcauuuggguaaauguaacauugcuggcuggauccugggaaauccagagugugaaucacucuccacagcaagcucaugguccuacauuguggaaacaucuaguucagacaauggaacguguuacccaggagauuucaucgauuaugaggagcuaagagagcaauugagcucagugucaucauuugaaagguuugagauauuccccaagacaaguucauggcccaaucaugacucgaacaaagguguaacggcagcauguccucaugcuggagcaaaaagcuucuacaaaaauuuaauauggcuaguuaaaaaaggaaauucauacccaaagcucagcaaauccuacauuaaugauaaagggaaagaaguccucgugcuauggggcauucaccauccaucuacuagugcugaccaacaaagucucuaucagaaugcagaugcauauguuuuuguggggacaucaagauacagcaagaaguucaagccggagauagcaauaagacccaaagugagggaucaagaagggagaaugaacuauuacuggacacuaguagagccgggagacaaaauaacauucgaagcaacuggaaaucuauugguaccgagauaugcauucgcaauggaaagaaaugcuggaucugguauuaucauuucagauacaccaguccacgauugcaauacaacuugucagacacccaagggugcuauaaacaccagccucccauuucagaauauacauccgaucacaauuggaaaauguccaaaauauguaaaaagcacaaaauugagacuggccacaggauugaggaauaucccgucuauucaaucuagaggccuauuuggggccauugccgguuucauugaagggggguggacagggaugguagauggaugguacgguuaucaccaucaaaaugagcaggggucaggauaugcagccgaccugaagagcacacagaaugccauugacgagauuacuaacaaaguaaauucuguuauugaaaagaugaauacacaguucacagcaguagguaaagaguucaaccaccuggaaaaaagaauagagaauuuaaauaaaaaaguugaugaugguuuccuggacauuuggacuuacaaugccgaacuguugguucuauuggaaaaugaaagaacuuuggacuaccacgauucaaaugugaagaacuuauaugaaaagguaagaagccaguuaaaaaacaaugccaaggaaauuggaaacggcugcuuugaauuuuaccacaaaugcgauaacacgugcauggaaagugucaaaaaugggacuuaugacuacccaaaauacucagaggaagcaaaauuaaacagagaagaaauagaugggguaaagcuggaaucaacaaggauuuaccagauuuuggcgaucuauucaacugucgccaguucauugguacugguagucucccugggggcaaucaguuucuggaugugcucuaaugggucucuacaguguagaauauguauuuaa

SEQ ID NO: 41276 - RNA, 1701 nt, Artificial Sequence
  derived and/or modified CDS sequence (wt) from hemagglutinin__InfluenzaA__AFN18183
augaaggcaauacuaguaguucugcuauauacauuugcaaccgcaaaugcagacacauuauguauagguuaucaugcgaacaauucaacagacacuguagacacaauacuagaaaagaauguaacaguaacacacucuguuaaccuucuagaagacaagcauaacgggaaacuaugcaaacuaagagggguagccccauugcaucuggguaaauguaacauugcuggcuggauccugggaaauccagagugugaaucacucuccacagcaagcucaugguccuacauuguggaaacaucuaguucagacaauggaacguguuacccaggagauuucaucgauuaugaggagcuaagagagcaauugagcucagugucaucauuugaaagguuugagauauuccccaagacaaguucauggcccaaucaugacucgaacaaagguguaacggcagcauguccucaugcuggagcaaaaagcuucuacaaaaauuuaauauggcuaguuaaaaaaggaaauucauacccaaagcucagcaaauccuacauuaaugauaaagggaaagaaguccucgugcuauggggcauucaccauccaucuacuagugcugaccaacaaagccucuaucagaaugcagaugcauauguuuuuguggggacaucaagauacagcaagaaguucaagccggaaauagcaauaagacccaaagugagggaucaagaagggagaaugaacuauuacuggacacuaguagagccgggagacaaaauaacauucgaagcaacuggaaaucuaaugguaccgagauaugcauucgcaauggaaagaaaugcuggaucugguauuaucauuucagauacaccaguccacgauugcaauacaacuugucagacacccaagggugcuauaaacaccagccucccauuucagaauauacauccgaucacaauuggaaaauguccaaaauauguaaaaagcacaaaauugagacuggccacaggauugaggaaugucccgucuauucaaucuagaggccuauuuggggccauugccgguuucauugaagggggguggacagggaugguagauggaugguacgguuaucaucaucaaaaugagcaggggucaggauaugcagccgaccugaagagcacacagaaugccauugacgagauuacuaacaaaguaaauucuguuauugaaaagaugaauacacaguucacagcaguagguaaagaguucaaccaccuggaaaaaagaauagagaauuuaaauaaaaagguugaugaugguuuccuggacauuuggacuuacaaugccgaacuguugguucuauuggaaaaugaaagaacuuuggacuaccacgauucaaaugugaagaacuuauaugaaaagguaagaagccaguuaaaaaacaaugccaaggaaauuggaaacggcugcuuugaauuuuaccacaaaugcgauaacacgugcauggaaagugucaaaaauggaacuuaugacuacccaaaauacucagaggaagcaaaauuaaacagagaagaaauagaugggguaaagcuggaaucaacaaggauuuaccagauuuuggcgaucuauucaacugucgccaguucauugguacugguagucucccugggggcaaucaguuucuggaugugcucuaaugggucucuacaguguagaauauguauuuaa

SEQ ID NO: 41277 - RNA, 1701 nt, Artificial Sequence; identical to SEQ ID NO: 37024
  derived and/or modified CDS sequence (wt) from hemagglutinin__InfluenzaA__AFN18195

SEQ ID NO: 41278 - RNA, 1701 nt, Artificial Sequence
  derived and/or modified CDS sequence (wt) from hemagglutinin__InfluenzaA__AFN18200
augaaggcaauacuaguaguucugcuauacacauuugcaaccgcaaaugcagacacauuauguauagguuaucaugcgaacaauucaacagacacuguagacacaguacuagaaaagaauguaacaguaacacacucuguuaaccuucuagaagacaagcauaacgggaaacuaugcaaacuaagagggguagccccauugcauuuggguaaauguaacauugcuggcuggauccugggaaauccagagugugaaucacucuccacagcaagcucaugguccuacauuguggaaacaucuaguucagacaauggaacguguuacccaggagauuucaucgauuaugaggagcuaagagagcaauugagcucagugucaucauuugaaagguuugagauauuccccaagacaaguucauggcccaaucaugacucgaacaaagguguaacggcagcauguccucaugcuggagcaaaaagcuucuacaaaaauuuaauauggcuaguuaaaaaaggaaauucauacccaaagcucagcaaauccuacauuaaugauaaagggaaagaaguccucgugcuauggggcauucaccauccaucuacuagugcugaccaacaaagucucuaucagaaugcagaugcauauguuuuuguggggacaucaagauacagcaagaaguucaagccggaaauagcaauaagacccaaagugagggaucaagaagggagaaugaacuauuacuggacacuaguagagccgggagacaaaauaacauucgaagcaacuggaaaucuagugguaccgagauaugcauucgcaauggaaagaaaugcuggaucugguauuaucauuucagauacaccaguccacgauugcaauacaacuugucagacacccaagggugcuauaaacaccagccucccauuucagaauauacauccgaucacaauuggaaaauguccaaaauauguaaaaagcacaaaauugagacuggccacaggauugaggaaugucccgucuauucaaucuagaggccuauuuggggccauugccgguuucauugaagggggguggacagggaugguagauggaugguacgguuaucaccaucaaaaugagcaggggucaggauaugcagccgaccugaagagcacacagaaugccauugacgagauuacuaacaaaguaaauucuguuauugaaaagaugaauacacaguucacagcaguagguaaagaguucaaccaccuggaaaaaagaauagagaauuuaaauaaaaaaguugaugaugguuuccuggacauuuggacuuacaaugccgaacuguugguucuauuggaaaaugaaagaacuuuggacuaccacgauucaaaugugaagaacuuauaugaaaagguaagaagccaguuaaaaaacaaugccaaggaaauuggaaacggcugcuuugaauuuuaccacaaaugcgauaacacgugcauggaaagugucaaaaaugggacuuaugacuacccaaaauacucagaggaagcaaaauuaaacagagaagaaauagaugggguaaagcuggaaucaacaaggauuuaccagauuuuggcgaucuauucaacugucgccaguucauugguacugguagucucccugggggcaaucaguuucuggaugugcucuaaugggucucuacaguguagaauauguauuuaa

SEQ ID NO: 41279 - RNA, 1701 nt, Artificial Sequence
  derived and/or modified CDS sequence (wt) from hemagglutinin__InfluenzaA__AFN18207
augaaggcaauacuaguaguucugcuauauacauuugcaaccgcaaaugcagacacauuauguauagguuaucaugcgaacaauucaacagacacuguagacacaguacuagaaaagaauguaacaguaacacacucuguuaaccuucuagaagacaagcauaacgggaaacuaugcaaacuaagagggguagccccauugcauuuggguaaauguaacauugcuggcuggauccugggaaauccagagugugaaucacucuccacagcaagcucaugguccuacauuguggaaacaucuaguucagacaauggaacguguuacccaggagauuucaucgauuaugaggagcuaagagagcaauugagcucagugucaucauuugaaagguuugagauauuccccaagacaaguucauggcccaaucaugacucgaacaaagguguaacggcagcauguccucaugcuggagcaaaaagcuucuacaaaaguuuaauauggcuaguuaaaaaaggaaauucauacccaaagcucagcaaauccuacauuaaugauaaagggagagagguccucgugcuauggggcauucaccauccaucuacuagugcugaccaacaaagucucuaucagaaugcagaugcauauguuuuuguggggacaucaagauacagcaagaaguucaagccggaaauagcaauaagacccaaagugagggaucaagaagggagaaugaacuauuacuggacacuaguagagccgggagacaaaauaacauucgaagcaacuggaaaucuagugguaccgagauaugcauucgcaauggaaagaaaugcuggaucugguauuaucauuucagauacaccaguccacgauugcaauacaacuugucagacacccaagggugcuauaaacaccagccucccauuucagaauauacauccgaucacaauuggaaaauguccaaaauauguaaaaagcacaaaauugagacuggccacaggauugaggaaugucccgucuauucaaucuagaggccuauuuggggccauugccgguuucauugaagggggguggacagggaugguagauggaugguacgguuaucaccaucaaaaugagcaggggucaggauaugcagccgaccugaagagcacacagaaugccauugacgagauuacuaacaaaguaaauucuguuauugaaaagaugaauacacaguucacagcaguagguaaagaguucaaccaccuggaaaaaagaauagagaauuuaaauaaaaaaguugaugaugguuuccuggacauuuggacuuacaaugccgaacuguugguucuauuggaaaaugaaagaacuuuggacuaccacgauucaaaugugaagaacuuauaugaaaagguaagaagccaguuaaaaaacaaugccaaggaaauuggaaacggcugcuuugaauuuuaccacaaaugcgauaacacgugcauggaaagugucaaaaaugggacuuaugacuacccaaaauacucagaggaagcaaaauuaaacagagaagaaauagaugggguaaagcuggaaucaacaaggauuuaccagauuuuggcgaucuauucaacugucgccaguucauugguacugguagucucccugggggcaaucaguuucuggauguguucuaaugggucucuacaguguagaauauguauuuaa

SEQ ID NO: 41280 - RNA, 1701 nt, Artificial Sequence
  derived and/or modified CDS sequence (wt) from hemagglutinin__InfluenzaA__AFN18214
augaaggcaauacuaguaguucugcuauauacauuugcaaccgcaaaugcagacacauuauguauagguuaucaugcgaacaauucaacagacacuguagacacaguacuagaaaagaauguaacaguaacacacucuguuaacauucuagaagacaagcauaacgggaaacuaugcaaacuaagagggguagccccauugcauuuggguaaauguaacauugcuggcuggauccugggaaauccagagugugaaucacucuccacagcaagcucaugguccuacauuguggaaacaucuaguucagacaauggaacguguuacccaggagauuucaucaauuaugaggagcuaagagagcaauugagcucagugucaucauuugaaagguuugagauauuccccaagacaaguucauggcccaaucaugacucgaacaaagguguaacggcagcauguccucaugcuggagcaaaaagcuucuacaaaaauuuaauuuggcuaguuaaaaaaggaaauucauacccaaagcucagcaaauccuacauuaaugauaaagggaaagaaguccucgugcuauggggcauucaccauccaucuacuagugcugaccaacaaagucucuaucagaaugcagaugcauauguuuuuguggggucaucaagauacagcaagaaguucaagccggaaauagcaauuagacccaaagugagggaucaagaagggagaaugaacuauuacuggacacuaguagagccgggagacaaaauaacauucgaagcaacuggaaaucuagugguaccaagauaugcauucgcaauggaaagaaaugcuggaucugguauuaucauuucagauacaccaguccaugauugcaauacaacuugucagacacccaagggugcuauaaacaccagccucccauuucagaauauacauccgaucacaauuggaaaauguccaaaauauguaaaaagcacaaaauugagacuggccacaggauugaggaaugucccgucuauucaaucuagaggccuauuuggggccauugccgguuucauugaagggggguggacagggaugguagauggaugguacgguuaucaccaucaaaaugagcaggggucaggauaugcagccgaccugaagagcacacagaaugccauugacgagauuacuaacaaaguaaauucuguuauugaaaagaugaauacacaguucacagcaguagguaaagaguucaaccaccuggaaaaaagaauagagaauuuaaauaaaaaagucgaugaugguuuccuggacauuuggacuuacaaugccgaacuguugguucuauuggaaaaugaaagaacuuuggacuaccacgauucaaaugugaagaacuuauaugaaaagguaagaagccagcuaaaaaacaaugccaaggaaguuggaaacggcugcuuugaauuuuaccacaaaugcgauaacacgugcauggaaagugucaaaaaugggacuuaugacuacccaaaauacucagaggaagcaaaauuaaacagagaagaaauagaugggguaaagcuggaaucaacaaggauuuaccagauuuuggcgaucuauucaacugccgccaguucauugguacugguagucucccugggggcaaucaguuucuggaugugcucuaaugggucucuacaguguagaauauguauuuaa

SEQ ID NO: 41281 - RNA, 1701 nt, Artificial Sequence
  derived and/or modified CDS sequence (wt) from hemagglutinin__InfluenzaA__AFN18224
augaaggcaauacuaguaguucugcuauauacauuugcaaccgcaaaugcagacacauuauguauagguuaucaugcaaacaauucaacagacacuguagacacaguacuagaaaagaauguaacaguaacacacucuguuaaccuucuagaagacaagcauaacgggaaacuaugcaaacuaagagggguagccccauugcauuuggguaaauguaacauugcuggcuggauccugggaaauccagagugugaaucacucuccacagcaagcucaugguccuacauuguggaaacaucuaguucagacaauggaacguguuacccaggagauuucaucgauuaugaggagcuaagagagcaauugagcucagugucaucauuugaaagguuugagauauuccccaagacaaguucauggcccaaucaugacucgaacaaagguguaacggcagcauguccucaugcuggagcaaaaagcuucuacaaaaauuuaauauggcuaguuaaaaaaggaaauucauacccaaagcucagcaaauccuacauuaaugauaaagggaaagaaguccucgugcuauggggcauucaccauccaucuacuagugcugaccaacaaagucucuaucagaaugcagaugcauauguuuuuguggggacaucaaaauacagcaagaaguucaagccggaaauagcaauaagacccaaagugagggaucaagaagggagaaugaacuauuacuggacacuaguagagccgggagacaaaauaacauucgaagcaacuggaaaucuagugguaccgagauaugcauucgcaauggaaagaaaugcuggaucugguauuaucauuucagauacaccaguccacgauugcaauacaacuugucagacacccaagggugcuauaaacaccagccucccauuucagaauauacauccgaucacaauuggaaaauguccaaaauauguaaaaagcacaaaauugagacuggccacaggauugaggaaugucccgucuauucaaucuagaggccuauuuggggccauugccgguuucauugaagggggguggacagggaugguagauggaugguacgguuaucaccaucaaaaugagcaggggucaggauaugcagccgaccugaagagcacacagaaugccauugacgagauuacuaacaaaguaaauucuguuauugaaaagaugaauacacaguucacagcaguagguaaagaguucaaccacuuggaaaaaagaauagagaauuuaaauaaaaagguugaugaugguuuccuggacauuuggacuuacaaugccgaacuguugguucuauuggaaaaugaaagaacuuuggacuaccacgauucaaaugugaagaacuuauaugaaaagguaagaagccaguuaaaaaacaaugccaaggaaauuggaaacggcugcuuugaauuuuaccacaaaugcgauaacacgugcauggaaagugucaaaaaugggacuuaugacuacccaaaauacucagaggaagcaaaauuaaacagagaagaaauagaugggguaaagcuggaaucaacaaggauuuaccagauuuuggcgaucuauucaacugucgccaguucauugguacugguagucucccugggggcaaucaguuucuggaugugcucuaaugggucucuacaguguagaauauguauuuaa

SEQ ID NO: 41282 - RNA, 1701 nt, Artificial Sequence; identical to SEQ ID NO: 37024
  derived and/or modified CDS sequence (wt) from hemagglutinin__InfluenzaA__AFN18231

SEQ ID NO: 41283 - RNA, 1701 nt, Artificial Sequence
  derived and/or modified CDS sequence (wt) from hemagglutinin__InfluenzaA__AFN18233
augaaggcaauacuaguaguucugcuauauacauuugcaaccgcaaaugcagacacauuauguauagguuaucaugcgaacaauucaacagacacuguagacacaguacuagaaaagaauguaacaguaacacacucuguuaaccuucuagaagacaagcauaacgggaaacuaugcaaacuaagagggguagccccauugcauuuggguaaauguaacauugcuggcuggauccugggaaauccagagugugaaucacucuccacagcaagcucaugguccuacauuguggaaacaucuaguucagacaauggaacgugcuacccaggagauuucaucgauuaugaggagcuaagagagcaauugagcucagugucaucauuugaaagguuugagauauuccccaagacaaguucauggcccaaucaugacccgaacaaagguguaacggcagcauguccucaugcuggagcaaaaagcuucuacaaaaauuuaauauggcuaguuaaaaaaggaaauucauacccaaagcucagcaaauccuacauuaaugauaaagggaaagaaguccucgugcuauggggcauucaccauccaucuacuagugcugaccaacaaagucucuaucagaaugcagaugcauauguuuuuguggggacaucaagauacagcaggaaguucaagccggaaauagcaauaagacccaaagugagggaucaagaagggagaaugaacuauuacuggacacuaguagagccgggagacaaaauaacauucgaagcaacuggaaaucuagugguaccgagauaugcauucgcaauggaaagaaaugcuggaucugguauuaucauuucagauacaccaguccacgauugcaauacaacuugucagacacccaagggugcuauaaacaccagccucccauuucagaauauacauccgaucacaauuggaaaauguccaaaauauguaaaaagcacaaaauugagacuggccacaggauugaggaaugucccgucuauucaaucuagaggccuauuuggggccauugccgguuucauugaagggggguggacagggaugguagauggaugguacgguuaucaccaucaaaaugagcaggggucaggauaugcagccgaccugaagagcacacagaaugccauugacgagauuacuaacaaaguaaauucuguuauugaaaagaugaauacacaguucacagcaguagguaaagaguucaaccaccuggaaaaaagaauagagaauuuaaauaaaaaaguugaugaugguuuccuggacauuuggacuuacaaugccgaacuguugguucuauuggaaaaugaaagaacuuuggacuaccacgauucaaaugugaagaaauuauaugaaaagguaagaagccaguuaaaaaacaaugccaaggaaauuggaaacggcugcuuugaauuuuaccacaaaugcgauaacacgugcauggaaagugucaaaaaugggacuuaugacuacccaaaauacucagaggaagcaaaauuaaacagagaagaaauagaugggguaaagcuggaaucaacaaggauuuaccagauuuuggcgaucuauucaacugucgccaguucauugguacugguagucucccugggggcaaucaguuucuggaugugcucuaaugggucucuacaguguagaauauguauuuaa

SEQ ID NO: 41284 - RNA, 1701 nt, Artificial Sequence
  derived and/or modified CDS sequence (wt) from hemagglutinin__InfluenzaA__AFN18243
augaaggcaauacuaguaguucugcuauauacauuugcaaccgcaaaugcagacacauuauguauagguuaucaugcgaacaauucaacagacacuguagacacaguacuagaaaagaauguaacaguaacacacucuguuaaccuucuagaagacaagcauaacgggaaacuaugcaaacuaagagggguagccccauugcauuuggguaaauguaacauugcuggcuggauccugggaaauccagagugugaaucacucuccacagcaagcucaugguccuacauuguggaaacaucuaguucagacaauggaacguguuacccaggagauuucaucgauuaugaggagcuaagagagcaauugagcucagugucaucauuugaaagguuugagauauuccccaagacaaguucauggcccaaucaugacucgaacaaagguguaacggcagcauguccucaugcuggagcaaaaagcuucuacaaaaauuuaauauggcuaguuaaaaaaggaaauucauacccaaagcucagcaaauccuacauuaaugauaaagggaaagaaguccucgugcuauggggcauucaccauccaucuacuagugcugaccaacaaagucucuaucagaaugcagauacauauguuuuuguggggacaucaagauacagcaagaaguucaagccggaaauagcaauaagacccaaagugagggaucaagaagggagaaugaacuauuacuggacacuaguagagccgggagacaaaauaacauucgaagcaacuggaaaucuagugguaccgagauaugcauucgcaauggaaagaaaugcuggaucugguauuaucauuucagauacaccaguccacgauugcaauacaacuugucagacacccaagggugcuauaaacaccagccucccauuucagaauauacauccgaucacaauuggaaaauguccaaaauauguaaaaagcacaaaauugagacuggccacaggauugaggaaugucccgucuauucaaucuagaggccuauuuggggccauugccgguuucauugaagggggguggacagggaugguagauggaugguaugguuaucaccaucaaaaugagcaggggucaggauaugcagccgaccugaagagcacacagaaugccauugacgagauuacuaacaaaguaaauucuguuauugaaaagaugaauacacaguucacagcaguagguaaagaguucaaccaccuggaaaaaagaauagagaauuuaaauaaaaaaguugaugaugguuuccuggacauuuggacuuacaaugccgaacuguugguucuauuggaaaaugaaagaacuuuggacuaccacgauucaaaugugaagaacuuauaugaaaagguaagaagccaguuaaaaaacaaugccaaggaaauuggaaacggcugcuuugaauuuuaccacaaaugcgauaacacgugcauggaaagugucaaaaaugggacuuaugacuacccaaaauacucagaggaagcaaaauuaaacagagaagaaauagaugggguaaagcuggaaucaacaaggauuuaccagauuuuggcgaucuauucaacugucgccaguucauugguacugguagucucccugggggcaaucaguuucuggaugugcucuaaugggucucuacaguguagaauauguauuuaa

SEQ ID NO: 41285 - RNA, 1701 nt, Artificial Sequence
  derived and/or modified CDS sequence (wt) from hemagglutinin__InfluenzaA__AFN18245
augaaggcaauacuaguaguucugcuauauauauuugcaaccgcaaaugcagacacauuauguauagguuaucaugcgaacaauucaacagacacuguagacacaguacuagaaaagaauguaacaguaacacacucuguuaaccuucuagaagacaagcauaacgggaaacuaugcaaacuaagagggguagccccauugcauuuggguaaauguaacauugcuggcuggauccugggaaauccagagugugaaucacucuccacagcaagcucaugguccuacauuguggaaacaucuaguucagacaauggaacguguuacccaggagauuucaucgauuaugaggagcuaagagagcaauugagcucagugucaucauuugaaagguuugagauauuccccaagacaaguucauggcccaaucaugacucgaacaaagguguaacggcagcauguccucaugcuggagcaaaaagcuucuacaaaaauuuaauauggcuaguuaaaaaagggaauucauacccaaagcucagcaaauccuacauuaaugauaaagggaaagaaguccucgugcuauggggcauucaccauccaucuacuagugcugaccaacaaagucucuaucagaaugcagaugcauauguuuuuguggggacaucaagauacagcaagaaguucaagccggaaauagcaauaagacccaaagugagggaucaagaagggagaaugaacuauuacuggacacuaguagagccgggagacaaaauaacauucgaagcaacuggaaaucuagugguaccgagauaugcauucgcaauggaaagaaaugcuggaucugguauuaucauuucagauacaccaguccacgauugcaauacaacuugucagacacccaagggugcuauaaacaccagccucccauuucagaauauacauccgaucacaauuggaaaauguccaaaauauguaaaaagcacaaaauugagacuggccacaggauugaggaaugucccgucuauucaaucuagaggccuauuuggggccauugccgguuucauugaagggggguggacagggaugguagauggaugguacgguuaucaccaucaaaaugagcaggggucaggauaugcagccgaccugaagagcacacagaaugccauugacgagauuacuaacaaaguaaauucuguuauugaaaagaugaauacacaguucacagcaguagguaaagaguucaaccaccuggaaaaaagaauagagaauuuaaauaaaaagguugaugaugguuuccuggacauuuggacuuacaaugccgaacuguugguucuauuggaaaaugaaagaacuuuggacuaccacgauucaaaugugaagaacuuauaugaaaagguaagaagccaguuaaaaaacaaugccaaggaaauuggaaacggcugcuuugaauuuuaccacaaaugcgauaacacgugcauggaaagugucaaaaaugggacuuaugacuacccaaaauacucagaggaagcaaaauuaaacagagaagaaauagaugggguaaagcuggaaucaacaaggauuuaccagauuuuggcgaucuauucaacugucgccaguucauugguucugguagucucccugggggcaaucaguuucuggaugugcucuaaugggucucuacaguguagaauauguauuuaa

SEQ ID NO: 41286 - RNA, 1701 nt, Artificial Sequence; identical to SEQ ID NO: 41281
  derived and/or modified CDS sequence (wt) from hemagglutinin__InfluenzaA__AFN18255

SEQ ID NO: 41287 - RNA, 1701 nt, Artificial Sequence; identical to SEQ ID NO: 41284
  derived and/or modified CDS sequence (wt) from hemagglutinin__InfluenzaA__AFN18260

SEQ ID NO: 41288 - RNA, 1701 nt, Artificial Sequence; identical to SEQ ID NO: 41284
  derived and/or modified CDS sequence (wt) from hemagglutinin__InfluenzaA__AFN18267

SEQ ID NO: 41289 - RNA, 1701 nt, Artificial Sequence
  derived and/or modified CDS sequence (wt) from hemagglutinin__InfluenzaA__AFN18269
augaaggcaauacuaguaguucugcuauauacauuugcaaccgcaaaugcagacacauuauguauagguuaucaugcgaacaauucaacagacacuguagacacaguacuagaaaagaauguaacaguaacacacucuguuaaccuucuagaagacaagcauaacgggaaacuaugcaaacuaagagggguagccccauugcauuuggguaaauguaacauugcuggcuggauccugggaaauccagagugugaaucacucuccacagcaagcucaugguccuacauuguggaaacaucuaguucagacaauggaacguguuacccaggagauuucaucgauuaugaggagcuaagagagcaauugagcucagugucaucauuugaaaaguuugagauauuccccaagacaaguucauggcccaaucaugacucgaacaaagguguaacggcagcauguccucaugcuggagcaaaaagcuucuacaaaaauuuaauauggcuaguuaaaaaaggaaauucauacccaaagcucagcaaauccuacauuaaugauaaagggaaagaaguccucgugcuauggggcauucaccauccaucuacuagugcugaccaacaaagucucuaucagaaugcagaugcauauguuuuuguggggacaucaagauacagcaagaaguucaagccggaaauagcaauaagacccaaagugagggaucaagaagggagaaugaacuauuacuggacacuaguagagccgggagacaaaauaacauucgaagcaacuggaaaucuagugguaccgagauaugcauucgcaauggaaagaaaugcuggaucugguauuaucauuucagauacaccaguccacgauugcaauacaacuugucagacacccaagggugcuauaaacaccagccucccauuucagaauauacauccgaucacaauuggaaaauguccaaaauauguaaaaagcacaaaauugagacuggccacaggauugaggaaugucccgucuauucaaucuagaggccuauuuggggccauugccgguuucauugaagggggguggacagggaugguagauggaugguacgguuaucaccaucaaaaugagcaggggucaggauaugcagccgaccugaagagcacacagaaugccauugacgagauuacuaacaaaguaaauucuguuauugaaaagaugaauacacaguucacagcaguagguaaagaguucaaccaccuggaaaaaagaauagagaauuuaaauaaaaagguugaugaugguuuccuggacauuuggacuuacaaugccgaacuguugguucuauuggaaaaugaaagaacuuuggacuaccacgauucaaaugugaagaacuuauaugaaaagguaagaagccaguuaaaaaacaaugccaaggaaauuggaaacggcugcuuugaauuuuaccacaaaugcgauaacacgugcauggaaagugucaaaaaugggacuuaugacuacccaaaauacucagaggaagcaaaauuaaacagagaagaaauagaugggguaaagcuggaaucaacaaggauuuaccagauuuuggcgaucuauucaacugucgccaguucauugguacugguagucucccugggggcaaucaguuucuggaugugcucuaaugggucucuacaguguagaauauguauuuaa

SEQ ID NO: 41290 - RNA, 1701 nt, Artificial Sequence; identical to SEQ ID NO: 37022
  derived and/or modified CDS sequence (wt) from hemagglutinin__InfluenzaA__AFN18271

SEQ ID NO: 41291 - RNA, 1701 nt, Artificial Sequence; identical to SEQ ID NO: 37024
  derived and/or modified CDS sequence (wt) from hemagglutinin__InfluenzaA__AFN18273

SEQ ID NO: 41292 - RNA, 1701 nt, Artificial Sequence
  derived and/or modified CDS sequence (wt) from hemagglutinin__InfluenzaA__AFN18280
augaaggcaauacuaguaguucugcuauacacauuugcaaccgcaaaugcagacacauuauguauagguuaucaugcgaacaauucaacagacacuguagacacaguacuagaaaagaauguaacaguaacacacucuguuaaccuucuagaagacaagcauaacgggaaacuaugcaaacuaagagggguagccccauugcauuuggguaaauguaacauugcuggcuggauccugggaaauccagagugugaaucacucuccacagcaagcucaugguccuacauuguggaaacaucuaguucagacaauggaacguguuacccaggagauuucaucgauuaugaggagcuaagagagcaauugagcucagugucaucauuugaaagguuugagauauuccccaagacaaguucauggcccaaucaugacucgaacaaagguguaacggcagcauguccucaugcuggagcaaaaagcuucuacaaaaauuuaauauggcuaguuaaaaaaggaaauucauacccaaagcucagcaaaucauacauuaaugauaaagggaaagaaguccucgugcuauggggcauucaccauccaucuacuagugcugaccaacaaagucucuaucagaaugcagaugcauauguuuuuguggggacaucaagauacagcaagaaguucaagccggaaauagcaauaagacccaaagugagggaucaagaagggagaaugaacuauuacuggacacuaguagagccgggagacaaaauaacauucgaagcaacuggaaaucuagugguaccgagauaugcauucgcaauggaaagaaaugcuggaucugguauuaucauuucagauacaccaguccacgauugcaauacaacuugucagacacccaagggugcuauaaacaccagccucccauuucagaauauacauccgaucacaauuggaaaauguccaaaauauguaaaaagcacaaaauugagacuggccacaggauugaggaaugucccgucuauucaaucuagaggccuauuuggggccauugccgguuucauugaagggggguggacagggaugguagauggaugguacgguuaucaccaucaaaaugagcaggggucaggauaugcagccgaccugaagagcacacagaaugccauugacaagauuacuaacaaaguaaauucuguuauugaaaagaugaauacacaguucacagcaguagguaaagaguucaaccaccuggaaaaaagaauagagaauuuaaauaaaaaaguugaugaugguuuccuggacauuuggacuuacaaugccgaacuguugguucuauuggaaaaugaaagaacuuuggacuaccacgauucaaaugugaagaacuuauaugaaaagguaagaagccaguuaaaaaacaaugccaaggaaauuggaaacggcugcuuugaauuuuaccacaaaugcgauaacacgugcauggaaagugucaaaaaugggacuuaugacuacccaaaauacucagaggaagcaaaauuaaacagagaagaaauagaugggguaaagcuggaaucaacaaggauuuaccagauuuuggcgaucuauucaacugucgccaguucauugguacugguagucucccugggggcaaucaguuucuggaugugcucuaaugggucucuacaguguagaauauguauuuaa

SEQ ID NO: 41293 - RNA, 1701 nt, Artificial Sequence
  derived and/or modified CDS sequence (wt) from hemagglutinin__InfluenzaA__AFN18303
augaaggcaauacuaguaguucugcuauauacauuugcaaccgcaaaugcagacacauuauguauagguuaucaugcgaacaauucaacagacacuguagacacaguacuagaaaagaauguaacaguaacacacucuguuaaccuucuagaagacaagcauaacgggaaacuaugcaaacuaagagggguagccccauugcauuuggguaaauguaacauugcuggcuggauccugggaaauccagagugugaaucacucuccacagcaagcucaugguccuacauuguggaaacaucuaguucagacaauggaacguguuacccaggagauuucaucgauuaugaggagcuaagagagcaauugagcucagugucaucauuugaaagguuugagauauuccccaagacaaguucauggcccaaucaugacccgaacaaagguguaacggcagcauguccucaugcuggagcaaaaagcuucuacaaaaauuuaauauggcuaguuaaaaaaggaaauucauacccaaagcucagcaaauccuacauuaaugauaaagggaaagaaguccucgugcuauggggcauucaccauccaucuacuagugcugaucaacaaagucucuaucagaaugcagaugcauauguuuuuguggggacaucaagauacagcaagaaguucaagccggaaauagcaauaagacccaaagugagggaucaagaagggagaaugaacuauuacuggacacuaguagagccgggagacaaaauaacauucgaagcaacuggaaaucuagugguaccgagauaugcauucgcaauggaaagaaaugcuggaucugguauuaucauuucagauacaccaguccacgauugcaauacaacuugucagacacccaagggugcuauaaacaccagccucccauuucagaauauacauccgaucacaauuggaaaauguccaaaauauguaaaaagcacaaaauugagacuggccacaggauugaggaaugucccgucuauucaaucuagaggccuauuuggggccauugccgguuucauugaagggggguggacagggaugguagauggaugguacgguuaucaccaucaaaaugagcaggggucaggauaugcagccgaccugaagagcacacagaaugccauugacgagauuacuaacaaaguaaauucuguuauugaaaagaugaauacacaguucacagcaguagguaaagaguucaaccaccuggaaaaaagaauagagaauuuaaauaaaaaaguugaugaugguuuccuggacauuuggacuuacaaugccgaacuguugguucuauuggaaaaugaaagaacuuuggacuaccacgauucaaaugugaagaacuuauaugaaaagguaagaagccaguuaaaaaacaaugccaaggaaauuggaaacggcugcuuugaauuuuaccacaaaugcgauaacacgugcauggaaagugucaaaaaugggacuuaugacuacccaaaauacucagaggaagcaaaauuaaacagagaagaaauagaugggguaaagcuggaaucaacaaggauuuaccagauuuuggcgaucuauucaacugucgccaguucauugguacugguagucucccugggggcaaucaguuucuggaugugcucuaaugggucucuacaguguagaauauguauuuaa

SEQ ID NO: 41294 - RNA, 1701 nt, Artificial Sequence
  derived and/or modified CDS sequence (wt) from hemagglutinin__InfluenzaA__AFN18305
augaaggcaauacuaguaguucugcuauacacauuugcaaccgcaaaugcagacacauuauguauagguuaucaugcgaacaauucaacagacacuguagacacaguacuagaaaagaauguaacaguaacacacucugcuaaccuucuagaagacaagcauaacgggaaacuaugcaaacuaagagggguagccccauugcauuuggguaaauguaacauugcuggcuggauccugggaaauccagagugugaaucacucuccacagcaagcucaugguccuacauuguggaaacaucuaguucagacaauggaacguguuacccaggagauuucaucgauuaugaggagcuaagagagcaauugagcucagugucaucauuugaaagguuugagauauuccccaagacaaguucauggcccaaucaugacucgaacaaagguguaacggcagcauguccucaugcuggagcaaaaagcuucuacaaaaauuuaauauggcuaguuaaaaaaggaaauucauacccaaagcucagcaaaucauacauuaaugauaaagggaaagaaguccucgugcuauggggcauucaccauccaucuacuagugcugaccaacaaagucucuaucagaaugcagaugcauauguuuuuguggggacaucaagauacagcaagaaguucaagccggaaauagcaauaagacccaaagugagggaucaagaagggagaaugaacuauuacuggacacuaguagagccgggagacaaaauaacauucgaagcaacuggaaaucuagugguaccgagauaugcauucgcaauggaaagaaaugcuggaucugguauuaucauuucagauacaccaguccacgauugcaauacaacuugucagacacccaagggugcuauaaacaccagccucccauuucagaauauacauccgaucacaauuggaaaauguccaaaauauguaaaaagcacaaaauugagacuggccacaggauugaggaaugucccgucuauucaaucuagaggccuauuuggggccauugccgguuucauugaagggggguggacagggaugguagauggaugguacgguuaucaccaucaaaaugagcaggggucaggauaugcagccgaccugaagagcacacagaaugccauugacaagauuacuaacaaaguaaauucuguuauugaaaagaugaauacacaguucacagcaguagguaaagaguucaaccaccugggaaaaagaauagagaauuuaaauaaaaaaguugaugaugguuuccuggacauuuggacuuacaaugccgaacuguugguucuauuggaaaaugaaagaacuuuggacuaccacgauucaaaugugaagaacuuauaugaaaagguaagaagccaguuaaaaaacaaugccaaggaaauuggaaacggcugcuuugaauuuuaccacaaaugcgauaacacgugcauggaaagugucaaaaaugggacuuaugacuacccaaaauacucagaggaagcaaaauuaaacagagaagaaauagaugggguaaagcuggaaucaacaaggauuuaccagauuuuggcgaucuauucaacugucgccaguucauugguacugguagucucccugggggcaaucaguuucuggaugugcucuaaugggucucuacaguguagaauauguauuuaa

SEQ ID NO: 41295 - RNA, 1701 nt, Artificial Sequence
  derived and/or modified CDS sequence (wt) from hemagglutinin__InfluenzaA__AFN18307
augaaggcaauacuaguaguucugcuauauacauuugcagccgcaaaugcagacacauuauguauagguuaucaugcgaacaauucaacagacacuguagacacaguacuagaaaagaauguaacaguaacacacucuguuaaccuucuagaagacaagcauaacgggaaacuaugcaaacuaagagggguagccccauugcauuuggguaaauguaacauugcuggcuggauccugggaaauccagagugugaaucacucuccacagcaagcucaugguccuacauuguggaaacaucuaguucagacaauggaacguguuacccaggagauuucaucgauuaugaggagcuaagagagcaauugagcucagugucaucauuugaaagguuugagauauuccccaagacaaguucauggcccaaucaugacucgaacaaagguguaacggcagcauguccucaugcuggagcaaaaagcuucuacaaaaauuuaauauggcuaguuaaaaaaggaaauucauacccaaagcucagcaaauccuacauuaaugauaaagggaaagaaguccucgugcuauggggcauucaccauccaucuacuagugcugaccaacaaagucucuaucagaaugcagaugcauauguuuuuguggggacaucaagauacagcaagaaguucaagccggaaauagcaauaagacccaaagugagggaucaagaagggagaaugaacuauuacuggacacuaguagagccgggagacaaaauaacauucgaagcaacuggaaaucuagugguaccgagauaugcauucgcaauggaaagaaauacuggaucugguauuaucauuucagauacaccaguccacgauugcaauacaacuugucagacacccaagggugcuauaaacaccagccucccauuucagaauauacauccgaucacaauuggaaaauguccaaaauauguaaaaagcacaaaauugagacuggccacaggauugaggaaugucccgucuauucaaucuagaggccuauuuggggccauugccgguuucauugaagggggguggacagggaugguagauggaugguacgguuaucaccaucaaaaugagcaggggucaggauaugcagccgaccugaagagcacacagaaugccauugacaagauuacuaacaaaguaaauucuguuauugaaaagaugaauacacaguucacagcaguagguaaagaguucaaccaccuggaaaaaagaauagagaauuuaaauaaaaaaguugaugaugguuuccuggacauuuggacuuacaaugccgaacuguugguucuauuggaaaaugaaagaacuuuggacuaccacgauucaaaugugaagaacuuauaugaaaagguaagaagccaguuaaaaaacaaugccaaggaaauuggaaacggcugcuuugaauuuuaccacaaaugcgauaacacgugcauggaaagugucaaaaaugggacuuaugacuacccaaaauacucagaggaagcaaaauuaaacagagaagaaauagaugggguaaagcuggaaucaacaaggauuuaccagauuuuggcgaucuauucaacugucgccaguucauugguacugguagucucccugggggcaaucaguuucuggaugugcucuaaugggucucuacaguguagaauauguauuuaa

SEQ ID NO: 41296 - RNA, 1701 nt, Artificial Sequence
  derived and/or modified CDS sequence (wt) from hemagglutinin__InfluenzaA__AFN18312
augaaggcaauacuaguaguucugcuauauacauuugcaaccgcaaaugcagacacauuauguauagguuaucaugcgaacaauucaacagacacuguagacacaguacuagaaaagaauguaacaguaacacacucuguuaaccuucuagaagacaagcauaacgggaaacuaugcaaacuaagagggguagccccauugcauuuggguaaauguaacauugcuggcuggauccugggaaauccagagugugaaucacucuccacagcaagcucaugguccuacauuguggaaacaucuaguucagacaauggaacguguuacccaggagauuucaucgauuaugaggagcuaagagagcaauugagcucagugucaucauuugaaagguuugagauauuccccaagacaaguucauggcccaaucaugacucgaacaaagguauaacggcagcauguccucaugcuggagcaaaaagcuucuacaaaaauuuaauauggcuaguuaaaaaaggaaauucauacccaaagcucagcaaauccuacauuaaugauaaagggaaagaaguccucgugcuauggggcauucaccauccaucuacuagugcugaccaacaaagucucuaucagaaugcagaugcauauguuuuugugggaacaucaagauacagcaagaaguucaagccggaaauagcaauaagacccaaagugagggaucaagaagggagaaugaacuauuacuggacacuaguagagccgggagacaaaauaacauucgaagcaacuggaaaucuagugguaccgagauaugcauucgcaauggaaagaaaugcuggaucugguauuaucauuucagauacaccaguccacgauugcaauacaacuugucagacacccaagggugcuauaaacaccagccucccauuucagaauauacauccgaucacaauuggaaaauguccaaaauauguaaaaagcacaaaauugagacuggccacaggauugaggaaugucccgucuauucaaucuagaggccuauuuggggccauugccgguuucauugaagggggguggacagggaugguagauggaugguacgguuaucaccaucaaaaugagcaggggucaggauaugcagccgaccugaagagcacacagaaugccauugacaagauuacuaacaaaguaaauucuguuauugaaaagaugaauacacaguucacagcaguagguaaagaguucaaccaccuggaaaaaagaauagagaauuuaaauaaaaaaguugaugaugguuuccuggacauuuggacuuacaaugccgaacuguugguucuauuggaaaaugaaagaacuuuggacuaccacgauucaaaugugaagaacuuauaugaaaagguaagaagccaguuaaaaaacaaugccaaggaaauuggaaacggcugcuuugaauuuuaccacaaaugcgauaacacgugcauggaaagugucaaaaaugggacuuaugacuacccaaaauacucagaggaagcaaaauuaaacagagaagaaauagaugggguaaagcuggaaucaacaaggauuuaccagauuuuggcgaucuauucaacugucgccaguucauugguacugguaaucucccugggggcaaucaguuucuggaugugcucuaaugggucucuacaguguagaauauguauuuaa

SEQ ID NO: 41297 - RNA, 1701 nt, Artificial Sequence
  derived and/or modified CDS sequence (wt) from hemagglutinin__InfluenzaA__AFN18319
augaaggcaauacuaguaguucugcuauacacauuugcaaccgcaaaugcagacacauuauguauagguuaucaugcgaacaauucaacagacacuguagacacaguacuagaaaagaauguaacaguaacacacucugcuaaccuucuagaagacaagcauaacgggaaacuaugcaaacuaagagggguagccccauugcauuuggguaaauguaacauugcuggcuggauccugggaaauccagagugugaaucacucuccacagcaagcucaugguccuacauuguggaaacaucuaguucagacaauggaacguguuacccaggagauuucaucgauuaugaggagcuaagagagcaauugagcucagugucaucauuugaaagguuugagauauuccccaagacaaguucauggcccaaucaugacucgaacaaagguguaacggcagcauguccucaugcuggagcaaaaagcuucuacaaaaauuuaauauggcuaguuaaaaaaggaaauucauacccaaagcucagcaaaucauacauuaaugauaaagggaaagaaguccucgugcuauggggcauucaccauccaucuacuagugcugaccaacaaagucucuaucagaaugcagaugcauauguuuuuguggggacaucaagauacagcaagaaguucaagccggaaauagcaauaagacccaaagugagggaucaagaagggagaaugaacuauuacuggacacuaguagagccgggagacaaaauaacauucgaagcaacuggaaaucuagugguaccgagauaugcauucgcaauggaaagaaaugcuggaucugguauuaucauuucagauacaccaguccacgauugcaauacaacuugucagacacccaagggugcuauaaacaccagccucccauuucagaauauacauccgaucacaauuggaaaauguccaaaauauguaaaaagcacaaaauugagacuggccacaggauugaggaaugucccgucuauucaaucuagaggccuauuuggggccauugccgguuucauugaagggggguggacagggaugguagauggaugguacgguuaucaccaucaaaaugagcaggggucaggauaugcagccgaccugaagagcacacagaaugccauugacaagauuacuaacaaaguaaauucuguuauugaaaagaugaauacacaguucacagcaguagguaaagaguucaaccaccuggaaaaaagaauagagaauuuaaauaaaaaaguugaugaugguuuccuggacauuuggacuuacaaugccgaacuguugguucuauuggaaaaugaaagaacuuuggacuaccacgauucaaaugugaagaacuuauaugaaaagguaagaagccaguuaaaaaacaaugccaaggaaauuggaaacggcugcuuugaauuuuaccacaaaugcgauaacacgugcauggaaagugucaaaaaugggacuuaugacuacccaaaauacucagaggaagcaaaauuaaacagagaagaaauagaugggguaaagcuggaaucaacaaggauuuaccagauuuuggcgaucuauucaacugucgccaguucauugguacugguagucucccugggggcaaucaguuucuggaugugcucuaaugggucucuacaguguagaauauguauuuaa

SEQ ID NO: 41298 - RNA, 1701 nt, Artificial Sequence
  derived and/or modified CDS sequence (wt) from hemagglutinin__InfluenzaA__AFN18324
augaaggcaauacuaguaguucugcuauauacauuugcaaccgcaaaugcagacacauuauguauagguuaucaugcgaacaauucaacagacacuguagacacaguacuagaaaagaauguaacagugacacacucuguuaaccuucuagaagacaagcauaacgggaaacuaugcaaacuaagagggauagccccauugcauuuggguaaauguaacauugcuggcuggauccugggaaauccagagugugaaucacucuccacagcaagcucaugguccuacauuguggaaacaucuaguucagacaauggaacguguuacccaggagauuucaucgauuaugaggagcuaagagagcaauugagcucagugucaucauuugaaagguuugagauauuccccaagacaaguucauggcccaaucaugacucgaacaaagguguaacggcagcauguccucaugcuggagcaaaaagcuucuacaaaaauuuaauauggcuaguuaaaaaaggaaauucauacccaaagcucagcaaauccuacauuaaugauaaagggaaagaaguccucgugcuauggggcauucaccauccaucuacuagugcugaccaacaaagucucuaucagaaugcagaugcauauguuuuuguggggacaucaagauacagcaagaaguucaagccggaaauagcaauaagacccaaagugagggaucaagaagggagaaugaacuauuacuggacacuaguagagccgggagacaaaauaacauucgaagcaacuggaaaucuagugguaccgagauaugcauucgcaauggaaagaaaugcuggaucugguauuaucauuucagauacaccaguccacgauugcaauacaacuugucagacacccaagggugcuauaaacaccagccucccauuucagaauauacauccgaucacaauuggaaaauguccaaaauauguaaaaagcacaaaauugagacuggccacaggauugaggaaugucccgucuauucaaucuagaggccuauuuggggccauugccgguuucauugaaggaggguggacagggaugguagauggaugguacgguuaucaccaucaaaaugagcaggggucaggauaugcagccgaccugaagagcacacagaaugccauugacaagauuacuaacaaaguaaauucuguuauugaaaagaugaauacacaguucacagcaguagguaaagaguucaaccaccuggaaaaaagaauagagaauuuaaauaaaaaaguugaugaugguuuccuggacauuuggacuuacaaugccgaacuguugguucuauuggaaaaugaaagaacuuuggacuaccacgauucaaaugugaagaacuuauaugaaaagguaagaagccaguuaaaaaacaaugccaaggaaauuggaaacggcugcuuugaauuuuaccacaaaugcgauaacacgugcauggaaagugucaaaaaugggacuuaugacuacccgaaauacucagaggaagcaaaauuaaacagagaagaaauagaugggguaaagcuggaaucaacaaggauuuaccagauuuuggcgaucuauucaacugucgccaguucauugguacugguagucucccugggggcaaucaguuucuggaugugcucuaaugggucucuacaguguagaauauguauuuaa

SEQ ID NO: 41299 - RNA, 1701 nt, Artificial Sequence
  derived and/or modified CDS sequence (wt) from hemagglutinin__InfluenzaA__AFN18334
augaaggcaauacuaguaguucugcuauauacauuugcaaccgcaaaugcagacacauuauguauagguuaucaugcgaacaauucaacagacacuguagacacaguacuagaaaagaauguaacaguaacacacucuguuaaccuucuagaagacaagcauaacgggaaacuaugcaaacuaagagggguagccccauugcauuuggguaaauguaacauugcuggcuggauccugggaaauccagagugugaaucacucuccacagcaagcucaugguccuacauuguggaaacaucuaguucagacaauggaacguguuacccaggagauuucaucgauuaugaggagcuaagagagcaauugagcucagugucaucauuugaaagguuugagauauuccccaagacaaguucauggcccaaucaugacucgaacaaagguguaacggcagcauguccucaugcuggagcaaaaagcuucuacaaaaauuuaauauggcuaguuaaaaaaggaaauucauacccaaagcucagcaaauccuacauuaaugauaaagggaaagaaguccucgugcuauggggcauucaccauccaucuacuagugcugaccaacaaagucucuaucagaaugcagaugcauauguuuuuguggggacaucaagauacagcaagaaguucaagccggaaauagcaauaagacccaaagugagggaacaagaagggagaaugaacuauuacuggacacuaguagagccgggagacaaaauaacauucgaagcaacuggaaaucuagugguaccgagauaugcauucgcaauggaaagaaaugcuggaucugguauuaucauuucagauacaccaguccacgauugcaauacaacuugucagacacccaagggugcuauaaacaccagccucccauuucagaauauacauccgaucacaauuggaaaauguccaaaauauguaaaaagcacaaaauugagacuggccacaggauugaggaaugucccgucuauucaaucuagaggccuauuuggggccauugccgguuucauugaagggggguggacagggaugguagauggaugguacgguuaucaccaucaaaaugagcaggggucaggauaugcagccgaccugaagagcacacagaaugccauugacgagauuacuaacaaaguaaauucuguuauugaaaagaugaauacacaguucacagcaguagguaaagaguucaaccaccuggaaaaaagaauagagaauuuaaauaaaaaaguugaugaugguuuccuggacauuuggacuuacaaugccgaacuguugguucuauuggaaaaugaaagaacuuuggacuaccacgauucaaaugugaagaacuuauaugaaaagguaagaagccaguuaaaaaacaaugccaaggaaauuggaaacggcugcuuugaauuuuaccacaaaugcgauaacacgugcauggaaagugucaaaaaugggacuuaugacuacccaaaauacucugaggaagcaaaauuaaacagagaagaaauagaugggguaaagcuggaaucaacaaggauuuaccagauuuuggcgaucuauucaacugucgccaguucauugguacugguagucucccugggggcaaucaguuucuggaugugcucuaaugggucucuacaguguagaauauguauuuaa

SEQ ID NO: 41300 - RNA, 1701 nt, Artificial Sequence; identical to SEQ ID NO: 36797
  derived and/or modified CDS sequence (wt) from hemagglutinin__InfluenzaA__AFN18344

SEQ ID NO: 41301 - RNA, 1701 nt, Artificial Sequence; identical to SEQ ID NO: 34681
  derived and/or modified CDS sequence (wt) from hemagglutinin__InfluenzaA__AFN18354

SEQ ID NO: 41302 - RNA, 1701 nt, Artificial Sequence
  derived and/or modified CDS sequence (wt) from hemagglutinin__InfluenzaA__AFN18364
augaaggcaauacuaguaguucugcuauauacauuugcaaccgcaaaugcagacacauuauguauagguuaucaugcgaacaauucaacagacacuguagacacaguacuagaaaagaauguaacaguaacacacucuguuaaccuucuagaagacaagcauaacgggaaacuaugcaaacuaagagggguagccccauugcauuuggguaaauguaacauugcuggcuggauccugggaaauccagagugugaaucacucuccacagcaagcucaugguccuacauuguggaaacaucuaguucagacaauggaacguguuacccaggagauuucaucgauuaugaggagcuaagagagcaauugagcucagugucaucauuugaaagguuugagauauuccccaagacaaguucauggcccaaucaugacuugaacaaagguguaacggcagcauguccucaugcuggagcaaaaagcuucuacaaaaauuuaauauggcuaguuaaaaaaggaaauucauacccaaagcucagcaaauccuacauuaaugauaaagggaaagaaguccucgugcuauggggcauucaccauccaucuacuagugcugaccaacaaagucucuaucagaaugcagaugcauauguuuuuguggggacaucaagauacagcaagaaguucaagccggaaauagcaauaagacccaaagugagggaucaagaagggagaaugaacuauuacuggacacuaguagagccgggagacaagauaacauucgaagcaacuggaaaucuagugguaccgagauaugcauucgcaauggaaagaaaugcuggaucugguauuaucauuucagauacaccaguccacgauugcaauacaacuugucagacacccaagggugcuauaaacaccagccucccauuucagaauauacauccgaucacaauuggaaaauguccaaaauauguaaaaagcacaaaauugagacuggccacaggauugaggaaugucccgucuauucaaucuagaggccuauuuggggccauugccgguuucauugaagggggguggacagggaugguagauggaugguacgguuaucaccaucaaaaugagcaggggucaggauaugcagccgaccugaagagcacacagaaugccauugacgagauuacuaacaaaguaaauucuguuauugaaaagaugaauacacaguucacagcaguagguaaagaguucaaccaccuggaaaaaagaauagagaauuuaaauaaaaaaauugaugaugguuuccuggacauuuggacuuacaaugccgaacuguugguucuauuggaaaaugaaagaacuuuggacuaccacgauucaaaugugaagaacuuauaugaaaagguaagaagccaguuaaaaaacaaugccaaggaaauuggaaacggcugcuuugaauuuuaccacaaaugcgauaacacgugcauggaaagugucaaaaaugggacuuaugacuacccaaaauacucagaggaagcaaaauuaaacagagaagaaauagaugggguaaagcuggaaucaacaaggauuuaccagauuuuggcgaucuauucaacugucgccaguucauugguacugguagucucccugggggcaaucaguuucuggaugugcucuaaugggucucuacaguguagaauauguauuuaa

SEQ ID NO: 41303 - RNA, 1701 nt, Artificial Sequence; identical to SEQ ID NO: 34681
  derived and/or modified CDS sequence (wt) from hemagglutinin__InfluenzaA__AFN18374

SEQ ID NO: 41304 - RNA, 1701 nt, Artificial Sequence
  derived and/or modified CDS sequence (wt) from hemagglutinin__InfluenzaA__AFN18381
augaaggcaauacuaguaguucugcuauauacauuugcaaccgcaaaugcagacacauuauguauagguuaucaugcgaacaauucaacagacacuguagacacaguacuagaaaagaauguaacaguaacacacucuguuaaccuucuagaagacaagcauaacgggaaacuaugcaaacuaagagggguagccccauugcauuuggguaaauguaacauugcuggcuggauccugggaaauccagagugugaaucacucuccacagcaagcucaugguccuacauuguggaaacaucuaguucagacaauggaacguguuacccaggagauuucaucgauuaugaggagcuaagagagcaauugagcucagugucaucauuugaaagguuugagauauuccccaagacaaguucauggcccaaucaugacucgaacaaagguguaacggcagcauguccucaugcuggagcaaaaagcuucuacaaaaauuuaauauggcuaguuaaaaaaggaaauucauacccaaagcucagcaaauccuacauuaaugauaaagggaaagaaguccucgugcuauggggcauucaccauccaucuacuagugcugaccaacaaagucucuaucagaaugcagaugcauauguuuuuguggggacaucaaaauacagcaagaaguucaagccggaaauagcaauaagacccaaagugagggaucaagaagggagaaugaacuauuacuggacacuaguaaagccgggagacaaaauaacauucgaagcaacuggaaaucuagugguaccgagauaugcauucgcaauggaaagaaaugcuggaucugguauuaucauuucagauacaccaguccaagauugcaauacaacuugucagacacccaagggugcuauaaacaccagccucccauuucagaauauacauccgaucacaauuggaaaauguccaaaauauguaaaaagcacaaaauugagacuggccacaggauugaggaaugucccgucuauucaaucuagaggccuauuuggggccauugccgguuucauugaagggggguggacagggaugguagauggaugguacgguuaucaccaucaaaaugagcaggggucaggauaugcagccgaccugaagagcacacagaaugccauugacgagauuacuaacaaaguaaauucuguuauugaaaagaugaauacacaguucacagcaguagguaaagaguucaaccaccuggaaaaaagaauagagaauuuaaauaaaaaaguugaugaugguuuccuggacauuuggacuuacaaugccgaacuguugguucuauuggaaaaugaaagaacuuuggacuaccacgauucaaaugugaagaacuuauaugaaaagguaagaagccaguuaaaaaacaaugccaaggaaauuggaaacggcugcuuugaauuuuaccacaaaugcgauaacacgugcauggaaagugucaaaaaugggacuuaugacuacccaaaauacucagaggaagcaaaauuaaacagagaagaaauagaugggguaaagcuggaaucaacaaggauuuaccagauuuuggcgaucuauucaacugucgccaguucauugguacugguagucucccugggggcaaucaguuucuggaugugcucuaaugggucucuacaguguagaauauguauuuaa

SEQ ID NO: 41305 - RNA, 1701 nt, Artificial Sequence
  derived and/or modified CDS sequence (wt) from hemagglutinin__InfluenzaA__AFN18390
augaaggcaauacuaguaguucugcuauauacauuugcaaccgcaaaugcagacacauuauguauagguuaucaugcgaacaauucaacagacacuguagacacaguacuagaaaagaauguaacaguaacacacucuguuaaccuucuagaagacaagcauaacgggaaacuaugcaaacuaagagggguagccccauugcauuuggguaaauguaacauugcuggcuggauccugggaaauccagagugugaaucacucuccacagcaagcucaugguccuacauuguggaaacaucuaguucagacaauggaacguguuacccaggagauuucaucgauuaugaggagcuaagagagcaauugagcucagugucaucauuugaaagguuugagauauuccccaagacaaguucauggcccaaucaugacucgaacaaagguguaacggcagcauguccucaugcuggagcaaaaagcuucuacaaaaauuuaauauggcuaguuaaaaaaggaaauucauacccaaagcucagcaaauccuacauuaaugauaaagggaaagaaguccucgugcuauggggcauucaccauccaucuacuagugcugaccaacaaagucucuaucagaaugcagaugcauauguuuuuguggggacaucaagauacagcaagaaguucaagccggaaauagcaauaagacccaaagugagggaucaagaagggagaaugaacuauuacuggacacuaguagagccgggagacaaaauaacauucgaagcaacuggaaaucuagugguaccgagauaugcauucgcaauggaaagaaaugcuggaucugguauuaucauuucagauacaccaguccacgauugcaauacaacuugucagacacccaagggugcuauaaacaccagccucccauuucagaauauacauccgaucacaauuggaaaauguccaaaauauguaaaaagcacaaaauugagacuggccacaggauugaggaaugucccgucuauucaaucuagaggccuauuuggggccauugccgguuucauugaagggggguggacagggaugguagauggaugguacgguuaucaccaucaaaaugagcaggggucaggauaugcagccgaccugaagagcacacagaaugccauugacgagauuacuaacaaaguaaauucuguuauugaaaagaugaauacacaguucacagcaguagguaaagaguucaaccaccuggaaaaaagaauagagaauuuaaauaaaaaaguugaugaugguuuccuggacauuuggacuuacaaugccgaacuguugguucuauuggaaaaugaaagaacuuuggacuaccacgauucaaaugugaagaacuuauaugaaaagauaagaagccaguuaaaaaacaaugccaaggaaauuggaaacggcugcuuugaauuuuaccacaaaugcgauaacacgugcauggaaagugucaaaaaugggacuuaugacuacccaaaauacucagaggaagcaaaauuaaacagagaagaaauagaugggguaaagcuggaaucaacaaggauuuaccagauuuuggcgaucuauucaacugucgccaguucauugguacugguagucucccugggggcaaucaguuucuggaugugcucuaaugggucucuacaguguagaauauguauuuaa

SEQ ID NO: 41306 - RNA, 1701 nt, Artificial Sequence
  derived and/or modified CDS sequence (wt) from hemagglutinin__InfluenzaA__AFN18400
augaaggcaauacuaguaguucugcuauauacauuugcaaccgcaaaugcagacacauuauguauagguuaucaugcgaacaauucaacagacacuguagacacaguacuagaaaagaauguaacaguaacacacucuguuaaccuucuagaagacaagcauaacgggaaacuaugcaaacuaagagggguaaccccauugcauuuggguaaauguaacauugcuggcuggauccugggaaauccagagugugaaucacucuccaaagcaagcucaugguccuacauuguggaaacaucuaguucagacaauggaacguguuacccaggagauuucaucgauuaugaggagcuaagagagcaauugagcucagugucaucauuugaaagguuugagauauuccccaagacaaguucauggcccaaucaugacucgaacaaagguguaacggcagcauguccucaugcuggagcaaaaagcuucuacaaaaauuuaauauggcuaguuaaaaaaggaaauucauacccaaagcucagcaaauccuacauuaaugauaaagggaaagaaguccucgugcuauggggcauucaccauccaucuacuagugcugaccaacaaagucucuaucagaaugcagaugcauauguuuuuguggggacaucaagauacagcaagaaguucaagccggaaauagcaauaagacccaaagugagggaucaagaagggagaaugaacuauuacuggacacuaguagagccgggagacaaaauaacauucgaagcaacuggaaaucuagugguaccgagauaugcauucgcaauggaaagaaauguuggaucugguauuaucauuucagauacaccaguccacgauugcaauacaacuugucagacacccaagggugcuauaaacaccagccucccauuucagaauauacauccgaucacaauuggaaaauguccaaaauauguaaaaagcacaaaauugagacuggccacaggauugaggaaugucccgucuauucaaucuagaggccuauuuggggccauugccgguuucauugaagggggguggacagggaugguagauggaugguacgguuaucaccaucaaaaugagcaggggucaggauaugcagccgaccugaagagcacacagaaugccauugacgagauuacuaacaaaguaaauucuguuauugaaaagaugaauacacaguucacagcaguagguaaagaguucaaccaccuggaaaaaagaauagagaauuuaaauaaaaaaguugaugaugguuuccuggacauuuggacuuacaaugccgaacuguugguucuauuggaaaaugaaagaacuuuggacuaccacgauucaaaugugaagaacuuauaugaaaagguaagaagccaguuaaaaaacaaugccaaggaaauuggaaacggcugcuuugaauuuuaccacaaaugcgauaacacgugcauggaaagugucaaaaaugggacuuaugacuacccaaaauacucagaggaagcaaaauuaaacagagaagaaauagaugggguaaagcuggaaucaacaaggauuuaccagauuuuggcgaucuauucaacugucgccaguucauugguacugguagucucccugggggcaaucaguuucuggaugugcucuaaugggucucuacaguguagaauauguauuuaa

SEQ ID NO: 41307 - RNA, 1701 nt, Artificial Sequence
  derived and/or modified CDS sequence (wt) from hemagglutinin__InfluenzaA__AFN18410
augaaggcaauacuaguaguucugcuauauacauuugcaaccgcaaaugcagacacauuauguauagguuaucaugcgaacaauucaacagacacuguagacacaguacuagaaaagaauguaacaguaacacacucuguuaaccuucuagaagacaagcauaacgggaaacuaugcaaacuaagagggguagccccauugcauuuggguaaauguaacauugcuggcuggauccugggaaauccagagugugaaucacucuccacagcaagcucaugguccuacauuguggaaacaucuaguucagacaauggaacguguuacccaggagauuucaucgauuaugaggagcuaagagagcaauugagcucagugucaucauuugaaagguuugagauauuccccaagacaaguucauggcccaaucaugacucgaacaaagguguaacggcagcauguccucaugcuggagcaaaaagcuucuacaaaaauuuaauauggcuaguuaaaaaaggaaauucauacccaaagcucagcaaauccuacauuaaugauaaagggaaagaaguccucgugcuauggggcauucaccauccaucuacuagugcugaccaacaaagucucuaucagaaugcagaugcauauguuuuuguggggacaucaagauacagcaagaaguucaagccggaaauagcaauaagacccaaagugagggaucaagaagggagaaugaacuauuacuggacacuaguagagccgggagacaaaauaacauucgaagcaacuggaaaucuaguaguaccgagauaugcauucgcaauggaaagaaaugcuggaucugguauuaucauuucagauacaccaguccacgauugcaauacaacuugucagacacccaagggugcuauaaacaccagccucccauuucagaauauacauccgaucacaauuggaaaauguccaaaauauguaaaaagcacaaaauugagacuggccacaggauugaggaaugucccgucuauucaaucuagaggccuauuuggggccauugccgguuucauugaagggggguggacagggaugguagauggaugguacgguuaucaccaucaaaaugagcaggggucaggauaugcagccgaccugaagagcacacagaaugccauugacgagauuacuaacaaaguaaauucuguuauugaaaagaugaauacacaauucacagcaguagguaaagaguucaaccaccuggaaaaaagaauagagaauuuaaauaaaaaaauugaugaugguuuccuggacauuuggacuuacaaugccgaacuguugguucuauuggaaaaugaaagaacuuuggacuaucacgauucaaaugugaagaacuuauaugaaaagguaagaagccaguuaaaaaacaaugccaaggaaauuggaaacggcugcuuugaauuuuaccacaaaugcgauaacacgugcauggaaagugucaaaaaugggacuuaugacuacccaaaauacucagaggaagcaaaauuaaacagagaagaaauagaugggguaaagcuggaaucaacaaggauuuaccagauuuuggcgaucuauucaacugucgccaguucauugguacugguagucucccugggggcaaucaguuucuggaugugcucuaaugggucucuacaguguagaauaugcauuuaa

SEQ ID NO: 41308 - RNA, 1701 nt, Artificial Sequence; identical to SEQ ID NO: 34681
  derived and/or modified CDS sequence (wt) from hemagglutinin__InfluenzaA__AFN18420

SEQ ID NO: 41309 - RNA, 1701 nt, Artificial Sequence
  derived and/or modified CDS sequence (wt) from hemagglutinin__InfluenzaA__AFN18430
augaaggcaauacuaguaguucugcuauauacauuugcaaccgcaaaugcagacacauuauguauagguuaucaugcgaacaauucaacagacacuguagacacaguacuagaaaagaauguaacaguaacacacucuguuaaccuucuagaaaacaagcauaacgggaaacuaugcaaacuaagagggguagccccauugcauuuggguaaauguaacauugcuggcuggauccugggaaauccagagugugaaucacucuccacagcaagcucaugguccuacauuguggaaacaucuaguucagacaauggaacguguuacccaggagauuucaucgauuaugaggagcuaagagagcaauugagcucagugucaucauuugaaagguuugagauauuccccaagacaaguucauggcccaaucaugacucgaacaaagguguaacggcagcauguccucaugcuggagcaaaaagcuucuacaaaaauuuaauauggcuaguuaaaaaaggaaauucauacccaaagcucagcaaauccuacauuaaugauaaagggaaagaaguccucgugcuauggggcauucaccauccaucuacuagugcugaccaacaaagucucuaucagaaugcagaugcauauguuuuuguggggacaucaagauacagcaagaaguucaagccggaaauagcaauaagacccaaagugagggaucaagaagggagaaugaacuauuacuggacacuaguagagccgggagacaaaauaacauucgaagcaacuggaaaucuagugguaccgagauaugcauucgcaaugguaaggaaugcuggaucugguauuaucauuucagauacaccaguccacgauugcaauacaacuugucagacacccaagggugcuauaaacaccagccucccauuucagaauauacauccgaucacaauuggaaaauguccaaaauauguaaaaagcacaaaauugagacuggccacaggauugaggaaugucccgucuauucaaucuagaggccuauuuggggccauugccgguuucauugaagggggguggacagggaugguagauggaugguacgguuaucaccaucaaaaugagcaggggucaggauaugcagccgaccugaagagcacacagaaugccauugacgagauuacuaacaaaguaaauucuguuauugaaaagaugaauacacaguucacagcaguagguaaagaguucaaccaccuggaaaaaagaauagagaauuuaaauaaaaaaguugaugaugguuuccuggacauuuggacuuacaaugccgaacuguugguucuauuggaaaaugaaagaacuuuggacuaccacgauucaaaugugaagaacuuauaugaaaagguaagaagccaguuaaaaaacaaugccaaggaaauuggaaacggcugcuuugaauuuuaccacaaaugcgauaacacgugcauggaaagugucaaaaaugggacuuaugacuacccaaaauacucagaggaagcaaaauuaaacagagaagaaauagaugggguaaagcuggaaucaacaaggauuuaccagauuuuggcgaucuauucaacugucgccaguucauugguacugguagucucccugggggcaaucaguuucuggaugugcucuaaugggucucuacaguguagaauauguauuuaa

SEQ ID NO: 41310 - RNA, 1701 nt, Artificial Sequence; identical to SEQ ID NO: 34681
  derived and/or modified CDS sequence (wt) from hemagglutinin__InfluenzaA__AFN18440

SEQ ID NO: 41311 - RNA, 1701 nt, Artificial Sequence; identical to SEQ ID NO: 34681
  derived and/or modified CDS sequence (wt) from hemagglutinin__InfluenzaA__AFN18450

SEQ ID NO: 41312 - RNA, 1701 nt, Artificial Sequence
  derived and/or modified CDS sequence (wt) from hemagglutinin__InfluenzaA__AFN18460
augaaggcaauacuaguaguucugcuauauacauuugcaaccgcaaaugcagacacauuauguauagguuaucaugcgaacaauucaacagacacuguagacacaguacuagaaaagaauguaacaguaacacacucuguuaaccuucuagaagacaagcauaacgggaaacuaugcaaacuaagagggguagccccauugcauuuggguaaauguaacauugcuggcuggauccugggaaauccagagugugaaucacucuccacagcaagcucaugguccuacauuguggaaacaucuaguucagacaauggaacguguuacccaggagauuucaucgauuaugaggagcuaagagagcaauugagcucagugucaucauuugaaagguuugagauauuccccaagacaaguucauggcccaaucaugacucgaacaaagguguaacggcagcauguccucaugcuggagcaaaaagcuucuacaaaaauuuaauauggcuaguuaaaaaaggaaauucauacccaaagcucagcaaauccuacauuaaugauaaagggaaagaaguccucgugcuauggggcauucaccauccaucuacuagugcugaccaacaaagucucuaucagaaugcagaugcauauguuuuuguggggacaucaaaauacagcaagaaguucaagccggaaauagcaauaagacccaaagugagggaucaagaagggagaaugaacuauuacuggacacuaguagagccgggagacaaaauaacauucgaagcaacuggaaaucuagugguaccgagauaugcauucgcaauggaaagaaaugcuggaucugguauuaucauuucagauacaccaguccacgauugcaauacaacuugucagacacccaagggugcuauaaacaccagccucccauuucagaauauacauccgaucacaauuggaaaauguccaaaauauguaaaaagcacaaaauugagacuggccacaggauugaggaaugucccgucuauucaaucuagaggccuauuuggggccauugccgguuucauugaagggggguggacagggaugguagauggaugguacgguuaucaccaucaaaaugagcaggggucaggauaugcagcugaccugaagagcacacagaaugccauugacgagauuacuaacaaaguaaauucuguuauugaaaagaugaauacacaguucacagcaguagguaaagaguucaaccaccuggaaaaaagaauagagaauuuaaauaaaaaaguugaugaugguuuccuggacauuuggacuuacaaugccgaacuguugguucuauuggaaaaugaaagaacuuuggacuaccacgauucaaaugugaagaacuuauaugaaaagguaagaagccaguuaaaaaacaaugccaaggaaauuggaaacggcugcuuugaauuuuaccacaaaugcgauaacacgugcauggaaagugucaaaaaugggacuuaugacuacccaaaauacucagaggaagcaaaauuaaacagagaagaaauagaugggguaaagcuggaaucaacaaggauuuaccagauuuuggcgaucuauucaacugucgccaguucauugguacugguagucucccugggggcaaucaguuucuggaugugcucuaaugggucucuacaguguagaauauguauuuaa

SEQ ID NO: 41313 - RNA, 1701 nt, Artificial Sequence; identical to SEQ ID NO: 35542
  derived and/or modified CDS sequence (wt) from hemagglutinin__InfluenzaA__AFN18470

SEQ ID NO: 41314 - RNA, 1701 nt, Artificial Sequence; identical to SEQ ID NO: 34772
  derived and/or modified CDS sequence (wt) from hemagglutinin__InfluenzaA__AFN18480

SEQ ID NO: 41315 - RNA, 1701 nt, Artificial Sequence; identical to SEQ ID NO: 35542
  derived and/or modified CDS sequence (wt) from hemagglutinin__InfluenzaA__AFN18490

SEQ ID NO: 41316 - RNA, 1701 nt, Artificial Sequence; identical to SEQ ID NO: 34714
  derived and/or modified CDS sequence (wt) from hemagglutinin__InfluenzaA__AFN18497

SEQ ID NO: 41317 - RNA, 1701 nt, Artificial Sequence
  derived and/or modified CDS sequence (wt) from hemagglutinin__InfluenzaA__AFN18512
augaaggcaauacuaguaguucugcuauauacauuugcaaccgcaaaugcagacacauuauguauagguuaucaugcgaacaauucaacagacacuguagacacaguacuagaaaagaauguaacaguaacacacucuguuaaccuucuagaagacaagcauaacgggaaacuaugcaaacuaagagggguagccccauugcauuuggguaaauguaacauugcuggcuggauccugggaaauccagagugugaaucacucuccacagcaagcucaugguccuacauuguggaaacaucuaguucagacaauggaacguguuacccaggagauuucaucgauuaugaggagcuaagagagcaauugagcucagugucaucauuugaaagguuugagauauuccccaagacaaguucauggcccaaucaugacucgaacaaagguguaacggcagcauguccucaugcuggagcaaaaagcuucuacaaaaauuuaauauggcuaguuaaaaaagggaauucauacccaaagcucagcaaauccuacauuaaugauaaagggaaagaaguccucgugcuauggggcauucaccauccaucuacuagugcugaccaacaaagucucuaucagaaugcagaugcauauguuuuuguggggacaucaagauacagcaagaaguucaagccggaaauagcaauaagacccaaagugagggaucaagaagggagaaugaacuauuacuggacacuaguagagccgggagacaaaauaacauucgaagcaacuggaaaucuagugguaccgagauaugcauucgcaauggaaagaaaugcuggaucugguauuaucauuucagauacaccaguucacgauugcaauacaacuugucagacacccaagggugcuauaaacaccagccucccauuucagaauauacauccgaucacaauuggaaaauguccaaaauauguaaaaagcacaaaauugagacuggccacaggauugaggaaugucccgucuauucaaucuagaggccuauuuggggccauugccgguuucauugaagggggguggacagggaugguagauggaugguacgguuaucaccaucaaaaugagcaggggucaggauaugcagccgaccugaagagcacacagaaugccauugacgagauuacuaacaaaguaaauucuguuauugaaaagaugaauacacaguucacagcaguagguaaagaguucaaccaccuggaaaaaagaauagagaauuuaaauaaaaaaguugaugaugguuuccuggacauuuggacuuacaaugccgaacuguugguucuauuggaaaaugaaagaacuuuggacuaccacgauucaaaugugaagaacuuauaugaaaagguaagaagccaguuaaaaaacaaugccaaggaaauuggaaacggcugcuuugaauuuuaccacaaaugcgauaacacgugcauggaaagugucaaaaaugggacuuaugacuacccaaaauacucagaggaagcaaaauuaaacagagaagaaauagaugggguaaagcuggaaucaacaaggauuuaccagauuuuggcgaucuauucaacugucgccaguucauugguacugguagucucccugggggcaaucaguuucuggaugugcucuaaugggucucuacaguguagaauauguauuuaa

SEQ ID NO: 41318 - RNA, 1701 nt, Artificial Sequence
  derived and/or modified CDS sequence (wt) from hemagglutinin__InfluenzaA__AFN18519
augaaggcaauacuaguaguucugcuauauacauuugcaaccgcaaaugcagacacauuauguauagguuaucaugcgaacaauucaacagacacuguagacacaguacuagaaaagaauguaacaguaacacacucuguuaaccuucuagaagacaagcauaacgggaaacuaugcaaacuaagagggguagccccauugcauuuggguaaauguaacauugcuggcuggauccugggaaauccagagugugaaucacucuccacagcaagcucaugguccuacauuguggaaacaucuaguucagacaauggaacguguuacccaggagauuucaucgauuaugaggagcuaagagagcaauugagcucagugucaucauuugaaagguuugagauauuccccaagacaaguucauggcccaaucaugacucgaacaaagguguaacggcagcauguccucaugcuggagcaaaaagcuucuacaaaaauuuaauauggcuaguuaaaaaagaaaauucauacccaaagcucagcaaauccuacauuaaugauaaagggaaagaaguccucgugcuauggggcauucaccauccaucuacuagugcugaccaacaaagucucuaucagaaugcagaugcauauguuuuuguggggacaucaagauacagcaagaaguucaagccggaaauagcaauaagacccaaagugagggaucaagaagggagaaugaacuauuacuggacacuaguagagccgggagacaaaauaacauucgaagcaacuggaaaucuagugguaccgagauaugcauucgcaauggaaagaaaugcuggaucugguauuaucauuucagauacaccaguccacgauugcaauacaacuugucagacacccaagggugcuauaaacaccagccucccauuucagaauauacauccgaucacaauuggaaaauguccaaaauauguaaaaagcacaaaauugagacuggccacaggauugaggaaugucccgucuauucaaucuagaggccuauuuggggccauugccgguuucauugaagggggguggacagggaugguagauggaugguacgguuaucaccaucaaaaugagcaggggucaggauaugcagccgaccugaagagcacacagaaugccauugacgagauuacuaacaaaguaaauucuguuauugaaaagaugaauacacaguucacagcaguagguaaagaguucaaccaccuggaaaaaagaauagagaauuuaaauaaaaaaguugaugaugguuuccuggacauuuggacuuacaaugccgaacuguugguucuauuggaaaaugaaagaacuuuggacuaccacgauucaaaugugaagaacuuauaugaaaagguaagaagccaguuaaaaaacaaugccaaggaaauuggaaacggcugcuuugaauuuuaccacaaaugcgauaacacgugcauggaaagugucaaaaaugggacuuaugacuacccaaaauacucagaggaagcaaaauuaaacagagaagaaauagaugggguaaagcuggaaucaacaaggauuuaccagauuuuggcgaucuauucaacugucgccaguucauugguacugguagucucccugggggcaaucaguuucuggaugugcucuaaugggucucuacaguguagaauauguauuuaa

SEQ ID NO: 41319 - RNA, 1701 nt, Artificial Sequence
  derived and/or modified CDS sequence (wt) from hemagglutinin__InfluenzaA__AFN18521
augaaggcaauacuaguaguucugcuauauacauuugcaaccgcaaaugcagacacauuauguauagguuaucaugcgaacaauucaacagacacuguagacacaguacuagaaaagaauguaacaguaacacacucuguuaaccuucuagaagacaagcauaacgggaaacuaugcaaacuaagagggguagccccauugcauuuggguaaauguaacauugcuggcuggauccugggaaauccagagugugaaucacucuccacagcaagcucaugguccuacauuguggaaacaucuaguucagacaauggaacguguuacccaggagauuucaucgauuaugaggagcuaagagagcaauugagcucagugucaucauuugaaagguuugagauauuccccaagacaaguucauggcccaaucaugacucgaacaaagguguaacggcagcauguccucaugcuggagcaaaaagcuucuacaaaaauuuaauauggcuaguuaaaaaaggaaauucauacccaaagcucagcaaauccuacauuaaugauaaagggaaagaaguccucgugcuauggggcauucaccauccaucuacuagugcugaccaacaaagucucuaucagaaugcagaugcauauguuuuuguggggacaucaagauacagcaagaaguucaagccggaaauagcaauaagacccaaagugagggaucaagaagggagaaugaacuauuacuggacacuaguagagccgggagacaaaauaacauucgaagcaacuggaaaucuagugguaccgagauaugcauucgcaaugguaagaaaugcuggaucugguauuaucauuucagauacaccaguccacgauugcaauacaacuugucagacacccaagggugcuauaaacaccagccucccauuucagaauauacauccgaucacaauuggaaaauguccaaaauauguaaaaagcacaaaauugagacuggccacaggauugaggaaugucccgucuauucaaucuagaggccuauuuggggccauugccgguuucauugaagggggguggacagggaugguagauggaugguacgguuaucaccaucaaaaugagcaggggucaggauaugcagccgaccugaagagcacacagaaugccauugacgagauuacuaacaaaguaaauucuguuauugaaaagaugaauacacaguucacagcaguagguaaagaguucaaccaccuggaaaaaagaauagagaauuuaaauaaaaaaguugaugaugguuuccuggacauuuggacuuacaaugccgaacuguugguucuauuggaaaaugaaagaacuuuggacuaccacgauucaaaugugaagaacuuauaugaaaagguaagaagccaguuaaaaaacaaugccaaggaaauuggaaacggcugcuuugaauuuuaccacaaaugcgauaacacgugcauggaaagugucaaaaaugggacuuaugacuacccaaaauacucaggggaagcaaaauuaaacagagaagaaauagaugggguaaagcuggaaucaacaaggauuuaccagauuuuggcgaucuauucaacugucgccaguucauugguacugguagucucccugggggcaaucaguuucuggaugugcucuaaugggucucuacaguguagaauauguauuuaa

SEQ ID NO: 41320 - RNA, 1701 nt, Artificial Sequence; identical to SEQ ID NO: 39874
  derived and/or modified CDS sequence (wt) from hemagglutinin__InfluenzaA__AFN18528

SEQ ID NO: 41321 - RNA, 1701 nt, Artificial Sequence; identical to SEQ ID NO: 36133
  derived and/or modified CDS sequence (wt) from hemagglutinin__InfluenzaA__AFN18531

SEQ ID NO: 41322 - RNA, 1701 nt, Artificial Sequence
  derived and/or modified CDS sequence (wt) from hemagglutinin__InfluenzaA__AFN18543
augaaggcaauacuaguaguucugcuauauacauuugcaaccgcaaaugcagacacauuauguauagguuaucaugcgaacaauucaacagacacuguagacacaguacuagaaaagaauguaacaguaacacacucuguuaaccuucuagaagacaagcauaacgggaaacuaugcaaacuaagagggguagccccauugcauuuggguaaauguaacauugcuggcuggauccugggaaauccagagugugaaucacucuccacagcaagcucaugguccuacauuguggaaacaucuaguucagacaauggaacguguuacccaggagauuucaucgauuaugaggagcuaagagagcaauugagcucagugucaucauuugaaagguuugagauauuccccaagacaaguucauggcccaaucaugacucgaacaaagguguaacggcagcauguccucaugcuggagcaaaaagcuucuacaaaaauuuaauauggcuaguuaaaaaaggaaauucauacccaaagcucagcaaauccuacauuaaugauaaagggaaagaaguccucgugcuauggggcauucaccauccaucuacuagugcugaccaacaaagucucuaucagaaugcagaugcauauguuuuuguggggacaucaagauacagcaagaaguucaagccggaaauagcaauaagacccaaagugagggaucaagaagggagaaugaacuauuacuggacacuaguagagccgggagacaaaauaacauucgaagcaacuggaaaucuagugguaccgagauaugcauucgcaauggaaagaaaugcuggaucugguauuaucauuucagauacaccaguccacgauugcaauacaacuugucagacacccaagggugcuauaaacaccagccucccauuucagaauauacauccgaucacaauuggaaaauguccaaaauauguaaaaagcacaaaauugagacuggccacaggauugaggaaugucccgucuauucaaucuagaggccuauuuggggccauugccgguuucauugaagggggguggacagggaugguagauggaugguacgguuaucaccaucaaaaugagcaggggucaggauaugcagccgaccugaagagcacacagaaugccauugacgagauuacuaacaaaguaaauucuguuauugaaaagaugaauacacaguucacagcaguagguaaagaguucaaccaccuggaaaaaagaauagagaauuuaaauaaaaaaguugaugaugguuuccuggacauuuggacuuacaaugccgaacuguugguucuauuggaaaaugaaagaacuuuggacuaccacgauucaaaugugaagaaauuauaugaaaagguaagaagccaguuaaaaaacaaugccaaggaaauuggaaacggcugcuuugaauuuuaccacaaaugcgauaacacgugcauggaaagugucaaaaaugggacuuaugacuacccaaaauacucagaggaagcaaaauuaaacagagaagaaauagaugggguaaagcuggaaucaacaaggauuuaccagauuuuggcgaucuauucaacugucgccaguucauugguacugguagucucccugggggcaaucaguuucuggaugugcucuaaugggucucuacaguguagaauauguauuuaa

SEQ ID NO: 41323 - RNA, 1701 nt, Artificial Sequence
  derived and/or modified CDS sequence (wt) from hemagglutinin__InfluenzaA__AFN18545
augaaggcaauacuaguaguucugcuauauacauuugcaaccgcaaaugcagacacauuauguauagguuaucaugcgaacaauucaacagacacuguagacacaguacuagaaaagaauguaacaguaacacacucuguuaaccuucuagaagacaagcauaacgggaaacuaugcaaacuaagagggguagccccauugcauuuggguaaauguaacauugcuggcuggauccugggaaauccagagugugaaucacucuccacagcaagcucaugguccuacauuguggaaacaucuaguucagacaauggaacguguuacccaggagauuucaucgauuaugaggagcuaagagagcaauugagcucagugucaucauuugaaagguuugagauauuccccaagacaaguucauggcccaaucaugacucgaacaaagguguaacggcagcauguccucaugcuggagcaaaaagcuucuacaaaaauuuaauauggcuaguuaaaaaaggaaauucauacccaaagcucagcaaauccuacauuaaugauaaagggaaagaaguccucgugcuauggggcauucaccauccaucuacuagugcugaccaacaaagucucuaucagaaugcagaugcauauguuuuuguggggacaucaagauacagcaagaaguucaagccggaaauagcaauaagacccaaagugagggaucaagaagggagaaugaacuauuacuggacacuaguagagccgggagacaaaauaacauucgaagcaacuggaaaucuagugauaccgagauaugcauucgcaauggaaagaaaugcuggaucugguauuaucauuucagauacaccaguccacgauugcaauacaacuugucagacacccaagggugcuauaaacaccagccucccauuucagaauauacauccgaucacaauuggaaaauguccaaaauauguaaaaagcacaaaauugagacuggccacaggauugaggaaugucccgucuauucaaucuagaggccuauuuggggccauugccgguuucauugaagggggguggacagggaugguagauggaugguacgguuaucaccaucaaaaugagcaggggucaggauaugcagccgaccugaagagcacacagaaugccauugacgagauuacuaacaaaguaaauucuguuauugaaaagaugaauacacaguucacagcaguagguaaagaguucaaccaccuggaaaaaagaauagagaauuuaaauaaaaaaguugaugaugguuuccuggacauuuggacuuacaaugccgaacuguugguucuauuggaaaaugaaagaacuuuggacuaccacgauucaaaugugaagaacuuauaugaaaagguaagaagccaguuaaaaaacaaugccaaggaaauuggaaacggcugcuuugaauuuuaccacaaaugcgauaacacgugcauggaaagugucaaaaaugggacuuaugacuacccaaaauacucagaggaagcaaaauuaaacagagaagaaauagaugggguaaagcuggaaucaacaaggauuuaccagauuuuggcgaucuauucaacugucgccaguucauugguacugguagucucccugggggcaaucaguuucuggaugugcucuaaugggucucuacaguguagaauauguauuuaa

SEQ ID NO: 41324 - RNA, 1701 nt, Artificial Sequence; identical to SEQ ID NO: 35542
  derived and/or modified CDS sequence (wt) from hemagglutinin__InfluenzaA__AFN18550

SEQ ID NO: 41325 - RNA, 1701 nt, Artificial Sequence
  derived and/or modified CDS sequence (wt) from hemagglutinin__InfluenzaA__AFN18557
augaaggcaauacuaguaguucugcuauauacauuugcaaccgcaaaugcagacacauuauguauagguuaucaugcgaacaauucaacagacacuguagacacaguacuagaaaagaauguaacaguaacacacucuguuaaccuucuagaagacaagcauaacgggaaacuaugcaaacuaagagggguagccccauugcauuuggguaaauguaacauugcuggcuggauccugggaaauccagagugugaaucacucuccacagcaagcucaugguccuacauuguggaaacaucuaguucagacaauggaacguguuacccaggagauuucaucgauuaugaggagcuaagagagcaauugagcucagugucaucauuugaaagguuugagauauuccccaagacaaguucauggcccaaucaugacucgaacaaagguguaacggcagcauguccucaugcuggagcaaaaagcuucuacaaaaauuuaauauggcuaguuaaaaaaggaaauucauacccaaagcucagcaaauccuacauuaaugauaaagggaaagaaguccucgugcuauggggcauucaccauccaucuacuagugcugaccaacaaagucucuaucagaaugcagaugcauauguuuuuguggggacaucaagauacagcaagaaguucaagccggaaauagcaauaagacccaaagugagggaucaagaagggagaaugaacuauuacuggacacuaguagagccgggagacaaaauaacauucgaagcaacuggaaaucuagugguaccgagauaugcauucgcaauggaaagaaaugcuggaucugguauuaucauuucagauacaccagcccacgauugcaauacaacuugucagacacccaagggugcuauaaacaccagccucccauuucagaauauacauccgaucacaauuggaaaauguccaaaauauguaaaaagcacaaaauugagacuggccacaggauugaggaaugucccuucuauucaaucuagaggccuauuuggggccauugccgguuucauugaagggggguggacagggaugguagauggaugguacgguuaucaccaucaaaaugagcaggggucaggauaugcagccgaccugaagagcacacagaaugccauugacgagauuacuaacaaaguaaauucuguuauugaaaagaugaauacacaguucacagcaguagguaaagaguucaaccaccuggaaaaaagaauagagaauuuaaauaaaaaaguugaugaugguuuccuggacauuuggacuuacaaugccgaacuguugguucuauuggaaaaugaaagaacuuuggacuaccacgauucaaaugugaagaacuuauaugaaaagguaagaagccaguuaaaaaacaaugccaaggaaauuggaaacggcugcuuugaauuuuaccacaaaugcgauaacacgugcauggaaagugucaaaaaugggacuuaugacuacccaaaauacucagaggaagcaaaauuaaacagagaagaaauagaugggguaaagcuggaaucaacaaggauuuaccagauuuuggcgaucuauucaacugucgccaguucauugguacugguagucucccugggggcaaucaguuucuggaugugcucuaaugggucucuacaguguagaauauguauuuaa

SEQ ID NO: 41326 - RNA, 1701 nt, Artificial Sequence
  derived and/or modified CDS sequence (wt) from hemagglutinin__InfluenzaA__AFN18559
augaaggcaauacuaguaguucugcuauauacauuugcaaccgcaaaugcagacacauuauguauagguuaucaugcgaacaauucaacagacacuguagacacaguacuagaaaagaauguaacaguaacacacucuguuaaccuucuagaagacaagcauaacgggaaacuaugcaaacuaagagggguagccccauugcauuuggguaaauguaacauugcuggcuggauccugggaaauccagagugugaaucacucuccacagcaagcucaugguccuacauuguggaaacaucuaguucagacaauggaacguguuacccaggagauuucaucgauuaugaggagcuaagagagcaauugagcucagugucaucauuugaaagguuugagauauuccccaagacaaguucauggcccaaucaugacucgaacaaagguguaacggcagcauguccucaugcuggagcaaaaagcuucuacaaaaauuuaauauggcuaguuaaaaaaggaaauucauacccaaagcucagcaaauccuacauuaaugauaaagggaaagaaguccucgugcuauggggcauucaccauccaucuacuagugcugaccaacaaaaucucuaucagaaugcagaugcauauguuuuuguggggacaucaagauacagcaagaaguucaagccggaaauagcaauaagacccaaagugagggaucaagaagggagaaugaacuauuacuggacacuaguagagccgggagacaaaauaacauucgaagcaacuggaaaucuagugguaccgagauaugcauucgcaauggaaagaaaugcuggaucugguauuaucauuucagauacaccaguccacgauugcaauacaacuugucagacacccaagggugcuauaaacaccagccucccauuucagaauauacauccgaucacaauuggaaaauguccaaaauauguaaaaagcacaaaauugagacuggccacaggauugaggaaugucccgucuauucaaucuagaggccuauuuggggccauugccgguuucauugaagggggguggacagggaugguagauggaugguacgguuaucaccaucaaaaugagcaggggucaggauaugcagccgaccugaagagcacacagaaugccauugacgagauuacuaacaaaguaaauucuguuauugaaaagaugaauacacaguucacagcaguagguaaagaguucaaccaccuggaaaaaagaauagagaauuuaaauaaaaaaguugaugaugguuuccuggacauuuggacuuacaaugccgaacuguugguucuauuggaaaaugaaagaacuuuggacuaccacgauucaaaugugaagaacuuauaugaaaagguaagaagccaguuaaaaaacaaugccaaggaaauuggaaacggcugcuuugaauuuuaccacaaaugcgauaacacgugcauggaaagugucaaaaaugggacuuaugacuacccaaaauacucagaggaagcaaaauuaaacagagaagaaauagaugggguaaagcuggaaucaacaaggauuuaccagauuuuggcgaucuauucaacugucgccaguucauugguacugguagucucccugggggcaaucaguuucuggaugugcucuaaugggucucuacaguguagaauauguauuuaa

SEQ ID NO: 41327 - RNA, 1701 nt, Artificial Sequence
  derived and/or modified CDS sequence (wt) from hemagglutinin__InfluenzaA__AFN18561
augaaggcaauacuaguaguucugcuauauacauuugcaaccgcaaaugcagacacauuauguauagguuaucaugcgaacaauucaacagacacuguagacacaguacuagaaaagaauguaacaguaacacacucuguuaaccuucuagaagacaagcauaacgggaaacuaugcaaacuaagagggguagccccauugcauuuggguaaauguaacauugcuggcuggauccugggaaauccagagugugaaucacucuccacagcaagcucaugguccuacauuguggaaacaucuaguucagacaauggaacguguuacccaggaaauuucaucgauuaugaggagcuaagagagcaauugagcucagugucaucauuugaaagguuugagauauuccccaagacaaguucauggcccaaucaugacucgaacaaagguguaacggcagcauguccucaugcuggagcaaaaagcuucuacaaaaauuuaauauggcuaguuaaaaaaggaaauucauacccaaagcucagcaaauccuacauuaaugauaaagggaaagaaguccucgugcuauggggcauucaccauccaucuacuagugcugaccaacaaagucucuaucagaaugcagaugcauauguuuuuguggggacaucaagauacagcaagaaguucaaaccggaaauagcaauaagacccaaagugagggaucaagaagggagaaugaacuauuacuggacacuaguagagccgggagacaaaauaacauucgaagcaacuggaaaucuagugguaccgagauaugcauucgcaauggaaagaaaugcuggaucugguauuaucauuucagauacaccaguccacgauugcaauacaacuugucagacacccaagggugcuauaaacaccagccucccauuucagaauauacauccgaucacaauuggaaaauguccaaaauauguaaaaagcacaaaauugagacuggccacaggauugaggaaugucccgucuauucaaucuagaggccuauuuggggccauugccgguuucauugaagggggguggacagggaugguagauggaugguacgguuaucaccaucaaaaugagcaggggucaggauaugcagccgaccugaagagcacacagaaugccauugacgagauuacuaacaaaguaaauucuguuauugaaaagaugaauacacaguucacagcaguagguaaagaguucaaccaccuggaaaaaagaauagagaauuuaaauaaaaagguugaugaugguuuccuggacauuuggacuuacaaugccgaacuguugguucuauuggaaaaugaaagaacuuuggacuaccacgauucaaaugugaagaacuuauaugaaaagguaagaagccaguuaaaaaacaaugccaaggaaauuggaaacggcugcuuugaauuuuaccacaaaugcgauaacacgugcauggaaagugucaaaaaugggacuuaugacuacccaaaauacucagaggaagcaaaauuaaacagagaagaaauagaugggguaaagcuggaaucaacaaggauuuaccagauuuuggcgaucuauucaacugucgccaguucauugguacugguagucucccugggggcaaucaguuucuggaugugcucuaaugggucucuacaguguagaauauguauuuaa

SEQ ID NO: 41328 - RNA, 1701 nt, Artificial Sequence
  derived and/or modified CDS sequence (wt) from hemagglutinin__InfluenzaA__AFN18563
augaaggcaauacuaguaguucugcuauauacauuugcaaccgcaaaugcagacacauuauguauagguuaucaugcgaacaauucaacagacacuguagacacaguacuagaaaagaauguaacaguaacacacucuguuaaccuucuagaagacaagcauaacgggaaacuaugcaaacuaagagggguagccccauugcauuuggguaaauguaacauugcuggcuggauccugggaaauccagagugugaaucacucuccacagcaagcucaugguccuacauuguggaaacaucuaguucaggcaauggaacguguuacccaggagauuucaucgauuaugaggagcuaagagagcaauugagcucagugucaucauuugaaagguuugagauauuccccaagacaaguucauggcccaaucaugacucgaacaaagguguaacggcagcauguccucaugcuggagcaaaaagcuucuacaaaaauuuaauauggcuaguuaaaaaaggaaacucauacccaaagcucagcaaauccuacauuaaugauaaagggaaagaaguccucguguuauggggcauucaccauccaucuacuagugcugaccaacaaagucucuaucagaaugcagaugcauauguuuuuguggggacaucaagauacagcaagaaguucaagccggaaauagcaauaagacccaaagugagggaucaagaagggagaaugaacuauuacuggacacuaguagagccgggagacaaaauaacauucgaagcaacuggaaaucuagugguaccgagauaugcauucgcaauggaaagaaaugcuggaucugguauuaucauuucagauacaccaguccacgauugcaauacaacuugucagacacccaagggugcuauaaacaccagccucccauuucagaauauacauccgaucacaauuggaaaauguccaaaauauguaaaaagcacaaaauugagacuggccacaggauugaggaaugucccgucuauucaaucuagaggccuauuuggggccauugccgguuucauugaagggggguggacagggaugguagauggaugguacgguuaucaccaucaaaaugagcaggggucaggauaugcagccgaccugaagagcacacagaaugccauugacgagauuacuaacaaaguaaauucuguuauugaaaagaugaauacacaguucacagcaguagguaaagaguucaaccaccuggaaaaaagaauagagaauuuaaauaaaaaaguugaugaugguuuccuggacauuuggacuuacaaugccgaacuguugguucuauuggaaaaugaaagaacuuuggacuaccacgauucaaaugugaagaacuuauaugaaaagguaagaagccaguuaaaaaacaaugccaaggaaauuggaaacggcugcuuugaauuuuaccacaaaugcgauaacacgugcauggaaagugucaaaaaugggacuuaugacuacccaaaauacucagaggaagcaaaauuaaacagagaagaaauagaugggguaaagcuggaaucaacaaggauuuaccagauuuuggcgaucuauucaacugucgccaguucauugguacugguagucucccugggggcaaucaguuucuggaugugcucuaaugggucucuacaguguagaauauguauuuaa

SEQ ID NO: 41329 - RNA, 1701 nt, Artificial Sequence
  derived and/or modified CDS sequence (wt) from hemagglutinin__InfluenzaA__AFN18565
augaaggcaauacuaguaguucugcuauauacauuugcaaccgcaaaugcagacacauuauguauagguuaucaugcgaacaauucaacagacacuguagacacaguacuagaaaagaauguaacaguaacacacucuguuaaccuucuagaagacaagcauaacgggaaacuaugcaaacuaagagggguagccccauugcauuuggguaaauguaacauugcuggcuggauccugggaaauccagagugugaaucacucuccacagcaagcucaugguccuacauuguggaaacaucuaguucagacaauggaacguguuacccaggagauuucaucgauuaugaggagcuaagagagcaauugagcucagugucaucauuugaaagguuugagauauuccccaagacaaguucauggcccaaucaugacucgaacaaagguguaacggcagcauguccucaugcuggagcaaaaagcuucuacaaaaauuuaauauggcuaguuaaaaaaggaaauucauacccaaagcucagcaaauccuacauuaaugauaaagggaaagaaguccucgugcuauggggcauucaccauccaucuacuagugcugaccaacaaagucucuaucagaaugcagaugcauauguuuuuguggggacaucaagauacagcaagaaguucaagccggaaauagcaauaagacccaaagugagggaucaagaagggagaaugaacuauuacuggacacuaguagagccgggagacaaaauaacauucgaagcaacuggaaaucuagugguaccgagauaugcauucgcaaugguaagaaaugcuggaucugguauuaucauuucagauacaccaguccacgauugcaauacaacuugucagacacccaagggugcuauaaacaccagccucccauuucagaauauacauccgaucacaauuggaaaauguccaaaauauguaaaaagcacaaaauugagacuggccacaggauugaggaaugucccgucuauucaaucuagaggccuauuuggggccauugccgguuucauugaagggggguggacagggaugguagauggaugguacgguuaucaccaucaaaaugagcaggggucaggauaugcagccgaccugaagagcacacagaaugccauugacgagauuacuaacaaaguaaauucuguuauugaaaagaugaauacacaguucacagcaguagguaaagaguucaaccaccuggaaaaaagaauggagaauuuaaauaaaaaaguugaugaugguuuccuggacauuuggacuuacaaugccgaacuguugguucuauuggaaaaugaaagaacuuuggacuaccacgauucaaaugugaagaacuuauaugaaaagguaagaagccaguuaaaaaacaaugccaaggaaauuggaaacggcugcuuugaauuuuaccacaaaugcgauaacacgugcauggaaagugucaaaaaugggacuuaugacuacccaaaauacucagaggaagcaaaauuaaacagagaagaaauagaugggguaaagcuggaaucaacaaggauuuaccagauuuuggcgaucuauucaacugucgccaguucauugguacugguagucucccugggggcaaucaguuucuggaugugcucuaaugggucucuacaguguagaauauguauuuaa

SEQ ID NO: 41330 - RNA, 1701 nt, Artificial Sequence
  derived and/or modified CDS sequence (wt) from hemagglutinin__InfluenzaA__AFN18570
augaaggcaauacuaguaguucugcuauauacauuugcaaccgcaaaugcagacacauuauguauagguuaucaugcgaacaauucaacagacacuguagacacaguacuagaaaagaauguaacaguaacacacucuguuaaccuucuagaagacaagcauaacgggaaacuaugcaaacuaagagggguagccccauugcauuuggguaaauguaacauugcuggcuggauccugggaaauccagagugugaaucacucuccacaguaagcucaugguccuacauuguggaaacaucuaguucagacaauggaacguguuacccaggagauuucaucgauuaugaggagcuaagagagcaauugagcucagugucaucauuugaaagguuugagauauuccccaagacaaguucauggcccaaucaugacucgaacaaagguguaacggcagcauguccucaugcuggagcaaaaagcuucuacaaaaauuuaauauggcuaguuaaaaaaggaaauucauacccaaagcucagcaaauccuacauuaaugauaaagggaaagaaguccucgugcuauggggcauucaccauccaucuacuagugcugaccaacaaagucucuaucagaaugcagaugcauauguuuuuguggggacaucaagauacagcaagaaguucaagccggaaauagcaauaagacccaaagugagggaucaagaagggagaaugaacuauuacuggacacuaguagagccgggagacaaaauaacauucgaagcaacuggaaaucuagugguaccgagauaugcauucgcaauggaaagaaaugcuggaucugguauuaucauuucagauacaccaguccacgauugcaauacaacuugucagacacccaagggugcuauaaacaccagccucccauuucagaauauacauccgaucacaauuggaaaauguccaaaauauguaaaaagcacaaaauugagacuggccacaggauugaggaaugucccgucuauucaaucuagaggccuauuuggggccauugccgguuucauugaagggggguggacagggaugguagauggaugguacgguuaucaccaucaaaaugagcaggggucaggauaugcagccgaccugaagagcacacagaaugccauugacgagauuacuaacaaaguaaauucuguuauugaaaagaugaauacacaguucacagcaguagguaaagaguucaaccaccuggaaaaaagaauagagaauuuaaauaaaaaaguugaugaugguuuccuggacauuuggacuuacaaugccgaacuguugguucuauuggaaaaugaaagaacuuuggacuaccacgauucaaaugugaagaacuuauaugaaaagguaagaagccaguuaaaaaacaaugccaaggaaauuggaaacggcugcuuugaauuuuaccacaaaugcgauaacacgugcauggaaagugucaaaaaugggacuuaugacuacccaaaauacucagaggaagcaaaauuaaacagagaagaaauagaugggguaaagcuggaaucaacaaggauuuaccagauuuuggcgaucuauucaacugucgccaguucauugguacugguagucucccugggggcaaucaguuucuggaugugcucuaaugggucucuacaguguagaauauguauuuaa

SEQ ID NO: 41331 - RNA, 1701 nt, Artificial Sequence; identical to SEQ ID NO: 34681
  derived and/or modified CDS sequence (wt) from hemagglutinin__InfluenzaA__AFN18580

SEQ ID NO: 41332 - RNA, 1701 nt, Artificial Sequence
  derived and/or modified CDS sequence (wt) from hemagglutinin__InfluenzaA__AFN18590
auggaggcaauacuaguaguucugcuauauacauuugcaaccgcaaaugcagacacauuauguauagguuaucaugcgaacaauucaacagacacuguagacacaguacuagaaaagaauguaacaguaacacacucuguuaaccuucuagaagacaagcauaacgggaaacuaugcaaacuaagagggguagccccauugcauuuggguaaauguaacauugcuggcuggauccugggaaauccagagugugaaucacucuccacagcaagcucaugguccuacauuguggaaacaucuaguucagacaauggaacguguuacccaggagauuucaucgauuaugaggagcuaagagagcaauugagcucagugucaucauuugaaagguuugagauauuccccaagacaaguucauggcccaaucaugacucgaacaaagguguaacggcagcauguccucaugcuggagcaaaaagcuucuacaaaaauuuaauauggcuaguuaaaaaaggaaauucauacccaaagcucagcaaauccuacauuaaugauaaagggaaagaaguccucgugcuauggggcauucaccauccaucuacuagugcugaccaacaaagucucuaucagaaugcagaugcauauguuuuuguggggucaucaagauacagcaagaaguucaagccggaaauagcaauaagacccaaagugagggaucaagaagggagaaugaacuauuacuggacacuaguagagccgggagacaaaauaacauucgaagcaacuggaaaucuagugguaccgagauaugcauucgcaauggaaagaaaugcuggaucugguauuaucauuucagauacaccaguccacgauugcaauacaacuugucagacacccaagggugcuauaaacaccagccucccauuucauaauauacauccgaucacaauuggaaaauguccaaaauauguaaaaagcacaaaauugagacuggccacaggauugaggaaugucccgucuauucaaucuagaggccuauuuggggccauugccgguuucauugaagggggguggacagggaugguggauggaugguacgguuaucaccaucaaaaugagcaggggucaggauaugcagccgaccugaagagcacacagaaugccauugacgagauuacuaacaaaguaaauucuguuauugaaaagaugaauacacaguucacagcaguagguaaagaguucaaccaccuggaaaaaagaauagagaauuuaaauaaaaaaguugaugaugguuuccuggacauuuggacuuacaaugccgaacuguugguucuauuggaaaaugaaagaacuuuggacuaccacgauucaaaugugaagaacuuauaugagaagguaagaagccaguuaaaaaacaaugccaaggaaauuggaaacggcugcuuugaauuuuaccacaaaugcgauaacacgugcauggaaagugucaaaaaugggacuuaugacuacccaaaauacucagaggaagcaaaauuaaacagagaagaaauagaugggguaaagcuggaaucaacaaggauuuaccagauuuuggcgaucuauucaacugucgccaguucauugguacugguagucucccugggggcaaucaguuucuggaugugcucuaaugggucucuacaguguagaauauguauuuaa

SEQ ID NO: 41333 - RNA, 1701 nt, Artificial Sequence
  derived and/or modified CDS sequence (wt) from hemagglutinin__InfluenzaA__AFN18600
augaaggcaauacuaguaguucugcuauauacauuugcaaccgcaaaugcagacacauuauguauagguuaucaugcgaacaauucaacagacacuguagacacaguacuagaaaagaauguaacaguaacacacucuguuaaccuucuagaagacaagcauaacgggaaacuaugcaaacuaagagggguagccccauugcauuuggguaaauguaacauugcuggcuggauccugggaaauccagagugugaaucacucuccacagcaagcucaugguccuacauuguggaaacaucuaguucagacaauggaacguguuacccaggagauuucaucgauuaugaggagcuaagagagcaauugagcucagugucaucauuugaaagguuugagauauuccccaagacaaguucauggcccaaucaugacucgaacaaagguguaacggcagcauguccucaugcuggagcaaaaagcuucuacaaaaauuuaauauggcuaguuaaaaaaggaaauucauacccaaagcucagcaaauccuacauuaaugauaaagggaaagaaguccucgugcuauggggcauucaccauccaucuacuagugcugaccaacaaaaucucuaucagaaugcagaugcauauguuuuuguggggacaucaagauacagcaagaaguucaagccggaaauagcaauaagacccaaagugagggaucaagaagggagaaugaacuauuacuggacacuaguagagccgggagacaaaauaacauucgaagcaacuggaaaucuagugguaccgagauaugcauucgcaauggaaagaaaugcuggaucugguauuaucauuucagauacaccaguccacgauugcaauacaacuugucagacacccaagggugcuauaaacaccagccucccauuucagaauauacauccgaucacaauuggaaaauguccaaaauauguaaaaagcacaaaauugagacuggccacaggauugaggaaugucccgucuauucaaucuagaggccuauuuggggccauugccgguuucauugaagggggguggacagggaugguagauggaugguacgguuaucaccaucaaaaugagcaggggucaggauaugcagccgaccugaagagcacacagaaugccauugacgagauuacuaacaaaguaaauucuguuauugaaaagaugaauacacaguucacagcaguagguaaagaguucaaccaccuggaaaaaagaauagagaauuuaaauaaaaaaguugaugaugguuuccuggacauuuggacuuacaaugccgaacuguugguucuauuggaaaaugaaagaacuuuggacuaccacgauucaaaugugaagaacuuauaugaaaagguaagaagccaguuaaaaaacaaugccaaggaaauuggaaacggcugcuuugaauuuuaccacaaaugcgauaacgcgugcauggaaagugucaaaaaugggacuuaugacuacccaaaauacucagaggaagcaaaauuaaacagagaagaaauagaugggguaaagcuggaaucaacaaggauuuaccagauuuuggcgaucuauucaacugucgccaguucauugguacugguagucucccugggggcaaucaguuucuggaugugcucuaaugggucucuacaguguagaauauguauuuaa

SEQ ID NO: 41334 - RNA, 1701 nt, Artificial Sequence
  derived and/or modified CDS sequence (wt) from hemagglutinin__InfluenzaA__AFN18610
augaaggcaauacuaguaguucugcuauauacauuugcaaccgcaaaugcagacacauuauguauagguuaucaugcgaacaauucaacagacacuguagacacaguacuagaaaagaauguaacaguaacacacucuguuaaccuucuagaagacaagcauaacgggaaacuaugcaaacuaagagggguagccccauugcauuuggguaaauguaacauugcuggcuggauccugggaaauccagagugugaaucacucuccacagcaagcucaugguccuacauuguggaaacaucuaguucagacaauggaacguguuacccaggagauuucaucgauuaugaggagcuaagagagcaauugagcucagugucaucauuugaaagguuugagauauuccccaagacaaguucauggcccaaucaugacucgaacaaagguguaacggcagcauguccucaugcuggagcaaaaagcuucuacaaaaauuuaauauggcuaguuaaaaaaggaaauucauacccaaagcucagcaaauccuacauuaaugauaaagggaaagaaguccucgugcuauggggcauucaccauccaucuacuagugcugaccaacaaagucucuaucagaaugcagaugcauauguuuuuguggggacaucaagauacagcaagaaguucaagccggaaauagcaauaagacccaaagugagggaucaagaagggagaaugaacuauuacuggacacuaguagagccgggagacaaaauaacauucgaagcaacuggaaaucuagugguaccgagauaugcauucgcaauggaaagaaaugcuggaucugguauuaucauuucagauacaccaguccacgauugcaauacaacuugucagacacccaagggugcuauaaacaccagccucccauuucagaauauacauccgaucacaauuggaaaauguccaaaauauguaaaaagcacaaaauugagacuggccacaggauugaggaaugucccuucuauucaaucuagaggccuauuuggggccauugccgguuucauugaagggggguggacagggaugguagauggaugguacgguuaucaccaucaaaaugagcaggggucaggauaugcagccgaccugaagagcacacagaaugccauugacgagauuacuaacaaaguaaauucuguuauugaaaagaugaauacacaguucacagcaguagguaaagaguucaaccaccuggaaaaaagaauagagaauuuaaauaaaaaaguugaugaugguuuccuggacauuuggacuuacaaugccgaacuguugguucuauuggaaaaugaaagaacuuuggacuaccacgauucaaaugugaagaacuuauaugaaaagguaagaagccaguuaaaaaacaaugccaaggaaauuggaaacggcugcuuugaauuuuaccacaaaugcgauaacacgugcauggaaagugucaaaaaugggacuuaugacuacccaaaauacucagaggaagcaaaauuaaacagagaagaaauagaugggguaaagcuggaaucaacaaggauuuaccagauuuuggcgaucuauucaacugucgccaguucauugguacugguagucucccugggggcaaucaguuucuggaugugcucuaaugggucucuacaguguagaauaugcauuuaa

SEQ ID NO: 41335 - RNA, 1701 nt, Artificial Sequence
  derived and/or modified CDS sequence (wt) from hemagglutinin__InfluenzaA__AFN18617
augaaggcaauacuaguaguucugcuauauacauuugcaaccgcaaaugcagacacauuauguauagguuaucaugcgaacaauucaacagacacuguagacacaguacuagaaaagaauguaacaguaacacacucuguuaaccuucuagaagacaagcauaacgggaaacuaugcaaacuaagagggguagccccauugcauuuggguaaauguaacauugcuggcuggauccugggaaauccagagugugaaucacucuccacagcaagcucaugguccuacauuguggaaacaucuaguucagacaauggaacguguuacccaggagauuucaucgauuaugaggagcuaagagagcaauugagcucagugucaucauuugaaagguuugagauauuccccaagacaaguucauggcccaaucaugacucgaacaaagguguaacggcagcauguccucaugcuggagcaaaaagcuucuacaaaaauuuaauauggcuaguuaaaaaaggaaauucauacccaaagcucagcaaauccuacauuaaugauaaagggaaagaaguccucgugcuauggggcauucaccauccaucuacuagugcugaccaacaaagucucuaucagaaugcagaugcauauguuuuuguggggacaucaagauacagcaagaaguucaagccggaaauagcaauaagacccaaagugagggaucaagaagggagaaugaacuauuacuggacacuaguagagccgggagacaaaauaacauucgaagcaacuggaaaucuagugguaccgagauaugcauucgcaaugguaagaaaugcuggaucugguauuaucauuucagauacaccaguccacgauugcaauacaacuugucagacacccaagggugcuauaaacaccagccucccauuucagaauauacauccgaucacaauuggaaaauguccaaaauauguaaaaagcacaaaauugagacuggccacaggauugaggaaugucccgucuauucaaucuagaggccuauuuggggccauugccgguuucauugaagggggguggacagggaugguagauggaugguacgguuaucaccaucaaaaugagcaggggucaggauaugcagccgaccugaagagcacacagagugccauugacgagauuacuaacaaaguaaauucuguuauugaaaagaugaauacacaguucacagcaguagguaaagaguucaaccaccuggaaaaaagaauagagaauuuaaauaaaaaaguugaugaugguuuccuggacauuuggacuuacaaugccgaacuguugguucuauuggaaaaugaaagaacuuuggacuaccacgauucaaaugugaagaacuuauaugaaaagguaagaagccaguuaaaaaacaaugccaaggaaauuggaaacggcugcuuugaauuuuaccacaaaugcgauaacacgugcauggaaagugucaaaaaugggacuuaugacuacccaaaauacucagaggaagcaaaauuaaaaagagaagaaauagaugggguaaagcuggaaucaacaaggauuuaccagauuuuggcgaucuauucaacugucgccaguucauugguacugguagucucccugggggcaaucaguuucuggaugugcucuaaugggucucuacaguguagaauauguauuuaa

SEQ ID NO: 41336 - RNA, 1701 nt, Artificial Sequence; identical to SEQ ID NO: 35542
  derived and/or modified CDS sequence (wt) from hemagglutinin__InfluenzaA__AFN18622

SEQ ID NO: 41337 - RNA, 1701 nt, Artificial Sequence; identical to SEQ ID NO: 35311
  derived and/or modified CDS sequence (wt) from hemagglutinin__InfluenzaA__AFN18629

SEQ ID NO: 41338 - RNA, 1701 nt, Artificial Sequence; identical to SEQ ID NO: 41238
  derived and/or modified CDS sequence (wt) from hemagglutinin__InfluenzaA__AFN18634

SEQ ID NO: 41339 - RNA, 1701 nt, Artificial Sequence
  derived and/or modified CDS sequence (wt) from hemagglutinin__InfluenzaA__AFN18644
augaaggcaauacuaguaguucugcuauauacauuugcaaccgcaaaugcagacacauuauguauagguuaucaugcgaacaauucaacagacacuguagacacaguacuagaaaagaauguaacaguaacacacucuguuaaccuucuagaagacaagcauaacgggaaacuaugcaaacuaagagggguagccccauugcauuuggguaaauguaacauugcuggcuggauccugggaaauccagagugugaaucacucuccacagcaagcucaugguccuacauuguggaaacaucuaguucagacaauggaacguguuacccaggagauuucaucgauuaugaggagcuaagagagcaauugagcucagugucaucauuugaaagguuugagauauuccccaagacaaguucauggcccaaucaugacucgaacaaagguguaacggcagcauguccucaugcuggagcaaaaagcuucuacaaaaauuuaauauggcuaguuaaaaaaggaaauucauacccaaagcucagcaaauccuacauuaaugauaaagggaaagaaguccucgugcuauggggcauucaccauccaucuacuagugcugaccaacaaagucucuaucagaaugcagaugcauauguuuuuguggggacaucaagauacagcaagaaguucaagccggaaauagcaauaagacccaaagugagggaucaagaagggagaaugaacuauuacuggacacuaguagagccgggagacaaaauaacauucgaagcaacuggaaaucuagugguaccgagauaugcauucgcaaugguaagaaaugcuggaucugguauuaucauuucagauacaccaguccacgauugcaauacaacuugucagacacccaagggugcuauaaacaccagccucccauuucagaauauacauccgaucacaauuggaaaauguccaaaauauguaaaaagcacaaaauugagacuggccacaggauugaggaaugucccgucuauucaaucuagaggccuauuuggggccauugccgguuucauugaagggggguggacagggaugguagauggaugguacgguuaucaccaucaaaaugagcaggggucaggauaugcagccgaccugaagagcacacagagugccauugacgagauuacuaacaaaguaaauucuguuauugaaaaggugaauacacaguucacagcaguagguaaagaguucaaccaccuggaaaaaagaauagagaauuuaaauaaaaaaguugaugaugguuuccuggacauuuggacuuacaaugccgaacuguugguucuauuggaaaaugaaagaacuuuggacuaccacgauucaaaugugaagaacuuauaugaaaagguaagaagccaguuaaaaaacaaugccaaggaaauuggaaacggcugcuuugaauuuuaccacaaaugcgauaacacgugcauggaaagugucaaaaaugggacuuaugacuacccaaaauacucagaggaagcaaaauuaaacagagaagaaauagaugggguaaagcuggaaucaacaaggauuuaccagauuuuggcgaucuauucaacugucgccaguucauugguacugguagucucccugggggcaaucaguuucuggaugugcucuaaugggucucuacaguguagaauauguauuuaa

SEQ ID NO: 41340 - RNA, 1701 nt, Artificial Sequence
  derived and/or modified CDS sequence (wt) from hemagglutinin__InfluenzaA__AFN18654
augaaggcaauacuaguaguucugcuauauacauuugcaaccgcaaaugcagacacauuauguauagguuaucaugcgaacaauucaacagacacuguagacacaguacuagaaaagaauguaacaguaacacacucuguuaaccuucuagaagacaagcauaacgggaaacuaugcaaacuaagagggguagccccauugcauuuggguaaauguaacauugcuggcuggauccugggaaauccagagugugaaucacucuccacagcaagcucaugguccuacauuguggaaacaucuaguucagacaauggaacguguuacccaggagauuucaucgauuaugaggagcuaagagagcaauugagcucagugucaucauuugaaagguuugagauauuccccaagacaaguucauggcccaaucaugacucgaacaaagguguaacggcagcauguccucaugcuggagcaaaaagcuucuacaaaaauuuaauauggcuaguuaaaaaaggaaauucauacccaaagcucagcaaauccuacauuaaugauaaagggaaagaaguccucgugcuauggggcauucaccauccaucuacuagugcugaccaacaaagucucuaucagaaugcagaugcauauguuuuuguggggacaucaagauacagcaagaaguucaagccggaaauagcaauaagacccaaagugagggaucaagaagggagaaugaacuauuacuggacacuaguagagccgggagacaaaauaacauucgaagcaacuggaaaucuagugguaccgagauaugcauucgcaaugguaagaaaugcuggaucuggcauuaucauuucagauacaccaguccacgauugcaauacaacuugucagacacccaagggugcuauaaacaccagccucccauuucagaacauacauccgaucacaauuggaaaauguccaaaauauguaaaaagcacaaaauugagacuggccacaggauugaggaaugucccgucuauucaaucuagaggccuauuuggggccauugccgguuucauugaagggggguggacagggaugguagauggaugguacgguuaucaccaucaaaaugagcaggggucaggauaugcagccgacuugaagagcacacagaaugccauugacgagauuacuaacaaaguaaauucuguuauugaaaagaugaauacacaguucacagcaguagguaaagaguucaaccaccuggaaaaaagaauagagaauuuaaauaaaaaaguugaugaugguuuccuggacauuuggacuuacaaugccgaacuguugguucuauuggaaaaugaaagaacuuuggacuaccacgauucaaaugugaagaacuuauaugaaaagguaagaagccaguuaaaaaacaaugccaaggaaauuggaaacggcugcuuugaauuuuaccacaaaugcgauaacacgugcauggaaagugucaaaaaugggacuuaugacuacccaaaauacucagaggaagcaaaauuaaacagagaagaaauagaugggguaaagcuggaaucaacaaggauuuaccagauuuuggcgaucuauucaacugucgccaguucauugguacugguagucucccugggggcaaucaguuucuggaugugcucuaaugggucucuacaguguagaauauguauuuaa

SEQ ID NO: 41341 - RNA, 1701 nt, Artificial Sequence
  derived and/or modified CDS sequence (wt) from hemagglutinin__InfluenzaA__AFN18664
augaaggcaauacuaguaguucugcuauauacauuugcaaccgcaaaugcagacacauuauguauagguuaucaugcgaacaauucaacagacacuguagacacaguacuagaaaagaauguaacaguaacacacucuguuaaccuucuagaagacaagcauaacgggaaacuaugcaaacuaagagggguagccccauugcauuuggguaaauguaacauugcuggcuggauccugggaaauccagagugugaaucacucuccacagcaagcucaugguccuacauuguggaaacaucuaguucagacaauggaacguguuacccaggagauuucaucgauuaugaggagcuaagagagcaauugagcucagugucaucauuugaaagguuugagauauuccccaagacaaguucauggcccaaucaugacucgaacaaagguguaacggcagcauguccucaugcuggagcaaaaagcuucuacaaaaauuugauauggcuaguuaaaaaaggaaauucauacccaaagcucagcaaauccuacauuaaugauaaagggaaagaaguccucgugcuauggggcauucaccauccaucuacuagugcugaccaacaaagucucuaucagaaugcagaugcauauguuuuuguggggacaucaagauacagcaagaaguucaagccggaaauagcaauaagacccaaagugagggaucaagaagggagaaugaacuauuacuggacacuaguagagccgggagacaaaauaacauucgaagcaacuggaaaucuagugguaccgagauaugcauucgcaauggaaagaaaugcuggaucugguauuaucauuucagauacaccaguccacgauugcaauacaacuugucagacacccaagggugcgauaaacaccagccuaccauuucagaauauacauccgaucacaauuggaaaauguccaaaauauguaaaaagcacaaaauugagacuggccacaggauugaggaaugucccgucuauucaaucuagaggccuauuuggggccauugccgguuucauugaagggggguggacagggaugguagauggaugguacgguuaucaccaucaaaaugagcaggggucaggauaugcagccgaccugaagagcacacagaaugccauugacgagauuacuaacaaaguaaauucuguuauugaaaagaugaauacacaguucacagcaguagguaaagaguucaaccaccuggaaaaaagaauagagaauuuaaauaaaaaaguugaugaugguuuccuggacauuuggacuuacaaugccgaacuguugguucuauuggaaaaugaaagaacuuuggacuaccacgauucaaaugugaagaacuuauaugaaaagguaagaagccaguuaaaaaacaaugccaaggaaauuggaaacggcugcuuugaauuuuaccacaaaugcgauaacacgugcauggaaagugucaaaaaugggacuuaugacuacccaaaauacucagaggaagcaaaauuaaacagagaagaaauagaugggguaaagcuggaaucaacaaggauuuaccagauuuuggcgaucuauucaacugucgccaguucauugguacugguagucucccugggggcaaucaguuucuggaugugcucuaaugggucucuacaguguagaauauguauuuaa

SEQ ID NO: 41342 - RNA, 1701 nt, Artificial Sequence; identical to SEQ ID NO: 41238
  derived and/or modified CDS sequence (wt) from hemagglutinin__InfluenzaA__AFN18674

SEQ ID NO: 41343 - RNA, 1701 nt, Artificial Sequence; identical to SEQ ID NO: 34681
  derived and/or modified CDS sequence (wt) from hemagglutinin__InfluenzaA__AFN18684

SEQ ID NO: 41344 - RNA, 1701 nt, Artificial Sequence
  derived and/or modified CDS sequence (wt) from hemagglutinin__InfluenzaA__AFN18694
augaaggcaauacuaguaguucugcuauauacauuugcaaccgcaaaugcagacacauuauguauagguuaucaugcgaacaauucaacagacacuguagacacaguacuagaaaagaauguaacaguaacacacucuguuaaccuucuagaagacaagcauaacggaaaacuaugcaaacuaagagggguagccccauugcauuuggguaaauguaacauugcuggcuggauccugggaaauccagagugugaaucacucuccacagcaagcucaugguccuacauuguggaaacaucuaguucagacaauggaacguguuacccaggagauuucaucgauuaugaggagcuaagagagcaauugagcucagugucaucauuugaaagguuugagauauuccccaagacaaguucauggcccaaucaugacucgaacaaagguguaacggcagcauguccucaugcuggagcaaaaagcuucuacaaaaauuuaauauggcuaguuaaaaaaggaaauucauacccaaagcucagcaaauccuacauuaaugauaaagggaaagaaguccucgugcuauggggcauucaccauccaucuacuagugcugaccaacaaagucucuaucagaaugcagaugcauauguuuuuguggggacaucaagauacagcaagaaguucaagccggaaauagcaauaagacccaaagugagggaucaagaagggagaaugaacuauuacuggacacuaguagagccgggagacaaaauaacauucgaagcaacuggaaaucuagugguaccgagauaugcauucgcaaugguaagaaaugcuggaucugguauuaucauuucagauacaccaguccacgauugcaauacaacuugucagacacccaagggugcuauaaacaccagccucccauuucagaauauacauccgaucacaauuggaaaauguccaaaauauguaaaaagcacaaaauugagacuggccacaggauugaggaaugucccgucuauucaaucuagaggccuauuuggggccauugccgguuucauugaagggggguggacagggaugguagauggaugguacgguuaucaccaucaaaaugagcaggggucaggauaugcagccgaccugaagagcacacagaaugccauugacgagauuacuaacaaaguaaauucuguuauugaaaagaugaauacacaguucacagcaguagguaaagaguucaaccaccuggaaaaaagaauagagaauuuaaauaaaaaaguugaugaugguuuccuggacauuuggacuuacaaugccgaacuguugguucuauuggaaaaugaaagaacuuuggacuaccacgauucaaaugugaagaacuuauaugaaaagguaagaagccaguuaaaaaacaaugccaaggaaauuggaaacggcugcuuugaauuuuaccacaaaugcgauaacacgugcauggaaagugucaaaaaugggacuuaugacuacccaaaauacucagaggaagcaaaauuaaacagagaagaaauagaugggguaaagcuggaaucaacaaggauuuaccagauuuuggcgaucuauucaacugucgccaguucauugguacugguagucucccugggggcaaucaguuucuggaugugcucuaaugggucucuacaguguagaauauguauuuaa

SEQ ID NO: 41345 - RNA, 1701 nt, Artificial Sequence
  derived and/or modified CDS sequence (wt) from hemagglutinin__InfluenzaA__AFN18704
augaaggcaauacuaguaguucugcuauacacauuugcaaccgcaaaugcagacacauuauguauagguuaucaugcgaacaauucaacagacacuguagacacaguacuagaaaagaauguaacaguaacacacucuguuaaccuucuagaagacaagcauaacgggaaacuaugcaaacuaagagggguagccccauugcauuuggguaaauguaacauugcuggcuggauccugggaaauccagagugugaaucacucuccacagcaagcucaugguccuacauuguggaaacaucuaguucagacaauggaacguguuacccaggagauuucaucgauuaugaggagcuaagagagcaauugagcucagugucaucauuugaaagguuugagauauuccccaagacaaguucauggcccaaucaugacucgaacaaagguguaacggcagcauguccucaugcuggagcaaaaagcuucuacaaaaauuuaauauggcuaguuaaaaaaggaaauucauacccaaagcucagcaaauccuacauuaaugauaaagggaaagaaguccucgugcuauggggcauucaccauccaucuacuagugcugaccaacaaagucucuaucagaaugcagaugcauauguuuuuguggggacaucaagauacagcaagaaguucaagccggaaauagcaauaagacccaaagugagggaucaagaagggagaaugaacuauuacuggacacuaguagagccgggagacaaaauaacauucgaagcaacuggaaaucuagugguaccgagauaugcauucgcaaugguaagaaaugcuggaucugguauuaucauuucagauacaccaguccacgauugcaauacaacuugucagacacccaagggugcuauaaacaccagccucccauuucagaauauacauccgaucacaauuggaaaauguccaaaauauguaaaaagcacaaaauugagacuggccacaggauugaggaaugucccgucuauucaaucuagaggccuauuuggggccauugccgguuucauugaagggggguggacagggaugguagauggaugguacgguuaucaccaucaaaaugagcaggggucaggauaugcagccgaccugaagagcacacagagugccauugacgagauuacuaacaaaguaaauucuguuauugaaaagaugaauacacaguucacagcaguagguaaagaguucaaccaccuggaaaaaagaauagagaauuuaaauaaaaaaguugaugaugguuuccuggacauuuggacuuacaaugccgaacuguugguucuauuggaaaaugaaagaacuuuggacuaccacgauucaaaugugaagaacuuauaugaaaagguaagaagccaguuaaaaaacaaugccaaggaaauuggaaacggcugcuuugaauuuuaccacaaaugcgauaacacgugcauggaaagugucaaaaaugggacuuaugacuacccaaaauacucagaggaagcaaaauuaaacagagaagaaauagaugggguaaagcuggaaucaacaaggauuuaccagauuuuggcgaucuauucaacugucgccaguucauugguacugguagucucccugggggcaaucaguuucuggaugugcucuaaugggucucuacaguguagaauauguauuuaa

SEQ ID NO: 41346 - RNA, 1701 nt, Artificial Sequence
  derived and/or modified CDS sequence (wt) from hemagglutinin__InfluenzaA__AFN18714
augaaggcaauacuaguaguucugcuauauacauuugcaaccgcaaaugcagacacauuauguauagguuaucaugcgaacaauucaacagacacuguagacacaguacuagaaaagaauguaacaguaacacacucuguuaaccuucuagaagacaagcauaacgggaaacuaugcaaacuaagagggguagccccauugcauuuggguaaauguaacauugcuggcuggauccugggaaauccagagugugaaucacucuccacagcaagcucaugguccuacauuguggaaacaucuaguucagacaauggaacguguuacccaggagauuucaucgauuaugaggagcuaagagagcaauugagcucagugucaucauuugaaagguuugagauauuccccaagacaaguucauggcccaaucaugacucgaacaaagguguaacggcagcauguccucaugcuggagcaaaaagcuucuacaaaaauuuaauauggcuaguuaaaaaaggaaauucauacccaaagcucagcaaauccuacauuaaugauaaagggaaagaaguccucgugcuauggggcauucaccauccaucuacuagugcugaccaacaaagucucuaucagaaugcagaugcauauguuuuuguggggacaucaagauacagcaagaaguucaagccggaaauagcaauaagacccaaagugagggaucaagaagggagaaugaacuauuacuggacacuaguagagccgggagacaaaauaacauucgaagcaacuggaaaucuauugguaccgagauaugcauucgcaauggaaagaaaugcuggaucugguauuaucauuucagauacaccaguccacgauugcaauacaacuugucagacacccaagggugcuauaaacaccagccucccauuucagaauauacauccgaucacaauuggaaaauguccaaaauauguaaaaagcacaaaauugagacuggccacaggauugaggaaugucccgucuauucaaucuagaggccuauuuggggccauugccgguuucauugaagggggguggacagggaugguagauggaugguacgguuaucaccaucaaaaugagcaggggucaggauaugcagccgaccugaagagcacacagaaugccauugacgagauuacuaacaaaguaaauucuguuauugaaaagaugaauacacaguucacagcaguagguaaagaguucaaccaccuggaaaaaagaauagagaauuuaaauaaaaaaguugaugaugguuuccuggacauuuggacuuacaaugccgaacuguugguucuauuggaaaaugaaagaacuuuggacuaccacgauucaaaugugaagaacuuauaugaaaagguaagaagccaguuaaaaaacaaugccaaggaaauuggaaacggcugcuuugaauuuuaccacaaaugcgauaacacgugcauggaaagugucaaaaaugggacuuaugacuacccaaaauacucagaggaagcaaaauuaaacagagaagaaauagaugggguaaagcuggaaucaacaaggauuuaccagauuuuggcgaucuauucaacugucgccaguucauugguacugguagucucccugggggcaaucaguuucuggaugugcucuaaugggucucuacaguguagaauauguauuuaa

SEQ ID NO: 41347 - RNA, 1701 nt, Artificial Sequence; identical to SEQ ID NO: 34681
  derived and/or modified CDS sequence (wt) from hemagglutinin__InfluenzaA__AFN18721

SEQ ID NO: 41348 - RNA, 1701 nt, Artificial Sequence; identical to SEQ ID NO: 37347
  derived and/or modified CDS sequence (wt) from hemagglutinin__InfluenzaA__AFN18725

SEQ ID NO: 41349 - RNA, 1701 nt, Artificial Sequence
  derived and/or modified CDS sequence (wt) from hemagglutinin__InfluenzaA__AFN18735
augaaggcaauacuaguaguucugcuauauacauuugcaaccgcaaaugcagacacauuauguauagguuaucaugcgaacaauucaacagacacuguagacacaguacuagaaaagaauguaacaguaacacacucuguuaaccuucuagaagacaagcauaacgggaaacuaugcaaacuaagagggguagccccauugcauuuggguaaauguaacauugcuggcuggauccugggaaauccagagugugaaucacucuccacagcaagcucaugguccuacauuguggaaacaucuaguucagacaauggaacguguuacccaggagauuucaucgauuaugaggagcuaagagagcaauugagcucagugucaucauuugaaagguuugagauauuccccaagacaaguucauggcccaaucaugacucgaacaaagguguaacggcagcauguccucaugcuggagcaaaaagcuucuacaaaacuuuaauauggcuaguuaaaaaaggaaauucauacccaaagcucagcaaauccuacauuaaugauaaagggaaagaaguccucgugcuauggggcauucaccauccaucuacuagugcugaccaacaaagucucuaucagaaugcagaugcauauguuuuuguggggacaucaagauacagcaagaaguucaagccggaaauagcaauaagacccaaagugagggaucaagaagggagaaugaacuauuacuggacacuaguagagccgggagacaaaauaacauucgaagcaacuggaaaucuagugguaccgagauaugcauucgcaauggaaagaaaugcuggaucugguauuaucauuucagauacaccaguccacgauugcaauacaacuugucagacacccaagggugcuauaaacaccagccucccauuucagaauauacauccgaucacaauuggaaaauguccaaaauauguaaaaagcacaaaauugagacuggccacaggauugaggaaugucccgucuauucaaucuagaggccuauuuggggccauugccgguuucauugaagggggguggacagggaugguagauggaugguacgguuaucaccaucaaaaugagcaggggucaggauaugcagccgaccugaagagcacacagaaugccauugacgagauuacuaacaaaguaaauucuguuauugaaaagaugaauacacaguucacagcaguagguaaagaguucaaccaccuggaaaaaagaauagagaauuuaaauaaaaaaguugaugaugguuuccuggacauuuggacuuacaaugccgaacuguugguucuauuggaaaaugaaagaacuuuggacuaccacgauucaaaugugaagaacuuauaugaaaagguaagaagccaguuaaaaaacaaugccaaggaaauuggaaacggcugcuuugaauuuuaccacaaaugcgauaacacgugcauggaaagugucaaaaaugggacuuaugacuacccaaaauacucagaggaagcaaaauuaaacagagaagaaauagaugggguaaagcuggaaucaacaaggauuuaccagauuuuggcgaucuauucaacugucgccaguucauugguacugguagucucccugggggcaaucaguuucuggaugugcucuaaugggucucuacaguguagaauauguauuuaa

SEQ ID NO: 41350 - RNA, 1701 nt, Artificial Sequence; identical to SEQ ID NO: 34980
  derived and/or modified CDS sequence (wt) from hemagglutinin__InfluenzaA__AFN18742

SEQ ID NO: 41351 - RNA, 1701 nt, Artificial Sequence; identical to SEQ ID NO: 36187
  derived and/or modified CDS sequence (wt) from hemagglutinin__InfluenzaA__AFN18747

SEQ ID NO: 41352 - RNA, 1701 nt, Artificial Sequence
  derived and/or modified CDS sequence (wt) from hemagglutinin__InfluenzaA__AFN18757
augaaggcaauacuaguaguucugcuauauacauuugcaaccgcaaaugcagacacauuauguauagguuaucaugcgaacaauucaacagacacuguagacacaguacuagaaaagaauguaacaguaacacacucuguuaaccuucuagaagacaagcauaacgggaaacuaugcaaacuaagagggguagccccauugcauuuggguaaauguaacauugcuggcuggauccugggaaauccagagugugaaucacucuccacagcaagcucaugguccuacauuguggaaacaucuaguucagacaauggaacguguuacccaggagauuucaucgauuaugaggagcuaagagagcaauugagcucagugucaucauuugaaagguuugagauauuccccaagacaaguucauggcccaaucaugacucgaacaaagguguaacggcagcauguccucaugcuggagcaaaaagcuucuacaaaaauuuaauauggcuaguuaaaaaaggaaauucauacccaaagcucagcaaauccuacauuaaugauaaagggaaagaaguccucgugcuauggggcauucaccauccaucuacuagugcugaccaacaaagucucuaucagaaugcagaugcauauguuuuuguggggacaucaagauacagcaagaaguucaagccggaaauagcaauaagacccaaagugagggaucaagaagggagaaugaacuauuacuggacacuaguagagccgggagacaaaauaacauucgaagcaacuggaaaucuagcgguaccgagauaugcauucgcaauggaaagaaaugcuggaucuggcauuaucauuucagauacaccaguccacgauugcaauacaacuugucagacacccaagggugcuauaaacaccagccucccauuucagaauauacauccgaucacaauuggaaaauguccaaaauauguaaaaagcacaaaauugagacuggccacaggauugaggaaugucccgucuauucaaucuagaggccuauuuggggccauugccgguuucauugaagggggguggacagggaugguagauggaugguacgguuaucaccaucaaaaugagcaggggucaggauaugcagccgaccugaagagcacacagaaugccauugacgagauuacuaacaaaguaaauucuguuauugaaaagaugaauacacaguucacagcaguagguaaagaguucaaccaccuggaaaaaagaauagagaauuuaaauaaaaaaguugaugaugguuuccuggacauuuggacuuacaaugccgaacuguugguucuauuggaaaaugaaagaacuuuggacuaccacgauucaaaugugaagaacuuauaugaaaagguaagaagccaguuaaaaaacaaugccaaggaaauuggaaacggcugcuuugaauuuuaccacaaaugcgauaacacgugcauggaaagugucaaaaaugggacuuaugacuacccaaaauacucagaggaagcaaaauuaaacagagaagaaauagaugggguaaagcuggaaucaacaaggauuuaccagauuuuggcgaucuauucaacugucgccaguucauugguacugguagucucccugggggcaaucaguuucuggaugugcucuaaugggucucuacaguguagaauauguauuuaa

SEQ ID NO: 41353 - RNA, 1701 nt, Artificial Sequence; identical to SEQ ID NO: 34681
  derived and/or modified CDS sequence (wt) from hemagglutinin__InfluenzaA__AFN18767

SEQ ID NO: 41354 - RNA, 1701 nt, Artificial Sequence
  derived and/or modified CDS sequence (wt) from hemagglutinin__InfluenzaA__AFN18774
augaaggcaauacuaguaguucugcuauauacauuugcaaccgcaaaugcagacacauuauguauagguuaucaugcgaacaauucaacagacacuguagacacaguacuagaaaagaauguaacaguaacacacucuguuaaccuucuagaagacaagcauaacgggaaacuaugcaaacuaagagggguagccccauugcauuuggguaaauguaacauugcuggcuggauccugggaaauccagagugugaaucacucuccacagcaagcucaugguccuacauuguggaaacaucuaguucagacaauggaacguguuacccaggagauuucaucgauuaugaggagcuaagagagcaauugagcucagugucaucauuugaaagguuugagauauuccccaagacaaguucauggcccaaucaugacucgaacaaagguguaacggcagcauguccucaugcuggagcaaaaagcuucuacaaaaauuuaauauggcuaguuaaaaaaggaaauucauacccaaagcucagcaaauccuacauuaaugauaaagggaaagaaguccucgugcuauggggcauucaccauccaucuacuagugcugaccaacaaagucucuaucagaaugcagaugcauauguuuuuguggggacaucaagauacagcaagaaguucaagccggaaauagcaauaagacccaaagugagggaucaagaagggagaaugaacuauuacuggacacuaguagagccgggagacaaaauaacauucgaagcaacuggaaaucuagugguaccgagauaugcauucgcaaugguaagaaaugcuggaucugguauuaucauuucagauacaccaguccacgauugcaauacaacuugucagacacccaagggugcuauaaacaccagccucccauuucagaauauacauccgaucacaauuggaaaauguccaaaauauguaaaaagcacaaaauugagacuggccacaggauugaggaaugucccgucuauucaaucuagaggccuauuuggggccauugccgguuucauugaagggggguggacagggaugguagauggaugguacgguuaucaccaucaaaaugagcaggggucaggauaugcagccgaccugaagagcacacagagugccauugacgagauuacuaacaaaguaaauucuguuauugaaaagaugaauacacaguucacagcaguagguaaagaguucaaccaccuggaaaaaagaauagagaauuuaaauaaaaaaguugaugaugguuuccuggacauuuggacuuacaaugccgaacuguugguucuauuggaaaaugaaagaacuuuggacuaccacgauucaaaugugaagaacuuauaugaaaagguaagaagccaguuaaaaaacaaugccaaggaaauuggaaacggcugcuuugaauuuuaccacaaaugcgauaacacgugcauggaaagugucaaaaaugggacuuaugacuacccaaaauacucagaggaagcaaaauuaaacagagaagaaauagaugggguaaagcuggaaucaacaaggauuuaccagauuuuggcgaucuauucaacugucgccaguucauugguacugguagucucccugggggcaaucaguuucuggaugugcucuaaugggucucuacaguguagaauauguauuuaa

SEQ ID NO: 41355 - RNA, 1701 nt, Artificial Sequence
  derived and/or modified CDS sequence (wt) from hemagglutinin__InfluenzaA__AFN18776
augaaggcaauacuaguaguucugcuauauacauuugcaaccgcaaaugcagacacauuauguauagguuaucaugcgaacaauucaacagacacuguagacacaguacuagaaaagaauguaacaguaacacacucuguuaaccuucuagaagacaagcauaacgggaaacuaugcaaacuaagagggguagccccauugcauuuggguaaauguaacauugcuggcuggauccugggaaauccagagugugaaucacucuccacagcaagcucaugguccuacauuguggaaacaucuaguucagacaauggaacguguuacccaggagauuucaucgauuaugaggagcuaagagagcaauugagcucagugucaucauuugaaagguuugagauauuccccaagacaaguucauggcccaaucaugacucgaacaaagguguaacggcagcauguccucaugcuggagcaaaaagcuucuacaaaaauuuaauauggcuaguuaaaaaaggaaauucauacccaaagcucagcaaauccuacauuaaugauaaagggaaagaaguccucgugcuauggggcauucaccauccaucuacuagugcugaccaacaaagucucuaucagaaugcagaugcauauguuuuuguggggacaucaagauacagcaagaaguucaagccggaaauagcaauaagacccaaagugagggaucaagaagggagaaugaacuauuacuggacacuaguagagccgggagacaaaauaacauucgaagcaacuggaaaucuagugguaccgagauaugcauucgcaauggaaagaaaugcuggaucugguauuaucauuucagauacaccaguccacgauugcaauacaacuugucagacacccaagggugcuauaaacaccagccucccauuucagaauauacauccgaucacaauuggaaaaugucccaaauauguaaaaagcacaaaauugagacuggccacaggauugaggaaugucccuucuauucaaucuagaggccuauuuggggccauugccgguuucauugaagggggguggacagggaugguagauggaugguacgguuaucaccaucaaaaugagcaggggucaggauaugcagccgaccugaagagcacacagaaugccauugacgagauuacuaacaaaguaaauucuguuauugaaaagaugaauacacaguucacagcaguagguaaagaguucaaccaccuggaaaaaagaauagagaauuuaaauaaaaaaguugaugaugguuuccuggacauuuggacuuacaaugccgaacuguugguucuauuggaaaaugaaagaacuuuggacuaucacgauucaaaugugaagaacuuauaugaaaagguaagaagccaguuaaaaaacaaugccaaggaaauuggaaacggcugcuuugaauuuuaccacaaaugcgauaacacgugcauggaaagugucaaaaaugggacuuaugacuacccaaaauacucagaggaagcaaaacuaaacagagaagaaauagaugggguaaagcuggaaucaacaaggauuuaccagauuuuggcgaucuauucaacugucgccaguucauugguacugguagucucccugggggcaaucaguuucuggaugugcucuaaugggucucuacaguguagaauauguauuuaa

SEQ ID NO: 41356 - RNA, 1701 nt, Artificial Sequence; identical to SEQ ID NO: 35547
  derived and/or modified CDS sequence (wt) from hemagglutinin__InfluenzaA__AFN18778

SEQ ID NO: 41357 - RNA, 1701 nt, Artificial Sequence
  derived and/or modified CDS sequence (wt) from hemagglutinin__InfluenzaA__AFN18784
augaaggcaauacuaguaguucugcuauauacauuugcaaccgcaaaugcagacacauuauguauagguuaucaugcgaacaauucaacagacacuguagacacaguacuagaaaagaauguaacaguaacacacucuguuaaccuucuagaagacaagcauaacgggaaacuaugcaaacuaagagggguagccccauugcauuuggguaaauguaacauugcuggcuggauccugggaaauccagagugugaaucacucuccacagcaagcucaugguccuacauuguggaaacaucuaguucagacaauggaacguguuacccaggagauuucaucgauuaugaggagcuaagagagcaauugagcucagugucaucauuugaaagguuugagauauuccccaagacaaguucauggcccaaucaugacucgaacaaagguguaacggcagcauguccucaugcuggagcaaaaagcuucuacaaaaauuuaauauggcuaguuaaaaaaggaaauucauacccaaagcucagcaaauccuacauuaaugauaaagggaaagaaguccucgugcuauggggcauucaccauccaucuacuagugcugaccaacaaagucucuaucagaaugcagaugcauauguuuuuguggggacaucaagauacagcaagaaguucaagccggaaauagcaauaagacccaaagugagggaucaagaagggagaaugaacuauuacuggacacuaguagagccgggagacaaaauaacauucgaagcaacuggaaaucuagugguaccgagauaugcauucgcaauggaaagaaaugcuggaucugguauuaucauuucagauacaccaguccacgauugcaauacaacuugucagacacccaagggugcuauaaacaccagccucccauuucaaaauauacauccgaucacaauuggaaaauguccaaaauauguaaaaagcacaaaauugagacuggccacaggauugaggaaugucccuucuauucaaucuagaggccuauuuggggccauugccgguuucauugaagggggguggacagggaugguagauggaugguacgguuaucaccaucaaaaugagcaggggucaggauaugcagccgaccugaagagcacacagaaugccauugacgagauuacuaacaaaguaaauucuguuauugaaaaaaugaauacacaguucacagcgguagguaaagaguucaaccaccuggaaaaaagaauagagaauuuaaauaaaaaaguugaugaugguuuccuggacauuuggacuuacaaugccgaacuguugguucuauuggaaaaugaaagaacuuuggacuaccacgauucaaaugugaagaacuuauaugaaaagguaagaagccaguuaaaaaacaaugccaaggaaauuggaaacggcugcuuugaauuuuaccacaaaugcgauaacacgugcauggaaagugucaaaaaugggacuuaugacuacccaaaauacucagaggaagcaaaauuaaacagagaagaaauagaugggguaaagcuggaaucaacaaggauuuaccagauuuuggcgaucuauucaacugucgccaguucauugguacugguagucucccugggggcaaucaguuucuggauguguucuaaugggucucuacaguguagaauauguauuuaa

SEQ ID NO: 41358 - RNA, 1701 nt, Artificial Sequence; identical to SEQ ID NO: 35547
  derived and/or modified CDS sequence (wt) from hemagglutinin__InfluenzaA__AFN18789

SEQ ID NO: 41359 - RNA, 1701 nt, Artificial Sequence; identical to SEQ ID NO: 34681
  derived and/or modified CDS sequence (wt) from hemagglutinin__InfluenzaA__AFN18799

SEQ ID NO: 41360 - RNA, 1701 nt, Artificial Sequence; identical to SEQ ID NO: 34681
  derived and/or modified CDS sequence (wt) from hemagglutinin__InfluenzaA__AFN18809

SEQ ID NO: 41361 - RNA, 1701 nt, Artificial Sequence; identical to SEQ ID NO: 36187
  derived and/or modified CDS sequence (wt) from hemagglutinin__InfluenzaA__AFN18816

SEQ ID NO: 41362 - RNA, 1701 nt, Artificial Sequence; identical to SEQ ID NO: 34681
  derived and/or modified CDS sequence (wt) from hemagglutinin__InfluenzaA__AFN18818

SEQ ID NO: 41363 - RNA, 1701 nt, Artificial Sequence
  derived and/or modified CDS sequence (wt) from hemagglutinin__InfluenzaA__AFN18820
augaaggcaauacuaguaguucugcuauauacauuugcaaccgcaaaugcagacacauuauguauagguuaucaugcgaacaauucaacagacacuguagacacaguacuagaaaagaauguaacaguaacacacucuguuaaccuucuagaagacaagcauaacgggaaacuaugcaaacuaagagggguagccccauugcauuuggguaacuguaacauugcuggcuggauccugggaaauccagagugugaaucacucuccacagcaagcucaugguccuacauuguggaaacaucuaguucagacaauggaacguguuacccaggagauuucaucgauuaugaggagcuaagagagcaauugagcucagugucaucauuugaaagguuugagauauuccccaagacaaguucauggcccaaucaugacucgaacaaagguguaacggcagcauguccucaugcuggagcaaaaagcuucuacaaaaauuuaauauggcuaguuaaaaaaggaaauucauacccaaagcucagcaaauccuacauuaaugauaaagggaaagaaguccucgugcuauggggcauucaccauccaucuacuagugcugaccaacaaagucucuaucagaaugcagaugcauauguuuuuguggggacaucaagauacagcaagaaguucaagccggaaauagcaauaagacccaaagugagggaucaagaagggagaaugaacuauuacuggacacuaguagagccgggagacaaaauaacauucgaagcaacuggaaaucuagugguaccgagauaugcauucgcaauggaaagaaaugcuggaucugguauuaucauuucagauacaccaguccacgauugcaauacaacuugucagacacccaagggugcuauaaacaccagccucccauuucagaauauacauccgaucacaauuggaaaaugucccaaauauguaaaaagcacaaaauugagacuggccacaggauugaggaaugucccuucuauucaaucuagaggccuauuuggggccauugccgguuucauugaagggggguggacagggaugguagauggaugguacgguuaucaccaucaaaaugagcaggggucaggauaugcagccgaccugaagagcacacagaaugccauugacgagauuacuaacaaaguaaauucuguuauugaaaagaugaauacacaguucacagcaguagguaaagaguucaaccaccuggaaaaaagaauagagaauuuaaauaaaaaaguugaugaugguuuccuggacauuuggacuuacaaugccgaacuguugguucuauuggaaaaugaaagaacuuuggacuaccacgauucaaaugugaagaacuuauaugaaaagguaagaagccaguuaaaaaacaaugccaaggaaauuggaaacggcugcuuugaauuuuaccacaaaugcgauaacacgugcauggaaagugucaaaaaugggacuuaugacuacccaaaauacucagaggaagcaaaauuaaacagagaagaaauagaugggguaaagcuggaaucaacaaggauuuaccagauuuuggcgaucuauucaacugucgccaguucauugguacugguagucucccugggggcaaucaguuucuggaugugcucuaaugggucucuacaguguagaauauguauuuaa

SEQ ID NO: 41364 - RNA, 1701 nt, Artificial Sequence; identical to SEQ ID NO: 34681
  derived and/or modified CDS sequence (wt) from hemagglutinin__InfluenzaA__AFN18822

SEQ ID NO: 41365 - RNA, 1701 nt, Artificial Sequence
  derived and/or modified CDS sequence (wt) from hemagglutinin__InfluenzaA__AFN18824
augaaggcaauacuaguaguucugcuauauacauuugcaaccgcaaaugcagacacauuauguauagguuaucaugcgaacaauucaacagacacuguagacacaguacuagaaaagaauguaacaguaacacacucuguuaaccuucuagaagacaagcauaacgggaaacuaugcaaacuaagagggguagccccauugcauuuggguaaauguaacauugcuggcuggauccugggaaauccagagugugaaucacucuccacagcaagcucaugguccuacauuguggaaacaucuaguucagacaauggaacguguuacccaggagauuucaucgauuaugaggagcuaagagagcaauugagcucagugucaucauuugaaagguuugagauauuccccaagacaaguucauggcccaaucaugacucgaacaaagguguaacggcagcauguccucaugcuggagcaaaaagcuucuacaaaaauuuaauauggcuaguuaaaaaaggaaauucauacccaaagcucagcaaauccuacauuaaugauaaagggaaagaaguccucgugcuauggggcauucaccauccaucuacuagugcugaccaacaaagucucuaucagaaugcagaugcauauguuuuuguggggacaucaagauacagcaagaaguucaagccggaaauagcaauaagacccaaagugagggaucaagaagggagaaugaacuauuacuggacacuaguagagccgggagacaaaauaacauucgaagcaacuggaaaucuagugguaccgagauaugcauucgcaauggaaagaaaugcuggaucugguauuaucauuucagauacaccaguccacgauugcaauacaacuugucagacacccaagggugcuauaaacaccagccucccauuucagaauauacauccgaucacaauuggaaaaugucccaaauauguaaaaagcacaaaauugagacuggccacaggauugaggaaugucccuucuauucaaucuagaggccuauuuggggccauugccgguuucauugaagggggguggacagggaugguagauggaugguacgguuaucaccaucaaaaugagcaggggucaggauaugcagccgaccugaagagcacacagaaugccauugacgagauuacuaacaaaguaaauucuguuauugaaaagaugaauacacaguucacagcaguagguaaagaguucaaccaccuggaaaaaagaauagagaauuuaaauaaaaaaguugaugaugguuuccuggacauuuggacuuacaaugccgaacuguugguucuauuggaaaaugaaagaacuuuggacuaccacgauucaaaugugaagaacuuauaugaaaagguaagaagccaguuaaaaaacaaugccaaggaaauuggaaacggcugcuuugaauuuuaccacaaaugcgauaacacgugcauggaaagugucaaaaaugggacuuaugacuacccaaaauacucagaggaagcaaaacuaaacagagaagaaauagaugggguaaggcuggaaucaacaaggauuuaccagauuuuggcgaucuauucaacugucgccaguucauugguacugguagucucccugggggcaaucaguuucuggaugugcucuaaugggucucuacaguguagaauauguauuuaa

SEQ ID NO: 41366 - RNA, 1701 nt, Artificial Sequence
  derived and/or modified CDS sequence (wt) from hemagglutinin__InfluenzaA__AFN18826
augaaggcaauacuaguaguucugcuauauacauuugcaaccgcaaaugcagacacauuauguauagguuaucaugcgaacaauucaacagacacuguagacacaguacuagaaaagaauguaacaguaacacacucuguuaaccuucuagaagacaagcauaacgggaaacuaugcaaacuaagagggguagccccauugcauuuggguaaauguaacauugcuggcuggauccugggaaauccagagugugaaucacucuccacagcaagcucaugguccuacauuguggaaacaucuaguucagacaauggaacguguuacccaggagauuucaucgauuaugaggagcuaagagagcaauugagcucagugucaucauuugaaaaguuugagauauuccccaagacaaguucauggcccaaucaugacucgaacaaagguguaacggcagcauguccucaugcuggagcaaaaagcuucuacaaaaauuuaauauggcuaguuaaaaaaggaaauucauacccaaagcucagcaaauccuacauuaaugauaaagggaaagaaguccucgugcuauggggcauucaccauccaucuacuagugcugaccaacaaagucucuaucagaaugcagaugcauauguuuuuguggggacaucaagauacagcaagaaguucaagccggaaauagcaauaagacccaaagugagggaucaagaagggagaaugaacuauuacuggacacuaguagagccgggagacaaaauaacauucgaagcaacuggaaaucuagugguaccgagauaugcauucgcaauggaaagaaaugcuggaucugguauuaucauuucagauacaccaguccacgauugcaauacaacuugucagacacccaagggugcuauaaacaccagccucccauuucagaauauacauccgaucacaauuggaaaauguccaaaauauguaaaaagcacaaaauugagacuggccacaggauugaggaaugucccgucuauucaaucuagaggccuauuuggggccauugccgguuucauugaagggggguggacagggaugguagauggaugguacgguuaucaccaucaaaaugagcaggggucaggauaugcagccgaccugaagagcacacagaaugccauugacgagauuacuaacaaaguaaauucuguuauugaaaagaugaauacacaguucacagcaguagguaaagaguucaaccaccuggaaaaaagaauagagaauuuaaauaaaaaaguugaugaugguuuccuggacauuuggacuuacaaugccgaacuguugguucuauuggaaaaugaaagaacuuuggacuaccacgauucaaaugugaagaacuuauaugaaaagguaagaagccaguuaaaaaacaaugccaaggaaauuggaaacggcugcuuugaauuuuaccacaaaugcgauaacacgugcauggaaagugucaaaaaugggacuuaugacuacccaaaauacucagaggaagcaaaauuaaacagagaagaaauagaugggguaaagcuggaaucaacaaggauuuaccagauuuuggcgaucuauucaacugucgccaguucauugguacugguagucucccugggggcaaucaguuucuggaugugcucuaaugggucucuacaguguagaauauguauuuaa

SEQ ID NO: 41367 - RNA, 1701 nt, Artificial Sequence
  derived and/or modified CDS sequence (wt) from hemagglutinin__InfluenzaA__AFN18828
augaaggcaauacuaguaguucugcuauauacauuugcgaccgcaaaugcagacacauuauguauagguuaucaugcgaacaauucaacagacacuguagacacaguacuagaaaagaauguaacaguaacacacucuguuaaccuucuagaagacaagcauaacgggaaacuaugcaaacuaagagggguagccccauugcauuuggguaaauguaacauugcuggcuggauccugggaaauccagagugugaaucacucuccacagcaagcucaugguccuacauuguggaaacaucaaguucagacaauggaacguguuacccaggagauuucaucgauuaugaggagcuaagagagcaauugagcucagugucaucauuugaaagguuugagauauuccccaagacaaguucauggcccaaucaugacucgaacaaagguguaacagcagcauguccucaugcuggagcaaaaagcuucuacaaaaauuuaauauggcuaguuaaaaaaggaaauucauacccaaagcucagcaaauccuacauuaaugauaaagggaaagaaguccucgugcuauggggcauucaccauccaucuacuagugcugaccaacaaagucucuaucagaaugcagaugcauauguuuuuguggggacaucaagauacagcaagaaguucaagccggaaauagcaauaagacccaaagugagggaucaagaagggagaaugaacuauuacuggacacuaguagagccgggagacaaaauaacauucgaagcaacuggaaaucuagugguaccgagauaugcauucgcaauggaaagaaaugcuggaucugguauuaucauuucagauacaccaguccacgauugcaauacaacuugucagacacccaagggugcuauaaacaccagccucccauuucagaauauacauccgauuacaauuggaaaauguccaaaauauguaaaaagcauaaaauugagacuggccacaggauugaggaaugucccgucuauucaaucuagaggccuauuuggggccauugccgguuucauugaagggggguggacagggaugguagauggaugguacgguuaucaccaucaaaaugagcaggggucaggauaugcagccgaccugaagagcacacagaaugccauugacgagaucacuaacaaaguaaauucuguuauugaaaagaugaauacacaguucacagcaguagguaaagaguucaaccaccuggaaaaaagaauagagaauuuaaauaaaaaaguugaugaugguuuccuggacauuuggacuuacaaugccgaacuguugguucuauuggaaaaugaaagaacuuuggacuaccacgauucaaaugugaagaacuuauaugaaaagguaagaagccaguuaaaaaacaaugccaaggaaauuggaaacggcugcuuugaauuuuaccacaaaugcgauaacacgugcauggaaagugucaaaaaugggacuuaugacuacccaaaauacucagaggaagcaaaauuaaacagagaagaaauagaugggguaaagcuggaaucaacaaggauuuaccagauuuuggcgaucuauucaacugucgccaguucauugguacugguagucucccugggggcaaucaguuucuggaugugcucuaaugggucucuacaguguagaauauguauuuaa

SEQ ID NO: 41368 - RNA, 1701 nt, Artificial Sequence; identical to SEQ ID NO: 41352
  derived and/or modified CDS sequence (wt) from hemagglutinin__InfluenzaA__AFN18830

SEQ ID NO: 41369 - RNA, 1701 nt, Artificial Sequence; identical to SEQ ID NO: 34681
  derived and/or modified CDS sequence (wt) from hemagglutinin__InfluenzaA__AFN18832

SEQ ID NO: 41370 - RNA, 1701 nt, Artificial Sequence; identical to SEQ ID NO: 35547
  derived and/or modified CDS sequence (wt) from hemagglutinin__InfluenzaA__AFN18834

SEQ ID NO: 41371 - RNA, 1701 nt, Artificial Sequence
  derived and/or modified CDS sequence (wt) from hemagglutinin__InfluenzaA__AFN18849
augaaggcaauacuaguaguucugcuauauacauuugcaaccgcaaaugcagacacauuauguauagguuaucaugcgaacaauucaacagacacuguagacacaguacuagaaaagaauguaacaguaacacacucuguuaaccuucuagaagacaagcauaacgggaaacuaugcaaacuaagagggguagccccauugcauuuggguaaauguaacauugcuggcuggauccugggaaauccagagugugaaucacucuccacagcaagcucaugguccuacauuguggaaacaucuaguucagacaauggaacguguuacccaggagauuucaucgauuaugaggagcuaagagagcaauugagcucagugucaucauuugaaagguuugagauauuccccaagacaaguucauggcccaaucaugacucgaacaaagguguaacggcagcauguccucaugcuggagcaaaaagcuucuacaaaaauuuaauauggcuaguuaaaaaaggaaauucauacccaaagcucagcaaauccuacauuaaugauaaagggaaagaaguccucgugcuauggggcauucaccauccaucuacuagugcugaccaacaaagucucuaucagaauguagaugcauauguuuuuguggggacaucaagauacagcaagaaguucaagccggaaauagcaauaagacccaaagugagggaucaagaagggagaaugaacuauuacuggacacuaguagagccgggagacaaaauaacauucgaagcaacuggaaaucuagugguaccgagauaugcauucgcaauggaaagaaaugcuggaucugguauuaucauuucagauacaccaguccacgauugcaauacaacuugucagacacccaagggugcuauaaacaccagccucccauuucagaauauacauccgaucacaauuggaaaauguccaaaauauguaaaaagcacaaaauugagacuggccacaggauugaggaaugucccuucuauucaaucuagaggccuauuuggggccauugccgguuucauugaagggggguggacagggaugguagauggaugguacgguuaucaccaucaaaaugagcaggggucaggauaugcagccgaccugaagagcacacagaaugccauugacgagauuacuaacaaaguaaauucuguuauugaaaagaugaauacacaguucacagcaguagguaaagaguucaaccaccuggaaaaaagaauagagaauuuaaauaaaaaaguugaugaugguuuccuggacauuuggacuuacaaugccgaacuguugguucuauuggaaaaugaaagaacuuuggacuaccacgauucaaaugugaagaacuuauaugaaaagguaagaagccaguuaaaaaacaaugccaaggaaauuggaaacggcugcuuugaauuuuaccacaaaugcgauaacacgugcauggaaagugucaaaaaugggacuuaugacuacccaaaauacucagaggaagcaaaauuaaacagagaagaaauagaugggguaaagcuggaaucaacaaggauuuaccagauuuuggcgaucuauucaacugucgccaguucauugguacugguagucucccugggggcaaucaguuucuggaugugcucuaaugggucucuacaguguagaauauguauuuaa

SEQ ID NO: 41372 - RNA, 1701 nt, Artificial Sequence
  derived and/or modified CDS sequence (wt) from hemagglutinin__InfluenzaA__AFN18856
augaaggcaauacuaguaguucugcuauauacauuugcaaccgcaaaugcagacacauuauguauagguuaucaugcgaacaauucaacagacacuguagacacaguacuagaaaagaauguaacaguaacacacucuguuaaccuucuagaaaacaagcauaacgggaaacuaugcaaacuaagagggguagccccauugcauuuggguaaauguaacauugcuggcuggauccugggaaauccagagugugaaucacucuccacagcaagcucaugguccuacauuguggaaacaucuaguucagacaauggaacguguuacccaggagauuucaucgauuaugaggagcuaagagagcaauugagcucagugucaucauuugaaagguuugagauauuccccaagacaaguucauggcccaaucaugacucgaacaaagguguaacggcagcauguccucaugcuggagcaaaaagcuucuacaaaaauuuaauauggcuaguuaaaaaaggaaauucauacccaaagcucagcaaauccuacauuaaugauaaagggaaagaaguccucgugcuauggggcauucaccauccaucuacuagugcugaccaacaaagucucuaucagaaugcagaugcauauguuuuuguggggacaucaagauacagcaagaaguucaagccggaaauagcaauaagacccaaagugagggaucaagaagggagaaugaacuauuacuggacacuaguagagccgggagacaaaauaacauucgaagcaacuggaaaucuagugguaccgagauaugcauucgcaauggaaagaaaugcuggaucugguauuaucauuucagauacaccaguccacgauugcaauacaacuugucagacacccaagggugcuauaaacaccagccucccauuucagaauauacauccgaucacaauuggaaaauguccaaaauauguaaaaagcacaaaauugagacuggccacaggauugaggaaugucccgucuauucaaucuagaggccuauuuggggccauugccgguuucauugaagggggguggacagggaugguagauggaugguacgguuaucaccaucaaaaugagcaggggucaggauaugcagccgaccugaagagcacacagaaugccauugacgagauuacuaacaaaguaaauucuguuauugaaaagaugaauacacaguucacagcaguagguaaagaguucaaccaccuggaaaaaagaauagagaauuuaaauaaaaaaguugaugaugguuuccuggacauuuggacuuacaaugcugaacuguugguucuauuggaaaaugaaagaacuuuggacuaccacgauucaaaugugaagaacuuauaugaaaagguaagaagccaguuaaaaaacaaugccaaggaaauuggaaacggcugcuuugaauuuuaccacaaaugcgauaacacgugcauggaaagugucaaaaaugggacuuaugacuacccaaaauacucagaggaagcaaaauuaaacagagaagaaauagaugggguaaagcuggaaucaacaaggauuuaccagauuuuggcgaucuauucaacugucgccaguucauugguacugguagucucccugggggcaaucaguuucuggaugugcucuaaugggucucuacaguguagaauauguauuuaa

SEQ ID NO: 41373 - RNA, 1701 nt, Artificial Sequence
  derived and/or modified CDS sequence (wt) from hemagglutinin__InfluenzaA__AFN18858
augaaggcaauacuaguaguucugcuauauacauuugcaaccgcaaaugcagacacauuauguauagguuaucaugcgaacaauucaacagacacuguagacacaguacuagaaaagaauguaacaguaacacacucuguuaaccuucuagaagacaagcauaacgggaaacuaugcaaacuaagagggguagccccauugcauuuggguaaauguaacauugcuggcuggauccugggaaauccagagugugaaucacucuccacagcaagcucaugguccuacauuguggaaacaucuaguucagacaauggaacguguuacccaggagauuucaucgauuaugaggagcuaagagagcaauugagcucagugucaucauuugaaagguuugagauauuccccaagacaaguucauggcccaaucaugacucgaacaaagguguaacggcagcauguccucaugcuggagcaaaaagcuucuacaaaaauuuaauauggcuaguuaaaaaaggaaauucauacccaaagcucagcaaauccuacauuaaugauaaagggaaagaaguccuagugcuauggggcauucaccauccaucuacuagugcugaccaacaaagucucuaucagaaugcagaugcauauguuuuuguggggacaucaagauacagcaagaaguucaagccggaaauagcaauaagacccaaagugagggaucaagaagggagaaugaacuauuacuggacacuaguagagccgggagacaaaauaacauucgaagcaacuggaaaucuagugguaccgagauaugcauucgcaaugguaagaaaugcuggaucugguauuaucauuucagauacaccaguccacgauugcaauacaacuugucagacacccaagggugcuauaaacaccagccucccauuucagaauauacauccgaucacaauuggaaaauguccaaaauauguaaaaagcacaaaauugagacuggccacaggauugaggaaugucccgucuauucaaucuagaggccuauuuggggccauugccgguuucauugaagggggguggacagggaugguagauggaugguacgguuaucaccaucaaaaugagcaggggucaggauaugcagccgaccugaagagcacacagaaugccauugacgagauuacuaacaaaguaaauucuguuauugaaaagaugaauacacaguucacagcaguagguaaagaguucaaccaccuggaaaaaagaauagagaauuuaaauaaaaaaguugaugaugguuuccuggacauuuggacuuacaaugccgaacuguugguucuauuggaaaaugaaagaacuuuggacuaccacgauucaaaugugaagaacuuauaugaaaagguaagaagccaguuaaaaaacaaugccaaggaaauuggaaacggcugcuuugaauuuuaccacaaaugcgauaacacgugcauggaaagugucaaaaaugggacuuaugacuacccaaaauacucagaggaagcaaaauuaaacagagaagaaauagaugggguaaagcuggaaucaacaaggauuuaccagauuuuggcgaucuauucaacugucgccaguucauugguacugguagucucccugggggcaaucaguuucuggaugugcucuaaugggucucuacaguguagaauaugcauuuaa

SEQ ID NO: 41374 - RNA, 1701 nt, Artificial Sequence
  derived and/or modified CDS sequence (wt) from hemagglutinin__InfluenzaA__AFN18860
augaaggcaauacuaguaguucugcuauauacauuugcaaccgcaaaugcagacacauuauguauagguuaucaugcgaacaauucaacagacacuguagacacaguacuagaaaagaauguaacaguaacacacucuguuaaccuucuagaagacaagcauaacgggaaacuaugcaaacuaagagggguagccccauugcauuuggguaaauguaacauugcuggcuggauccugggaaauccagagugugaaucacucuccacagcaagcucaugguccuacauuguggaaacaucuaguucagacaauggaacguguuacccaggagauuucaucgauuaugaggagcuaagagagcaauugagcucagugucaucauuugaaagguuugagauauuccccaagacaaguucauggcccaaucaugacucgaacaaagguguaacggcagcauguucucaugcuggagcaaaaagcuucuacaaaaauuuaauauggcuaguuaaaaaaggaaauucauacccaaagcucagcaaauccuacauuaaugauaaagggaaagaaguccucgugcuauggggcauucaccauccaucuacuagugcugaccaacaaagucucuaucagaaugcagaugcauauguuuuuguggggacaucaagauacagcaagaaguucaagccggaaauagcaauaagacccaaagugagggaucaagaagggagaauggacuauuacuggacacuaguagagccgggagacaaaauaacauucgaagcaacuggaaaucuagugguaccgagauaugcauucgcaauggaaagaaaugcuggaucugguauuaucauuucagauacaccaguccacgauugcaauacaacuugucagacacccaagggugcuauaaacaccagccucccauuucagaauauacauccgaucacaauuggaaaauguccaaaauauguaaaaagcacaaaauugagacuggccacaggauugaggaaugucccgucuauucaaucuagaggccuauuuggggccauugccgguuucauugaagggggguggacagggaugguagauggaugguacgguuaucaccaucaaaaugagcaggggucaggauaugcagccgaccugaagagcacacagaaugccauugacgagauuacuaacaaaguaaauucuguuauugaaaagaugaauacacaguucacagcaguagguaaagaguucaaccaccuggaaaaaagaauagagaauuuaaauaaaaaaguugaugaugguuuccuggacauuuggacuuacaaugccgaacuguugguucuauuggaaaaugaaagaacuuuggacuaccacgauucaaaugugaagaacuuauaugaaaagguaagaagccaguuaaaaaacaaugccaaggaaauuggaaacggcugcuuugaauuuuaccacaaaugcgauaacacgugcauggaaagugucaaaaaugggacuuaugacuacccaaaauacucagaggaagcaaaauuaaacagagaagaaauagaugggguaaagcuggaaucaacaaggauuuaccagauuuuggcgaucuauucaacugucgccaguucauugguacugguagucucccugggggcaaucaguuucuggaugugcucuaaugggucucuacaguguagaauauguauuuaa

SEQ ID NO: 41375 - RNA, 1701 nt, Artificial Sequence
  derived and/or modified CDS sequence (wt) from hemagglutinin__InfluenzaA__AFN18865
augaaggcaauacuaguaguucugcuauauacauuugcaaccgcaaaugcagacacauuauguauagguuaucaugcgaacaauucaacagacacuguagacacaguacuagaaaagaauguaacaguaacacacucuguuaaccuucuagaagacaagcauaacgggaaacuaugcaaacuaagagggguagccccauugcauuuggguaaauguaacauugcuggcuggauccugggaaauccagagugugaaucacucuccacagcaagcucaugguccuacauuguggaaacaucuaguucagacaauggaacguguuacccaggagauuucaucgauuaugaggagcuaagagagcaauugagcucagugucaucauuugaaagguuugagauauuccccaagacaaguucauggcccaaucaugacucgaacaaagguguaacggcagcauguccucaugcuggagcaaaaagcuucuacaaaaauuuaauauggcuaguuaaaaaaggaaauucauacccaaagcucagcaaauccuacauuaaugauaaagggaaagaaguccucgugcuauggggcauucaccauccaucuacuagugcugaccaacaaagucucuaucagaaugcagaugcauauguuuuuguggggacaucaagauacagcaagaaguucaagccggaaauagcaauaagacccaaagugagggaucaagaagggagaaugaacuauuacuggacacuaguagagccgggagacaaaauaacauucgaagcaacuggaaaucuagugguaccgagauaugcauucgcaauggaaagaaaugcuggaucugguauuaucauuucagauacaucaguccacgauugcaauacaacuugucagacacccaagggugcuauaaacaccagccucccauuucagaauauacauccgaucacaauuggaaaauguccaaaauauguaaaaagcacaaaauugagacuggccacaggauugaggaaugucccgucuauucaaucuagaggccuauuuggggccauugccgguuucauugaagggggguggacagggaugguagauggaugguacgguuaucaccaucaaaaugagcaggggucaggauaugcagccgaccugaagagcacacagaaugccauugacaagauuacuaacaaaguaaauucuguuauugaaaagaugaauacacaguucacagcaguagguaaagaguucaaccaccuggaaaaaagaauagagaauuuaaauaaaaaaguugaugaugguuuccuggacauuuggacuuacaaugccgaacuauugguucuauuggaaaaugaaagaacuuuggacuaccacgauucaaaugugaagaacuuauaugaaaagguaagaagccaguuaaaaaacaaugccaaggaaauuggaaacggcugcuuugaauuuuaccacaaaugcgauaacacgugcauggaaagugucaaaaaugggacuuaugacuacccaaaauacucagaggaagcaaaauuaaacagagaagaaauagaugggguaaagcuggaaucaacaaggauuuaccagauuuuggcgaucuauucaacugucgccaguucauugguacugguagucucccugggggcaaucaguuucuggaugugcucuaaugggucucuacaguguagaauauguauuuaa

SEQ ID NO: 41376 - RNA, 1701 nt, Artificial Sequence
  derived and/or modified CDS sequence (wt) from hemagglutinin__InfluenzaA__AFN18875
auggaggcaauacuaguaguucugcuauauacauuugcaaccgcaaaugcagacacauuauguauagguuaucaugcgaacaauucaacagacacuguagacacaguacuagaaaagaauguaacaguaacacacucuguuaaccuucuagaagacaagcauaacgggaaacuaugcaaacuaagagggguagccccauugcauuuggguaaauguaacauugcuggcuggauccugggaaauccagagugugaaucacucuccacagcaagcucaugguccuacauuguggaaacaucuaguucagacaauggaacguguuacccaggagauuucaucgauuaugaggagcuaagagagcaauugagcucagugucaucauuugaaagguuugagauauuccccaagacaaguucauggcccaaucaugacucgaacaaagguguaacggcagcauguccucaugccggagcaaaaagcuucuacaaaaauuuaauauggcuaguuaaaaaaggaaauucauacccaaagcucagcaaauccuacauuaaugauaaagggaaagaaguccucgugcuauggggcauucaccauccaucuacuagugcugcccaacaaagucucuaucagaaugcagaugcauauguuuuuguggggucaucaagauacagcaagaaguucaagccggaaauagcaauaagacccaaagugagggaucaagaagggagaaugaacuauuacuggacacuaguagagccgggagacaaaauaacauucgaagcaacuggaaaucuagugguaccgagauaugcauucgcaauggaaagaaaugcuggaucugguauuaucauuucagauacaccaguccacgauugcaauacaacuugucagacacccaagggugcuauaaacaccagccucccauuucauaauauacauccgaucacaauuggaaaauguccaaaauauguaaaaagcacaaaauugagacuggccacaggauugaggaaugucccgucuauucaaucuagaggccuauuuggggccauugccgguuucauugaagggggguggacagggaugguggauggaugguacgguuaucaccaucaaaaugagcaggggucaggauaugcagccgaccugaagagcacacagaaugccauugacgagauuacuaacaaaguaaauucuguuauugaaaagaugaauacacaauucacagcaguagguaaagaguucaaccaucuggaaaaaagaauagagaauuuaaauaaaaaaguugaugaugguuuccuggacauuuggacuuacaaugccgaacuguugguucuauuggaaaaugaaagaacuuuggacuaccacgauucaaaugugaagaacuuauaugaaaagguaagaagccaguuaaaaaacaaugccaaggaaauuggaaacggcugcuuugaauuuuaccacaaaugcgauaacacgugcauggaaagugucaaaaaugggacuuaugacuacccaaaauacucagaggaagcaaaauuaaacagagaagaaauagaugggguaaagcuggaaucaacaaggauuuaccagauuuuggcgaucuauucaacugucgccaguucauugguacugguagucucccugggggcaaucaguuucuggaugugcucuaaugggucucuacaguguagaauauguauuuaa

SEQ ID NO: 41377 - RNA, 1701 nt, Artificial Sequence
  derived and/or modified CDS sequence (wt) from hemagglutinin__InfluenzaA__AFN18885
augaaggcaauacuaauaguucugcuauauacauuugcaaccgcaaaugcagacacauuauguauagguuaucaugcgaacaauucaacagacacuguagacacaguacuagaaaagaauguaacaguaacacacucuguuaaccuucuagaagacaagcauaacgggaaacuaugcaaacuaagagggguagccccauugcauuuggguaaauguaacauugcuggcuggauccugggaaauccagagugugaaucacucuccacagcaagcucaugguccuacauuguggaaacaucuaguucagacaauggaacguguuacccaggagauuucaucgauuaugaggagcuaagagagcaauugagcucagugucaucauuugaaagguuugagauauuccccaagacaaguucauggcccaaucaugacucgaacaaagguguaacggcagcauguccucaugcuggagcaaaaagcuucuacaaaaauuuaauauggcuaguuaaaaaaggaaauucauacccaaagcucagcaaauccuacauuaaugauaaagggaaagaaguccucgugcuauggggcauucaccauccaucuacuagugcugaccaacaaagucucuaucagaaugcagaugcauauguuuuuguggggacaucaagauacagcaagaaguucaagccggaaauagcaauaagacccaaagugagggaucaagaagggagaaugaacuauuacuggacacuaguagagccgggagacaaaauaacauucgaagcaacuggaaaucuagugguaccgagauaugcauucgcaauggaaagaaaugcuggaucugguauuaucauuucagauacaccaguccacgauugcaauacaacuugucagacacccaagggugcuauaaacaccaaccucccauuucagaauauacauccgaucacaauuggaaaauguccaaaauauguaaaaagcacaaaauugagacuggccacaggacugaggaaugucccgucuacucaaucuagaggccuauuuggggccauugccgguuuuauugaagggggguggacagggaugguagauggaugguacgguuaucaccaucaaaaugagcaggggucaggauaugcagccgaccugaagagcacacagaaugccauugacgagauuacuaacaaaguaaauucuguuauugaaaagaugaauacacaguucacagcaguagguaaagaguucaaccaccuggaaaaaagaauagagaauuuaaauaaaaaaguugaugaugguuuccuggacauuuggacuuacaaugccgaacuguugguucuauuggaaaaugaaagaacuuuggacuaccacgauucaaaugugaagaacuuauaugaaaagguaagaagccaguuaaaaaacaaugccaaggaaauuggaaacggcugcuuugaauuuuaccacaaaugcgauaacacgugcauggaaagugucaaaaaugggacuuaugacuacccaaaauacucagaggaagcaaaauuaaacagagaagaaauagaugggguaaagcuggaaucaacaaggauuuaccagauuuuggcgaucuauucaacugucgccaguucauugguacugguagucucccugggggcaaucaguuucuggauguguucuaaugggucucuacaguguaaaauauguauuuaa

SEQ ID NO: 41378 - RNA, 1701 nt, Artificial Sequence; identical to SEQ ID NO: 34681
  derived and/or modified CDS sequence (wt) from hemagglutinin__InfluenzaA__AFN18892

SEQ ID NO: 41379 - RNA, 1701 nt, Artificial Sequence
  derived and/or modified CDS sequence (wt) from hemagglutinin__InfluenzaA__AFN18894
auggaggcaauacuaguaguucugcuauauacauuugcaaccgcaaaugcagacacauuauguauagguuaucaugcgaacaauucaacagacacuguagacacaguacuagaaaagaauguaacaguaacacacucuguuaaccuucuagaagacaagcauaacgggaaacuaugcaaacuaagagggguagccccauugcauuuggguaaauguaacauugcuggcuggauccugggaaauccagagugugaaucacucuccacagcaagcucaugguccuacauuguggaaacauccaguucagacaauggaacguguuacccaggagauuucaucgauuaugaggagcuaagagagcaauugagcucagugucaucauuugaaagguuugagauauuccccaagacaaguucauggcccaaucaugacucgaacaaagguguaacggcagcauguccucaugccggagcaaaaagcuucuacaaaaauuuaauauggcuaguuaaaaaaggaaauucauacccaaagcucagcaaauccuacauuaaugauaaagggaaagaaguccucgugcuauggggcauucaccauccaucuacuagugcugaccaacaaagucucuaucagaaugcagaugcauauguuuuuguggggucaucaagauacagcaagaaguucaagccggaaauagcaauaagacccaaagugagggaucaagaagggagaaugaacuauuacuggacacuaguagagccgggagacaaaauaacauucgaagcaacuggaaaucuagugguaccgagauaugcauucgcaauggaaagaaaugcuggaucugguauuaucauuucagauacaccaguccacgauugcaauacaacuugucagacacccaagggugcuauaaacaccagccucccauuucauaauauacauccgaucacaauuggaaaauguccaaaauauguaaaaagcacaaaauugagacuggccacaggauugaggaaugucccgucuauucaaucuagaggccuauuuggggccauugccgguuucauugaagggggguggacagggaugguggauggaugguacgguuaucaccaucaaaaugagcaggggucaggauaugcagccgaccugaagagcacacagaaugccauugacgagauuacuaacaaaguaaauucuguuauugaaaagaugaauacacaguucacagcaguagguaaagaguucaaccaucuggaaaaaagaauagagaauuuaaauaaaaaaguugaugaugguuuccuggacauuuggacuuacaaugccgaacuguugguucuauuggaaaaugaaagaacuuuggacuaccacgauucaaaugugaagaacuuauaugaaaagguaagaagccaguuaaaaaacaaugccaaggaaauuggaaacggcugcuuugaauuuuaccacaaaugcgauaacacgugcauggaaagugucaaaaaugggacuuaugacuacccaaaauacucagaggaagcaaaauuaaacagagaagaaauagaugggguaaagcuggaaucaacaaggauuuaccagauuuuggcgaucuauucaacugucgccaguucauugguacugguagucucccugggggcaaucaguuucuggaugugcucuaaugggucucuacaguguagaauauguauuuaa

SEQ ID NO: 41380 - RNA, 1701 nt, Artificial Sequence; identical to SEQ ID NO: 41354
  derived and/or modified CDS sequence (wt) from hemagglutinin__InfluenzaA__AFN18903

SEQ ID NO: 41381 - RNA, 1701 nt, Artificial Sequence
  derived and/or modified CDS sequence (wt) from hemagglutinin__InfluenzaA__AFN18910
augaaggcaauacuaguaguucugcuauauacauuugcaaccgcaaaugcagacacauuauguauagguuaucaugcgaacaauucaacagacacuguagacacuguacuagaaaagaauguaacaguaacacacucuguuaaccuucuagaagacaagcauaacgggaaacuaugcaaacuaagagggguagccccauugcauuuggguaaauguaacauugcuggcuggauccugggaaauccagagugugaaucacucuccacagcaagcucaugguccuacauuguggaaacaucuaguucaggcaauggaacguguuacccaggagauuucaucgauuaugaggagcuaagagagcaauugagcucagugucaucauuugaaagguuugagauauuccccaagacaaguucauggcccaaucaugacucgaacaaagguguaacggcagcauguccucaugcuggagcaaaaagcuucuacaaaaauuuaauauggcuaguuaaaaaaggaaacucauacccaaagcucagcaaauccuacauuaaugauaaagggaaagaaguccucgugcuauggggcauucaccauccaucuacuagugcugaccaacaaagucucuaucagaaugcagaugcauauguuuuuguggggacaucaagauacagcaagaaguucaagccggaaauagcaauaagacccaaagugagggaucaagaagggagaaugaacuauuacuggacacuaguagagccgggagacaaaauaacauucgaagcaacuggaaaucuagugguaccgagauaugcauucgcaauggaaagaaaugcuggaucugguauuaucauuucagauacaccaguccacgauugcaauacaacuugucagacacccaagggugcuauaaacaccagccucccauuucagaacauacauccgaucacaauuggaaaauguccaaaauauguaaaaagcacaaaauugagacuggccacaggauugaggaaugucccgucuauucaaucuagaggccuauuuggggccauugccgguuucauugaagggggguggacagggaugguagauggaugguacgguuaucaccaucaaaaugagcaggggucaggauaugcagccgaccugaagagcacacagaaugccauugacgagauuacuaacaaaguaaauucuguuauugaaaagaugaauacacaguucacagcaguagguaaagaguucaaccaccuggaaaaaagaauagagaauuuaaauaaaaaaguugaugaugguuuccuggacauuuggacuuacaaugccgaacuguugguucuauuggaaaaugaaagaacuuuggacuaccacgauucaaaugugaagaacuuauaugaaaagguaagaagccaguuaaaaaacaaugccaaggaaauuggaaacggcugcuuugaauuuuaccacaaaugcgauaacacgugcauggaaagugucaaaaaugggacuuaugacuacccaaaauacucagaggaagcaaaauuaaacagagaagaaauagaugggguaaagcuggaaucaacaaggauuuaccagauuuuggcgaucuauucaacugucgccaguucauugguacugguagucucccugggggcaaucaguuucuggaugugcucuaaugggucucuacaguguagaauauguauuuaa

SEQ ID NO: 41382 - RNA, 1701 nt, Artificial Sequence
  derived and/or modified CDS sequence (wt) from hemagglutinin__InfluenzaA__AFN18912
auggaggcaauacuaguaguucugcuauauacauuugcaaccgcaaaugcagacacauuauguauagguuaucaugcgaacaauucaacagacacuguagacacaguacuagaaaagaauguaacaguaacacacucuguuaaccuucuagaagacaagcauaacgggaaacuaugcaaacuaagagggguagccccauugcauuuggguaaauguaacauugcuggcuggauccugggaaauccagagugugaaucacucuccacagcaagcucaugguccuacauuguggaaacauccaguucagacaauggaacguguuacccaggagauuucaucgauuaugaggagcuaagagagcaauugagcucagugucaucauuugaaagguuugagauauuccccaagacaaguucauggcccaaucaugacucgaacaaagguguaacggcagcauguccucaugccggagcaaaaagcuucuacaaaaauuuaauauggcuaguuaaaaaaggaaauucauacccaaagcucagcaaauccuacauuaaugauaaagggaaagaaguccucgugcuauggggcauucaccauccaucuacuagugcugaccaacaaagucucuaucagaaugcagaugcauauguuuuuguggggucaucaagauacagcaagaaguucaagccggaaauagcaauaagacccaaagugagggaucaagaagggagaaugaacuauuacuggacacuaguagagccgggagacaaaauaacauucgaagcaacuggaaaucuagugguaccaagauaugcauucgcaauggaaagaaaugcuggaucugguauuaucauuucagauacaucaguccacgauugcaauacaacuugucagacacccaagggugcuauaaacaccagccucccauuucauaauauacauccgaucacaauuggaaaauguccaaaauauguaaaaagcacaaaauugagacuggccacaggauugaggaaugucccgucuauucaaucuagaggccuauuuggggccauugccgguuucauugaagggggguggacagggaugguggauggaugguacgguuaucaccaucaaaaugagcaggggucaggauaugcagccgaccugaagagcacacagaaugccauugacgagauuacuaacaaaguaaauucuguuauugaaaagaugaauacacaguucacagcaguagguaaagaguucaaccaucuggaaaaaagaauagagaauuuaaauaaaaaaguugaugaugguuuccuggacauuuggacuuacaaugccgaacuguugguucuauuggaaaaugaaagaacuuuggacuaccacgauucaaaugugaagaacuuauaugaaaagguaagaagccaguuaaaaaacaaugccaaggaaauuggaaacggcugcuuugaauuuuaccacaaaugcgauaacacgugcauggaaagugucaaaaaugggacuuaugacuacccaaaauacucagaggaagcaaaauuaaacagagaagaaauagaugggguaaagcuggaaucaacaaggauuuaccagauuuuggcgaucuauucaacugucgccaguucauugguacugguagucucccugggggcaaucaguuucuggaugugcucuaaugggucucuacaguguagaauauguauuuaa

SEQ ID NO: 41383 - RNA, 1701 nt, Artificial Sequence
  derived and/or modified CDS sequence (wt) from hemagglutinin__InfluenzaA__AFN18917
augaaggcaauacuaguaguucugcuauauacauuugcaaccgcaaaugcagacacauuauguauagguuaucaugcgaacaauucaacagacacuguagacacuguacuagaaaagaauguaacaguaacacacucuguuaaccuucuagaagacaagcauaacgggaaacuaugcaaacuaagagggguagccccauugcauuuggguaaauguaacauugcuggcuggauccugggaaauccagagugugaaucacucuccacagcaagcucaugguccuacauuguggaaacaucuaguucaggcaauggaacguguuacccaggagauuucaucgauuaugaggagcuaagagagcaauugagcucagugucaucauuugaaagguuugagauauuccccaagacaaguucauggcccaaucaugacucgaacaaagguguaacggcagcauguccucaugcuggagcaaaaagcuucuacaaaaauuuaauauggcuaguuaaaaaaggaaacucauacccaaagcucagcaaauccuacauuaaugauaaagggaaagaaguccucgugcuauggggcauucaccauccaucuacuagugcugaccaacaaagucucuaucagaaugcagaugcauauguuuuuguggggacaucaagauacagcaagaaguucaaaccggaaauagcaauaagacccaaagugagggaucaagaagggagaaugaacuauuacuggacacuaguagagccgggagacaaaauaacauucgaagcaacuggaaaucuagugguaccgagauaugcauucgcaauggaaagaaaugcuggaucugguauuaucauuucagauacaccaguccacgauugcaauacaacuugucagacacccaagggugcuauaaacaccagccucccauuucagaacauacauccgaucacaauuggaaaauguccaaaauauguaaaaagcacaaaauugagacuggccacaggauugaggaaugucccgucuauucaaucuagaggccuauuuggggccauugccgguuucauugaagggggguggacagggaugguagauggaugguacgguuaucaccaucaaaaugagcaggggucaggauaugcagccgaccugaagagcacacagaaugccauugacgagauuacuaacaaaguaaauucuguuauugaaaagaugaauacacaguucacagcaguagguaaagaguucaaccaccuggaaaaaagaauagagaauuuaaauaaaaaaguugaugaugguuuccuggacauuuggacuuacaaugccgaacuguugguucuauuggaaaaugaaagaacuuuggacuaccacgauucaaaugugaagaacuuauaugaaaagguaagaagccaguuaaaaaacaaugccaaggaaauuggaaacggcugcuuugaauuuuaccacaaaugcgauaacacgugcauggaaagugucaaaaaugggacuuaugacuacccaaaauacucagaggaagcaaaauuaaacagagaagaaauagaugggguaaagcuggaaucaacaaggauuuaccagauuuuggcgaucuauucaacugucgccaguucauugguacugguagucucccugggggcaaucaguuucuggaugugcucuaaugggucucuacaguguagaauauguauuuaa

SEQ ID NO: 41384 - RNA, 1701 nt, Artificial Sequence; identical to SEQ ID NO: 34681
  derived and/or modified CDS sequence (wt) from hemagglutinin__InfluenzaA__AFN18927

SEQ ID NO: 41385 - RNA, 1701 nt, Artificial Sequence
  derived and/or modified CDS sequence (wt) from hemagglutinin__InfluenzaA__AFN18937
augaaggcaauacuaguaguucugcuauauacauuugcaaccgcaaaugcagacacauuauguauagguuaucaugcgaacaauucaacagacacuguagacacaguacuagaaaagaauguaacaguaacacacucuguuaaccuucuagaagacaagcauaacgggaaacuaugcaaacuaagagggguagccccauugcauuuggguaaauguaacauugcuggcuggauccugggaaauccagagugugaaucacucuccacagcaagcucaugguccuacauuguggaaacaucuaguucagacaauggaacguguuacccaggagauuucaucgauuaugaggagcuaagagagcaauugagcucagugucaucauuugaaagguuugagauauuccccaagacaaguucauggcccaaucaugacucgaacaaagguguaacggcagcauguccucaugcuggagcaaaaagcuucuacaaaaauuuaauauggcuaguuaaaaaaggaaauucauacccaaagcucagcaaauccuacauuaaugauaaagggaaagaaguccucgugcuauggggcauucaccauccaucuacuagugcugaccaacaaagucucuaucagaaugcagaugcauauguuuuuguggggacaucaaaauacagcaagaaguucaagccggaaauagcaauaagacccaaagugagggaucaagaagggagaaugaacuauuacuggacacuaguagagccgggagacaaaauaacauucgaagcaacuggaaaucuagugguaccgagauaugcauucgcaauggaaagaaaugcuggaucugguauuaucauuucagauacaccaguccacgauugcaauacaacuugucagacacccaagggugcuauaaacaccagccucccauuucagaauauacauccgaucacaauuggaaaauguccaaaauauguaaaaagcacaaaauugagacuggccacaggauugaggaaugucccgucuauucaaucuagaggccuauuuggggccauugccggcuucauugaagggggguggacagggaugguagauggaugguacgguuaucaccaucaaaaugagcaggggucaggauaugcagccgaccugaagagcacacagaaugccauugacgagauuacuaacaaaguaaauucuguuauugaaaagaugaauacacaguucacagcaguagguaaagaguucaaccaccuggaaaaaagaauagagaauuuaaauaaaaaaauugaugaugguuuccuggacauuuggacuuacaaugccgaacuguugguucuauuggaaaaugaaagaacuuuggacuaccacgauucaaaugugaagaacuuauaugaaaagguaagaagccaguuaaaaaacaaugccaaggaaauuggaaacggcugcuuugaauuuuaccacaaaugcgauaacacgugcauggaaagugucaaaaaugggacuuaugacuacccaaaauacucagaggaagcaaaauuaaacagagaagaaauagaugggguaaagcuggaaucaacaaggauuuaccagauuuuggcgaucuauucaacugucgccaguucauugguacugguagucucccugggggcaaucaguuucuggaugugcucuaaugggucucuacaguguagaauauguauuuaa

SEQ ID NO: 41386 - RNA, 1701 nt, Artificial Sequence
  derived and/or modified CDS sequence (wt) from hemagglutinin__InfluenzaA__AFN18952
augaaggcaauacuaguaguucugcuauauacauuugcaaccgcaaaugcagacacauuauguauagguuaucaugcgaacaauucaacagacacuguagacacaguacuagaaaagaauguaacaguaacacacucuguuaacauucuagaagacaagcauaacaggaaacuaugcaaacuaagagggguagccccauugcauuuggguaaauguaacauugcuggcuggauccugggaaauccagagugugaaucacucuccacagcaagcucaugguccuacauuguggaaacaucuaguucagacaauggaacguguuacccaggagauuucaucgauuaugaggagcuaagagagcaauugagcucagugucaucauuugaaagguuugagauauuccccaagacaaguucauggcccaaucaugacucgaacaaagguguaacggcagcauguccucaugcuggagcaaaaagcuucuacaaaaauuuaauauggcuaguuaaaaaaggaaauucauacccaaagcucagcaaauccuacauuaaugauaaagggaaagaaguccucgugcuauggggcauucaccauccaucuacuagugcugaccaacaaagucucuaucagaaugcagaugcauauguuuuuguggggacaucaagauacagcaagaaguucaagccggaaauagcaauaagacccaaagugagggaucaagaagggagaaugaacuauuacuggacacuaguagagccgggagacaaaauaacguucgaagcaacuggaaaucuagugguaccgagauaugcauucgcaauggaaagaaaugcuggaucugguauuaucauuucagauacaccaguccacgauugcaauacaacuugucagacacccaagggugcuauaaacaccagccucccauuucagaauauacauccgaucacaauuggaaaauguccaaaauauguaaaaagcacaaaauugagacuggccacaggauugaggaaugucccgucuauucaaucuagaggccuauuuggggccauugccgguuucauugaagggggguggacagggaugguagauggaugguacgguuaucaccaucaaaaugagcaggggucaggauaugcagccgaccugaagagcacacagaaugccauugacgagauuacuaacaaaguaaauucuguuauugaaaagaugaauacacaguucacagcaguagguaaagaguucaaccaccuggaaaaaagaauagagaauuuaaauaaaaaaguugaugaugguuuccuggacauuuggacuuacaaugccgaacuguugguucuauuggaaaaugaaagaacuuuggacuaccacgauucaaaugugaagaacuuauaugaaaagguaagaagccaguuaaaaaacaaugccaaggaaauuggaaacggcugcuuugaauuuuaccacaaaugcgauaacacgugcauggaaagugucaaaaaugggacuuaugacuaccccaaauacucagaggaagcaaaauuaaacagagaaaaaauagaugggguaaagcuggaaucaacaaggauuuaccagauuuuggcgaucuauucaacugucgccaguucauugguacugguagucucccugggggcaaucaguuucuggaugugcucuaaugggucucuacaguguagaauauguauuuaa

SEQ ID NO: 41387 - RNA, 1701 nt, Artificial Sequence
  derived and/or modified CDS sequence (wt) from hemagglutinin__InfluenzaA__AFN18957
augaaggcaauacuaguaguucugcuauauacauucgcaaccgcaaaugcagacacauuauguauagguuaucaugcgaacaauucaacagacacuguagacacaguacuagaaaagaauguaacaguaacacacucuguuaaccuucuagaagacaaucauaacgggaaacuaugcaaacuaagagggguagccccauugcauuuggguaaauguaacauugcuggcuggauccugggaaauccagagugugaaucacucuccacagcaagcucaugguccuacauuguggaaacaucuaguucagacaauggaacguguuacccaggagauuucaucgauuaugaggagcuaagagagcaauugagcuccgugucaucauuugaaagguuugaaauauuccccaagacaaguucauggcccaaucaugacucgaacaaagguguaacggcagcauguccucaugcuggagcaaaaagcuucuacaaaaauuuaauauggcuaguuaaaaaaggaaauucauacccaaagcucagcaaauccuacauuaaugauaaagggaaagaaguccucgugcuauggggcauucaccauccaucuacuagugcugaccaacaaagucucuaucagaaugcagaugcauauguuuuuguggggacaucaagauacagcaagaaguucaagccggaaauagcaauaagacccaaagugagggaucaagaagggagaaugaacuauuacuggacacuaguagagccgggagacaaaauaacauucgaagcaacuggaaaucuagugguaccgagauaugcauucgcaauggaaagaaaugcuggaucugguauuaucauuucagauacaccaguccacgauugcaauacaacuugucagacacccaagggugcuauaaacaccagccucccauuucagaauauacauccgaucacaauuggaaaauguccaaaauauguaaaaagcacaaaauugagacuggccacaggauugaggaaugucccgucuauucaaucuagaggccuauuuggggccauugccgguuucauugaagggggguggacagggaugguagauggaugguacgguuaucaccaucaaaaugagcaggggucaggauaugcagccgaccugaagagcacacagaaugccauugacgagauuacuaacaaaguaaauucuguuauugaaaagaugaauacacaguucacagcaguagguaaagaguucaaccaccuggaaaaaagaauagagaauuuaaauaaaaagguugaugauggcuuccuggacauuuggacuuacaaugccgaacuguugguucuauuggaaaaugaaagaacuuuggacuaccacgauucaaaugugaagaacuuauaugaaaagguaagaagccaguuaaaaaacaaugccaaggaaauuggaaacggcugcuuugaauuuuaccacaaaugcgauaacacgugcauggaaagugucaaaaaugggacuuaugacuacccaaaauacucagaggaagcaaaauuaaacagagaagaaauagaugggguaaagcuggaaucaacaaggauuuaccagauuuuggcgaucuauucaacugucgccaguucauugguacugguagucucccugggggcaaucaguuucuggaugugcucuaaugggucucuacaguguagaauauguauuuaa

SEQ ID NO: 41388 - RNA, 1701 nt, Artificial Sequence; identical to SEQ ID NO: 41285
  derived and/or modified CDS sequence (wt) from hemagglutinin__InfluenzaA__AFN18964

SEQ ID NO: 41389 - RNA, 1701 nt, Artificial Sequence
  derived and/or modified CDS sequence (wt) from hemagglutinin__InfluenzaA__AFN18974
augaaggcaauacuaguaguucugcuauauacauuugcaaccgcaaaugcagacacauuauguauagguuaucaugcgaacaauucaacagacacuguagacacaguacuagaaaagaauguaacaguaacacacucuguuaaccuucuagaagacaagcauaacgggaaacuaugcaaacuaagagggguagccccauugcauuuggguaaauguaacauugcugguuggauccugggaaauccagagugugaaucacucuccacagcaagcucaugguccuacauuguggaaacaucuaguucagacaauggaacguguuacccaggagauuucaucgauuaugaggagcuaagagagcaauugagcucaaugucaucauuugaaagguuugagauauuccccaagacaaguucauggcccaaucaugacccgaacaaagguguaacggcagcauguccucaugcuggagcaaaaagcuucuacaaaaauuuaauauggcuaguuaaaaaaggaaauucauacccaaagcucagcaaauccuacauuaaugauaaagggaaaaaaguccucgugcuauggggcauucaccauccaucuacuagugcugaccaacaaagucucuaucagaaugcagaugcauauguuuuuguggggacaucaagauacagcaagaaguucaagccggaaauagcaauaagacccaaagugagggaucaagaagggagaaugaacuauuacuggacacuaguagagccgggagacaaaauaacauucgaagcaacuggaaaucuagugguaccgagauaugcauucgcaauggaaagaaaugcuggaucugguauuaucauuucagauacaccaguccacgauugcaauacaacuugucagacacccaagggugcuauaaacaccagccucccauuucagaauauacauccgaucacaauuggaaaauguccaaaauauguaaaaagcacaaaauugagacuggccacaggauugaggaaugucccgucuauucaaucuagaggccuauuuggggccauugccgguuucauugaagggggguggacagggaugguagauggaugguacgguuaucaccaucaaaaugagcaggggucaggauaugcagccgaccugaagagcacacagaaugccauugacgagauuacuaacaaaguaaauucuguuauugaaaagaugaauacacaguucacagcaguagguaaagaguucaaccaccuggaaaaaagaauagagaauuuaaauaaaaaaguugaugaugguuuccuggacauuuggacuuacaaugccgaacuguugguucuauuggaaaaugaaagaacuuuggauuaccacgauucaaaugugaagaacuuauaugaaaagguaagaagccaguuaaaaaacaaugccaaggaaauuggaaacggcugcuuugaauuuuaccacaaaugcgauaacacgugcauggaaagugucaaaaaugggacuuaugacuacccaaaauacucagaugaagcaaaauuaaacagagaagaaauagaugggguaaagcuggaaucaacaaggauuuaccagauuuuggcgaucuauucaacugucgccaguucauugguacugguagucucccugggggcaaucaguuucuggaugugcucuaaugggucucuacaguguagaauauguauuuaa

SEQ ID NO: 41390 - RNA, 1701 nt, Artificial Sequence
  derived and/or modified CDS sequence (wt) from hemagglutinin__InfluenzaA__AFN18979
augaaggcaauacuaguaguucugcuauauacauuugcaaccgcaaaugcagacacauuauguauagguuaucaugcgaacaauucaacagacacuguagacacaguacuagaaaagaauguaacaguaacacacucuguuaaccuucuagaagacaagcauaacgggaaacuaugcaaacuaagagggguagccccauugcauuuggguaaauguaacauugcuggcuggauccugggaaacccagagugugaaucacucuccacagcaagcucaugguccuacauuguggaaacaucuaguucagacaauggaacguguuacccaggagauuucaucaauuaugaggagcuaagagagcaauugagcucagugucaucauuugaaagguuugagauauuccccaagacaaguucauggcccaaucaugacucgaacaaagguguaacggcagcauguccucaugcuggagcaaaaagcuucuacaaaaauuuaauauggcuaguuaaaaaaggaaauucauacccaaagcucagcaaauccuacauuaaugauaaagggaaagaaguccucgugcuauggggcauucaccauccaucuacuagugcugaccaacaaagucucuaucagaaugcagaugcauauguuuuuguggggacaucaagauacagcaagaaguucaagccggaaauagcaauaagacccaaagugagggaucaagaagggagaaugaacuauuacuggacacuaguagagccgggagacaaaauaacauucgaagcaacuggaaaucuagugguaccgagauaugcauucgcaauggaaagaaaugcuggaucugguauuaucauuucagauacaccaguccacgauugcaauacaacuugucagacacccaagggugcuauaaacaccagccucccauuucagaauauacauccgaucacaauuggaaaauguccaaaauauguaaaaagcacaaaauugagacuggccacaggauugaggaaugucccgucuauucaaucuagaggccuauuuggggccauugccgguuucauugaagggggguggacagggaugguagauggaugguacgguuaucaccaucaaaaugagcaggggucaggauaugcagccgaccugaagagcacacagaaugccauugacaagauuacuaacaaaguaaauucuguuauugaaaagaugaauacacaguucacagcaguagguaaagaguucaaccaccuggaaaaaagaauagagaauuuaaauaaaaaaguugaugaugguuuccuggacauuuggacuuacaaugccgaacuguugguucuauuggaaaaugaaagaacuuuggacuaccacgauucaaaugugaagaacuuauaugaaaagguaagaagccaguuaaaaaacaaugccaaggaaauuggaaacggcugcuuugaauuuuaccacaaaugcgauaacacgugcauggaaagugucaaaaaugggacuuaugacuacccaaaauacucagaggaagcaaaauuaaacagagaagaaauagaugggguaaagcuggaaucaacaaggauuuaccagauuuuggcgaucuauucaacugucgccaguucauugguacugguagucucccugggggcaaucaguuucuggaugugcucuaaugggucucuacaguguagaauauguauuuaa

SEQ ID NO: 41391 - RNA, 1701 nt, Artificial Sequence
  derived and/or modified CDS sequence (wt) from hemagglutinin__InfluenzaA__AFN18982
augaaggcaauacuaguaguucugcuauauacauuugcaaucgcaaaugcagacacauuauguauagguuaucaugcgaacaauucaacagacacuguagacacaguacuagaaaagaauguaacaguaacacacucuguuaaccuucuagaagacaagcauaacgggaaacuaugcaaacuaagagggguagccccauugcauuuggguaaauguaacauugcuggcuggauccugggaaauccagagugugaaucacucuccacagcaagcucaugguccuacauuguggaaacaucuaguucagacaauggaacguguuacccaggagauuucaucgauuaugaggagcuaagagagcaauugagcucagugucaucauuugaaagguuugagauauuccccaagacaaauucauggcccaaucaugacucgaacaaagguguaacggcagcauguccucaugcuggagcaaaaagcuucuacaaaaauuuaauauggcuaguuaaaaaaggaaauucauacccaaagcucagcaaauccuacauuaaugauaaagggaaagaaguccucgugcuauggggaauucaccauccaucuacuagugcugaccaacaaagucucuaucagaaugcagaugcauauguuuuuguggggacaucaagauacagcaagaaguucaagccggaaauagcaauaagacccaaagugagggaucaagaagggagaaugaacuauuacuggacacuaguagagccgggagacaaaauaacauucgaagcaacuggaaaucuagugguaccgagauaugcauucgcaauggaaagaaaugcuggaucugguauuaucauuucagauacaccaguucacgauugcaauacaacuugucagacacccaagggugcuauaaacaccagccucccauuucagaauauacauccgaucacaauuggaaaauguccaaaauauguaaaaagcacaaaauugagacuggccacaggguugaggaaugucccgucuauucaaucuagaggccuauuuggggccauugccgguuucauugaagggggguggacagggaugguagauggaugguacgguuaucaccaucaaaaugagcaggggucaggauaugcagccgaccugaagagcacacagcaugccauugacgagauuacuaacaaaguaaauucuguuauugaaaagaugaauacacaguucacagcaguagguaaagaguucaaccaccuggaaaaaagaauagagaauuuaaauaaaaaaguugaugaugguuuccuggacauuuggacuuacaaugccgaacuguugguucuauuggaaaaugaaagaacuuuggacuaccacgauucaaaugugaagaacuuauaugaaaagguaagaagccaguuaaaaaacaaugccaaggaaauuggaaacggcugcuuugaauuuuaucacaaaugcgauaacacgugcauggaaagugucaaaaaugggacuuaugacuacccaaaauacucagaggaagcaaaauuaaacagagaagaaauaaaugggguaaagcuggaaucaacaaggauuuaccagauuuuggcgaucuauucaacugucgccaguucauugguacugguagucucccugggggcaaucaguuucuggaugugcucuaaugggucucuacaguguagaauauguauuuaa

SEQ ID NO: 41392 - RNA, 1701 nt, Artificial Sequence; identical to SEQ ID NO: 41284
  derived and/or modified CDS sequence (wt) from hemagglutinin__InfluenzaA__AFN18984

SEQ ID NO: 41393 - RNA, 1701 nt, Artificial Sequence; identical to SEQ ID NO: 34681
  derived and/or modified CDS sequence (wt) from hemagglutinin__InfluenzaA__AFN18986

SEQ ID NO: 41394 - RNA, 1701 nt, Artificial Sequence
  derived and/or modified CDS sequence (wt) from hemagglutinin__InfluenzaA__AFN18988
augaaggcaauacuaguaguucugcuauauacauuugcaaccgcaaaugcagacacauuauguauagguuaucaugcgaacaauucaacagacacuguagacacaguacuagaaaagaauguaacaguaacacacucuguuaaccuucuagaagacaagcauaacgggaaacuaugcaaacuaagagggguagccccauugcauuuggguaaauguaacauugcuggcuggauccugggaaauccagagugugaaucacuuuccacagcaagcucaugguccuacauuguggaaacaucuaguucagacaauggaacguguuacccaggagauuucaucgauuaugaggagcuaagagagcaauugagcucagugucaucauuugaaagguuugagauauuccccaagacaaguucauggcccaaucaugacucgaacaaagguguaacggcagcauguccucaugcuggagcaaaaagcuucuacaaaaauuuaauauggcuaguuaaaaaaggaaauucauacccaaagcucagcaaauccuacauuaaugauaaagggaaagaaguccucgugcuauggggcauucaccauccaucuacuagugcugaccaacaaagucucuaucagaaugcagaugcauauguuuuuguggggacaucaagauacagcaagaaguucaagccggaaauagcaauaagacccaaagugagggaucaagaagggagaaugaacuauuacuggacacuaguagagccgggagacaaaauaacauucgaagcaacuggaaaucuagugguaccgagauaugcauucgcaauggaaagaaaugcuggaucugguauuaucauuucagauacaccaguccacgauugcaauacaacuugucagacacccaagggugcuauaaacaccagccucccauuucagaauauacauccgaucacaauuggaaaauguccaaaauauguaaaaagcacaaaauugagacuggccacaggauugaggaaugucccgucuauucaaucuagaggccuauuuggggccauugccgguuucauugaagggggguggacagggaugguagauggaugguacgguuaucaccaucaaaaugagcaggggucaggauaugcagccgaccugaagagcacacagaaugccauugacgagauuacuaacaaaguaaauucuguuauugaaaagaugaauacacaguucacagcaguagguaaagaguucaaccaccuggaaaaaagaauagagaauuuaaauaaaaaaguugaugaugguuuccuggacauuuggacuuacaaugccgaacuguugguucuauuggaaaaugagagaacuuuggacuaccacgauucaaaugugaagaacuuauaugaaaagguaagaagccaguuaaaaaacaaugccaaggaaauuggaaacggcugcuuugaauuuuaccacaaaugcgauaacacgugcauggaaagugucaaaaaugggacuuaugacuacccaaaauacucagaggaagcaaaauuaaacagagaagaaauagaugggguaaagcuggaaucaacaaggauuuaccagauuuuggcgaucuauucaacugucgccaguucauugguacugguagucucccugggggcaaucaguuucuggaugugcucuaaugggucgcuacaguguagaauauguauuuaa

SEQ ID NO: 41395 - RNA, 1701 nt, Artificial Sequence
  derived and/or modified CDS sequence (wt) from hemagglutinin__InfluenzaA__AFN18993
augaaggcaauacuaguaguucugcuauauacauuugcaaccgcaaaugcagacacauuauguauagguuaucaugcgaacaauucaacagacacuguagacacaguacuagaaaagaauguaacagugacacacucuguuaaccuucuagaagacaagcauaacgggaaacuaugcaaacuaagagggguagccccauugcauuuggguaaauguaacauugcuggcuggauccugggaaauccagagugugaaucacucuccacagcaagcucaugguccuacauuguggaaacaucuaguucagacaauggaacguguuacccaggagauuucaucgauuaugaggagcuaagagagcaauugagcucagugucaucauuugaaagguuugagauauuccccaagacaaguucauggcccaaucaugacucgaacaaagguguaacggcagcauguccacaugcuggagcaaaaagcuucuacaaaaauuuaauauggcuaguuaaaaaaggaaauucauacccaaagcucagcaaauccuacauuaaugauaaagggaaagaaguccucgugcuauggggcauucaccauccaucuacuagugcugaccaacaaagucucuaucagaaugcagaugcauauguuuuuguggggacaucaagauacagcaagaaguucaagccggaaauagcaauaagacccaaagugagggaucaagaagggagaaugaacuauuacuggacacuaguagagccgggagacaaaauaacauucgaagcaacuggaaaucuagugguaccgagauaugcauucgcaauggaaagaaaugcuggaucugguauuaucauuucagauacaccaguccacgauugcaauacaacuugucagacacccaagggugcuauaaacaccagccucccauuucagaauauacauccgaucacaauuggaaaauguccaaaauauguaaaaagcacaaaauugagacuggccacaggauugaggaaugucccgucuauucaaucuagaggccuauuuggggccauugccgguuucauugaagggggguggacagggaugguagauggaugguacgguuaucaccaucaaaaugagcaggggucaggauaugcagccgaccugaagagcacacagaaugccauugacaagauuacuaacaaaguaaauucuguuauugaaaagaugaauacacaguucacagcaguagguaaagaguucaaccaccuggaaaaaagaauagagaauuuaaauaaaaaaguugaugaugguuuccuggacauuuggacuuacaaugccgaacuguugguucuauuagaaaaugaaagaacuuuggacuaccacgauucaaaugugaagaacuuauaugaaaagguaagaagccaguuaaaaaacaaugccaaggaaauuggaaacggcugcuuugaauuuuaccacaaaugcgauaacacgugcauggaaagugucaaaaaugggacuuaugacuacccgaaauacucagaggaagcaaaauuaaacagagaagaaauagaugggguaaagcuggaaucaacaaggauuuaccagauuuuggcgaucuauucaacugucgccaguucauugguacugguagucucccugggggcaaucaguuucuggaugugcucuaaugggucucuacaguguagaauauguauuuaa

SEQ ID NO: 41396 - RNA, 1701 nt, Artificial Sequence; identical to SEQ ID NO: 37043
  derived and/or modified CDS sequence (wt) from hemagglutinin__InfluenzaA__AFN18999

SEQ ID NO: 41397 - RNA, 1701 nt, Artificial Sequence
  derived and/or modified CDS sequence (wt) from hemagglutinin__InfluenzaA__AFN19006
augaaggcaauacuaguaguucugcuauauacauuugcaaccgcaaaugcagacacauuauguauagguuaucaugcgaacaauucaacagacacuguagacacaguacuagaaaagaauguaacaguaacacacucuguuaaccuucuagaagacaagcauaacgggaaacuaugcaaacuaagagggguagccccauugcauuuggguaaauguaacauugcuggcuggauccugggaaauccagagugugaaucacucuccacagcaagcucaugguccuacauuguggaaacaucuaguucagacaauggaacguguuacccaggagauuucaucgauuaugaggagcuaagagagcaauugagcucagugucaucauuugaaagguuugagauauuccccaagacaaguucauggcccaaucaugacccgaacaaagguguaacggcagcauguccucaugcuggagcaaaaagcuucuacaaaaauuuaauauggcuaguuaaaaaaggaaauucauacccaaagcucagcaaauccuacauuaaugauaaagggaaagaaguccucgugcuauggggcauucaccauccaucuacuagugcugaccaacaaagucucuaucagaaugcagaugcauauguuuuuguggggacaucaagauacagcaagaaguucaagccggaaauagcaauaagacccaaagugagggaucaagaagggagaaugaacuauuacuggacacuaguagagccgggagacaaaauaacauucgaagcaacuggaaaucuagugguaccgagauaugcauucgcaauggaaagaaaugcuggaucugguauuaucauuucagauacaccaguccacgauugcaauacaacuugucagacacccaagggugcuauaaacaccagccucccauuucagaauauacauccgaucacaauuggaaaauguccaaaauauguaaaaagcacaaaauugagacuggccacaggauugaggaaugucccgucuauucaaucuagaggccuauuuggggccauugccgguuucauugaagggggguggacagggaugguagauggaugguacgguuaucaccaucaaaaugagcaggggucaggauaugcagccgacuugaagagcacacagaaugccauugacgagauuacuaacaaaguaaauucuguuauugaaaagaugaauacacaguucacagcaguagguaaagaguucaaccaccuggaaaaaagaauagagaauuuaaauaaaaaaguugaugaugguuuccuggacauuuggacuuacaaugccgaacuguugguucuauuggaaaaugaaagaacuuuggacuaccacgauucaaaugugaagaacuuauaugaaaagguaagaagccaguuaaaaaacaaugccaaggaaauuggaaacggcugcuuugaauuuuaccacaaaugcgauaacacgugcauggaaagugucaaaaaugggacuuaugacuacccaaaauacucagaggaagcaaaauuaaacagagaagaaauagaugggguaaagcuggaaucaacaaggauuuaccagauuuuggcgaucuauucaacugucgccaguucauugguacugguagucucccugggggcaaucaguuucuggaugugcucuaaugggucucuacaguguagaauauguauuuaa

SEQ ID NO: 41398 - RNA, 1701 nt, Artificial Sequence; identical to SEQ ID NO: 34681
  derived and/or modified CDS sequence (wt) from hemagglutinin__InfluenzaA__AFN19026

SEQ ID NO: 41399 - RNA, 1701 nt, Artificial Sequence; identical to SEQ ID NO: 35821
  derived and/or modified CDS sequence (wt) from hemagglutinin__InfluenzaA__AFN19036

SEQ ID NO: 41400 - RNA, 1701 nt, Artificial Sequence; identical to SEQ ID NO: 34681
  derived and/or modified CDS sequence (wt) from hemagglutinin__InfluenzaA__AFN19043

SEQ ID NO: 41401 - RNA, 1701 nt, Artificial Sequence; identical to SEQ ID NO: 34681
  derived and/or modified CDS sequence (wt) from hemagglutinin__InfluenzaA__AFN19053

SEQ ID NO: 41402 - RNA, 1701 nt, Artificial Sequence; identical to SEQ ID NO: 34681
  derived and/or modified CDS sequence (wt) from hemagglutinin__InfluenzaA__AFN19063

SEQ ID NO: 41403 - RNA, 1701 nt, Artificial Sequence
  derived and/or modified CDS sequence (wt) from hemagglutinin__InfluenzaA__AFN19070
augaaggcaauacuaguaguucugcuauauacauuugcaaccgcaaaugcagacacauuauguauagguuaucaugcgaacaauucaacagacacuguagacacaguacuagaaaagaauguaacaguaacacacucuguuaaccuucuagaagacaagcauaacgggaaacuaugcaaacuaagagggguagccccauugcauuuggguaaauguaacauugcuggcuggauccugggaaauccagagugugaaucacucuccacagcaagcucaugguccuacauuguggaaacaucuaguucagacaauggaacguguuacccaggagauuucaucgauuaugaggagcuaagagagcaauugagcucagugucaucauuugaaagguuugagauauuccccaagacaaguucauggcccaaucaugacucgaacaaagguguaacggcagcauguccucaugcuggagcaaaaagcuucuacaaaaauuuaauauggcuaguuaaaaaaggaaauucauacccaaagcucagcaaauccuacauuaaugauaaagggaaagaaguccucgugcuauggggcauucaccauccaucuacuagugcugaccaacaaagucucuaucagaaugcagaugcauauguuuuuguggggacaucaagauacagcaagaaguucaagccggaaauagcaauaagacccaaagugagggaucaagaagggagaaugaacuauuacuggacacuaguagagccgggagacaaaauaacauucgaagcaacuggaaaucuagugguaccgagauaugcauucgcaauggaaagaaaugcuggaucugguauuaucauuucagauacaccaguccacgauugcaauacaacuugucagacacccaagggugcuauaaacaccagccucccauuucagaauauacauccgaucacaauuggaaaauguccaaaauauguaaaaagcacaaaauugagacuggccacaggauugaggaaugucccgucuauucaaucuagaggccuauuuggggccauugccgguuucauugaagggggguggacagggaugguagauggaugguacgguuaucaccaucaaaaugagcaggggucaggauaugcagcugaccugaagagcacacagaaugccauugacgagauuacuaacaaaguaaauucuguuauugaaaagaugaauacacaguucacagcaguagguaaagaguucaaccaccuggaaaaaagaauagagaauuuaaauaaaaaaguugaugaugguuuccuggacauuuggacuuacaaugccgaacuguugguucuauuggaaaaugaaagaacuuuggacuaccacgauucaaaugugaagaacuuauaugaaaagguaagaagccaguuaaaaaacaaugccaaggaaauuggaaacggcugcuuugaauuuuaccacaaaugcgauaacacgugcauggaaagugucaaaaaugggacuuaugacuacccaaaauacucagaggaagcaaaauuaaacagagaagaaauagaugggguaaagcuggaaucaacaaggauuuaccagauuuuggcgaucuauucaacugucgccaguucauugguacugguagucucccugggggcaaucaguuucuggaugugcucuaaugggucucuacaguguagaauauguauuuaa

SEQ ID NO: 41404 - RNA, 1701 nt, Artificial Sequence
  derived and/or modified CDS sequence (wt) from hemagglutinin__InfluenzaA__AFN19076
augaaggcaauacuaguaguucugcuauauacauuugcaaccgcaaaugcagacacauuauguauagguuaucaugcgaacaauucaacagacacuguagacacaguacuagaaaaggauguaacaguaacacacucuguuaaccuucuagaagacaagcauaacgggaaacuaugcaaacuaagagggguagccccauugcauuuggguaaauguaacauugcuggcuggauccugggaaauccagagugugaaucacucuccacagcaagcucaugguccuacauuguggaaacaucuaguucagacaauggaacguguuacccaggagauuucaucgauuaugaggagcuaagagagcaauugagcucagugucaucauuugaaagguuugagauauuccccaagacaaguucauggcccaaucaugacucgaacaaagguguaacggcagcauguccucaugcuggagcaaaaagcuucuacaaaaauuuaauauggcuaguuaaaaaaggaaauucauacccaaagcucagcaaauccuacauuaaugauaaagggaaagaaguccucgugcuauggggcauucaccauccaucuacuagugcugaccaacaaagucucuaucagaaugcagaugcauauguuuuuguggggacaucaagauacagcaagaaguucaagccggaaauagcaauaagacccaaagugagggaucaagaagggagaaugaacuauuacuggacacuaguagagccgggagacaaaauaacauucgaagcaacuggaaaucuagugguaccgagauaugcauucgcaauggaaagaaaugcuggaucugguauuaucauuucagauacaccaguccacgauugcaauacaacuugucagacacccaagggugcuauaaacaccagccucccauuucagaauauacauccgaucacaauuggaaaauguccaaaauauguaaaaagcacaaaauugagacuggccacaggauugaggaaugucccgucuauucaaucuagaggccuauuuggggccauugccgguuucauugaagggggguggacagggaugguagauggaugguacgguuaucaccaucaaaaugagcaggggucaggauaugcagccgaccugaagagcacacagaaugccauugacgagauuacuaacaaaguaaauucuguuauugaaaagaugaauacacaguucacagcaguagguaaagaguucaaccaccuggaaaaaagaauagagaauuuaaauaaaaaaguugaugaugguuuccuggacauuuggacuuacaaugccgaacuguugguucuauuggaaaaugaaagaacuuuggacuaccacgauucaaaugugaagaacuuauaugaaaagguaagaagccaguuaaaaaacaaugccaaggaaauuggaaacggcugcuuugaauuuuaccacaaaugcgauaacacgugcauggaaagugucaaaaaugggacuuaugacuacccaaaauacucagaggaagcaaaauuaaacagagaagaaauagaugggguaaagcuggaaucaacaaggauuuaccagauuuuggcgaucuauucaacugucgccaguucauugguacugguagucucccugggggcaaucaguuucuggaugugcucuaaugggucucuacaguguagaauauguauuuaa

SEQ ID NO: 41405 - RNA, 1701 nt, Artificial Sequence; identical to SEQ ID NO: 34681
  derived and/or modified CDS sequence (wt) from hemagglutinin__InfluenzaA__AFN19082

SEQ ID NO: 41406 - RNA, 1701 nt, Artificial Sequence; identical to SEQ ID NO: 34681
  derived and/or modified CDS sequence (wt) from hemagglutinin__InfluenzaA__AFN19088

SEQ ID NO: 41407 - RNA, 1701 nt, Artificial Sequence; identical to SEQ ID NO: 34681
  derived and/or modified CDS sequence (wt) from hemagglutinin__InfluenzaA__AFN19097

SEQ ID NO: 41408 - RNA, 1701 nt, Artificial Sequence; identical to SEQ ID NO: 34681
  derived and/or modified CDS sequence (wt) from hemagglutinin__InfluenzaA__AFN19104

SEQ ID NO: 41409 - RNA, 1701 nt, Artificial Sequence; identical to SEQ ID NO: 34681
  derived and/or modified CDS sequence (wt) from hemagglutinin__InfluenzaA__AFN19113

SEQ ID NO: 41410 - RNA, 1701 nt, Artificial Sequence; identical to SEQ ID NO: 34681
  derived and/or modified CDS sequence (wt) from hemagglutinin__InfluenzaA__AFN19119

SEQ ID NO: 41411 - RNA, 1701 nt, Artificial Sequence
  derived and/or modified CDS sequence (wt) from hemagglutinin__InfluenzaA__AFN19125
augaaggcaauacuaguaguucugcuauauacauuugcaaccgcaaaugcagacacauuauguauagguuaucaugcgaacaauucaacagacacuguagacacaguacuagaaaagaauguaacaguaacacacucuguuaaccuucuagaagacaagcauaacgggaaacuaugcaaacuaagagggguagccccauugcauuuggguaaauguaacauugcuggcuggauccugggaaauccagagugugaaucacucuccacagcaagcucaugguccuacauuguggaaacaucuaguucagacaauggaacguguuacccaggagauuucaucgauuaugaggagcuaagagagcaauugagcucagugucaucauuugaaagguuugagauauuccccaagacaaguucauggcccaaucaugacucgaacaaagguguaacggcagcauguccucaugcuggagcaaaaagcuucuacaaaaauuuaauauggcuaguuaaaaaaggaaauucauacccaaagcucagcaaauccuacauuaaugauaaagggaaagaaguccucgugcuauggggcauucaccauccaucuacuagugcugaccaacaaagucucuaucagaaugcagaugcauauguuuuuguggggacaucaagauacagcaagaaguucaagccggaaauagcaauaagacccaaagugagggaucaagaagggagaaugaacuauuacuggacacuaguagagccgggagacaaaauaacauucgaagcaacuggaaaucuagugguaccgagauaugcauucgcaauggaaagaaaugcuggaucugguauuaucauuucagauacaccaguccacgauugcaauacaacuugucagacacccaagggugcuauaaacaccagccucccauuucagaauauacauccgaucacaauuggaaaauguccaaaauauguaaaaagcacaaaauugagacuggccacaggauugaggaaugucccgucuauucaaucuagaggccuauuuggggccauugccgguuucauugaagggggguggacagggaugguagauggaugguacgguuaucaccaucaaaaugagcaggggucaggauaugcagccgaccugaagagcacacagaaugccauugacgagauuacuaacaaaguaaauucuguuauugaaaagaugaauacacaguucacagcaguagguaaagaguucaaccaccuggaaaaaagaauagagaauuuaaauaaaaaaguugaugaugguuuccuggacauuuggacuuacaaugccgaacuguugguucuauuggaaaaugaaagaacuuuggacuaccacgauucaaaugugaagaacuuauaugaaaagguaagaagccaguuaaaaaacaaugccaaggaaauuggaaacggcugcuuugaauuuuaccacaaaugcgauaacacgugcauggaaagugucaaaaaugggacuuaugacuacccaaaauacucagaggaagcaaaauuaaacagagaagaaauagaugggguaaagcuggaaucaacaaggauuuaccagauuuuggcgaucuauucaacugccgccaguucauugguacugguagucucccugggggcaaucaguuucuggaugugcucuaaugggucucuacaguguagaauauguauuuaa

SEQ ID NO: 41412 - RNA, 1701 nt, Artificial Sequence; identical to SEQ ID NO: 35509
  derived and/or modified CDS sequence (wt) from hemagglutinin__InfluenzaA__AFN19134

SEQ ID NO: 41413 - RNA, 1701 nt, Artificial Sequence; identical to SEQ ID NO: 35509
  derived and/or modified CDS sequence (wt) from hemagglutinin__InfluenzaA__AFN19144

SEQ ID NO: 41414 - RNA, 1701 nt, Artificial Sequence; identical to SEQ ID NO: 40447
  derived and/or modified CDS sequence (wt) from hemagglutinin__InfluenzaA__AFN19154

SEQ ID NO: 41415 - RNA, 1701 nt, Artificial Sequence; identical to SEQ ID NO: 35509
  derived and/or modified CDS sequence (wt) from hemagglutinin__InfluenzaA__AFN19164

SEQ ID NO: 41416 - RNA, 1701 nt, Artificial Sequence; identical to SEQ ID NO: 34681
  derived and/or modified CDS sequence (wt) from hemagglutinin__InfluenzaA__AFN19174

SEQ ID NO: 41417 - RNA, 1701 nt, Artificial Sequence; identical to SEQ ID NO: 34681
  derived and/or modified CDS sequence (wt) from hemagglutinin__InfluenzaA__AFN19184

SEQ ID NO: 41418 - RNA, 1701 nt, Artificial Sequence; identical to SEQ ID NO: 34681
  derived and/or modified CDS sequence (wt) from hemagglutinin__InfluenzaA__AFN19194

SEQ ID NO: 41419 - RNA, 1701 nt, Artificial Sequence; identical to SEQ ID NO: 34681
  derived and/or modified CDS sequence (wt) from hemagglutinin__InfluenzaA__AFN19203

SEQ ID NO: 41420 - RNA, 1701 nt, Artificial Sequence; identical to SEQ ID NO: 34681
  derived and/or modified CDS sequence (wt) from hemagglutinin__InfluenzaA__AFN19213

SEQ ID NO: 41421 - RNA, 1701 nt, Artificial Sequence; identical to SEQ ID NO: 34681
  derived and/or modified CDS sequence (wt) from hemagglutinin__InfluenzaA__AFN19223

SEQ ID NO: 41422 - RNA, 1701 nt, Artificial Sequence; identical to SEQ ID NO: 34681
  derived and/or modified CDS sequence (wt) from hemagglutinin__InfluenzaA__AFN19233

SEQ ID NO: 41423 - RNA, 1701 nt, Artificial Sequence
  derived and/or modified CDS sequence (wt) from hemagglutinin__InfluenzaA__AFN19243
augaaggcaauacuaguaguucugcuauauacauuugcaaccgcaaaugcagacacauuauguauagguuaucaugcgaacaauucaacagacacuguagacacaguacuagaaaagaauguaacaguaacacacucuguuaaccuucuagaagacaagcauaacgggaaacuaugcaaacuaagagggguagccccauugcauuuggguaaauguaacauugcuggcuggauccugggaaauccagagugugaaucacucuccacagcaagcucaugguccuacauuguggaaacaucuaguucagacaauggaacguguuacccaggagauuucaucgauuaugaggagcuaagagagcaauugagcucagugucaucauuugaaagguuugagauauuccccaagacaaguucauggcccaaucaugacucgaacaaagguguaacggcagcauguccucaugcuggagcaaaaagcuucuacaaaaauuuaauauggcuaguuaaaaaaggaaauucauacccaaagcucagcaaauccuacauuaaugauaaagggaaagaaguccucgugcuauggggcauucaccauccaucuacuagugcugaccaacaaagucucuaucagaaugcagaugcauauguuuuuguggggacaucaaaauacagcaagaaguucaagccggaaauagcaauaagacccaaagugagggaucaagaagggagaaugaacuauuacuggacacuaguagagccgggagacaaaauaacauucgaagcaacuggaaaucuagugguaccgagauaugcauucgcaauggaaagaaaugcuggaucugguauuaucauuucagauacaccaguccaagauugcaauacaacuugucagacacccaagggugcuauaaacaccagccucccauuucagaauauacauccgaucacaauuggaaaauguccaaaauauguaaaaagcacaaaauugagacuggccacaggauugaggaaugucccgucuauucaaucuagaggccuauuuggggccauugccgguuucauugaagggggguggacagggaugguagauggaugguacgguuaucaccaucaaaaugagcaggggucaggauaugcagccgaccugaagagcacacagaaugccauugacgagauuacuaacaaaguaaauucuguuauugaaaagaugaauacacaguucacagcaguagguaaagaguucaaccaccuggaaaaaagaauagagaauuuaaauaaaaaaguugaugaugguuuccuggacauuuggacuuacaaugccgaacuguugguucuauuggaaaaugaaagaacuuuggacuaccacgauucaaaugugaagaacuuauaugaaaagguaagaagccaguuaaaaaacaaugccaaggaaauuggaaacggcugcuuugaauuuuaccacaaaugcgauaacacgugcauggaaagugucaaaaaugggacuuaugacuacccaaaauacucagaggaagcaaaauuaaacagagaagaaauagaugggguaaagcuggaaucaacaaggauuuaccagauuuuggcgaucuauucaacugucgccaguucauugguacugguagucucccugggggcaaucaguuucuggaugugcucuaaugggucucuacaguguagaauauguauuuaa

SEQ ID NO: 41424 - RNA, 1701 nt, Artificial Sequence
  derived and/or modified CDS sequence (wt) from hemagglutinin__InfluenzaA__AFN19250
augaaggcaauacuaguaguucugcuauauacauuugcaaccgcaaaugcagacacauuauguauagguuaucaugcgaacaauucaacagacacuguagacacaguacuagaaaagaauguaacaguaacacacucuguuaaccuucuagaagacaagcauaacgggaaacuaugcaaacuaagagggguagccccauugcauuuggguaaauguaacauugcuggcuggauccugggaaauccagaaugugaaucacucuccacagcaagcucaugguccuacauuguggaaacaucuaguucagacaauggaacguguuacccaggagauuucaucgauuaugaggagcuaagagagcaauugagcucagugucaucauuugaaagguuugagauauuccccaagacaaguucauggcccaaucaugacucgaacaaagguguaacggcagcauguccucaugcuggagcaaaaagcuucuacaaaaauuuaauauggcuaguuaaaaaaggaaauucauacccaaagcucagcaaauccuacauuaaugauaaagggaaagaaguccucgugcuauggggcauucaccauccaucuacuagugcugaccaacaaagucucuaucagaaugcagaugcauauguuuuuguggggacaucaagauacagcaagaaguucaagccggaaauagcaauaagacccaaagugagggaucaagaagggagaaugaacuauuacuggacacuaguagagccgggagacaaaauaacauucgaagcaacuggaaaucuagugguaccgagauaugcauucgcaauggaaagagaugcuggaucugguauuaucauuucagauacaccaguccacgauugcaauacaacuugucagacacccaagggugcuauaaacaccagccucccauuucagaauauacauccgaucacaauuggaaaauguccaaaauauguaaaaagcacaaaauugagacuggccacaggauugaggaauguuccgucuauucaaucuagaggccuauuuggggccauugccgguuucauugaagggggguggacagggaugguagauggaugguacgguuaucaccaucaaaaugagcaggggucaggauaugcagccgaccugaagagcacacagaaugccauugacgagauuacuaacaaaguaaauucuguuauugaaaagaugaauacacaguucacagcaguagguaaagaguucaaccaccuggaaaaaagaauagagaauuuaaauaaaaaaauugaugaugguuuccuggacauuuggacuuacaaugccgaacuguugguucuauuggaaaaugaaagaacuuuggacuaccacgauucaaaugugaagaacuuauaugaaaagguaagaagccaguuaaaaaacaaugccaaggaaauuggaaacggcugcuuugaauuuuaccacaaaugcgauaacacgugcauggaaagugucaaaaaugggacuuaugacuacccaaaauacucagaggaagcaaaauuaaacagagaagaaauagaugggguaaagcuggaaucaacaaggauuuaccagauuuuggcgaucuauucaacugucgccaguucauugguacugguagucucccugggggcaaucaguuucuggaugugcucuaaugggucucuacaguguagaauauguauuuaa

SEQ ID NO: 41425 - RNA, 1701 nt, Artificial Sequence; identical to SEQ ID NO: 35309
  derived and/or modified CDS sequence (wt) from hemagglutinin__InfluenzaA__AFN19259

SEQ ID NO: 41426 - RNA, 1701 nt, Artificial Sequence; identical to SEQ ID NO: 34681
  derived and/or modified CDS sequence (wt) from hemagglutinin__InfluenzaA__AFN19269

SEQ ID NO: 41427 - RNA, 1701 nt, Artificial Sequence; identical to SEQ ID NO: 34681
  derived and/or modified CDS sequence (wt) from hemagglutinin__InfluenzaA__AFN19279

SEQ ID NO: 41428 - RNA, 1701 nt, Artificial Sequence; identical to SEQ ID NO: 35542
  derived and/or modified CDS sequence (wt) from hemagglutinin__InfluenzaA__AFN19286

SEQ ID NO: 41429 - RNA, 1701 nt, Artificial Sequence; identical to SEQ ID NO: 34681
  derived and/or modified CDS sequence (wt) from hemagglutinin__InfluenzaA__AFN19295

SEQ ID NO: 41430 - RNA, 1701 nt, Artificial Sequence; identical to SEQ ID NO: 35464
  derived and/or modified CDS sequence (wt) from hemagglutinin__InfluenzaA__AFN19305

SEQ ID NO: 41431 - RNA, 1701 nt, Artificial Sequence; identical to SEQ ID NO: 35547
  derived and/or modified CDS sequence (wt) from hemagglutinin__InfluenzaA__AFN19315

SEQ ID NO: 41432 - RNA, 1701 nt, Artificial Sequence; identical to SEQ ID NO: 34681
  derived and/or modified CDS sequence (wt) from hemagglutinin__InfluenzaA__AFN19325

SEQ ID NO: 41433 - RNA, 1701 nt, Artificial Sequence; identical to SEQ ID NO: 34681
  derived and/or modified CDS sequence (wt) from hemagglutinin__InfluenzaA__AFN19335

SEQ ID NO: 41434 - RNA, 1701 nt, Artificial Sequence
  derived and/or modified CDS sequence (wt) from hemagglutinin__InfluenzaA__AFN19344
augaaggcaauacuaguaguucugcuauauacauuugcaaccgcaaaugcagacacauuauguauagguuaucaugcgaacaauucaacagacacuguagacacaguacuagaaaagaauguaacaguaacacacucuguuaaccuucuagaagacaagcauaacgggaaacuaugcaaacuaagagggguagccccauugcauuuggguaaauguaacauugcuggcuggauccugggaaauccagagugugaaucacucuccacagcaagcucaugguccuacauuguggaaacaucuaguucagacaauggaacguguuacccaggagauuucaucgauuaugaggagcuaagagagcaauugagcucagugucaucauuugaaagguuugagauauuccccaagacaaguucauggcccaaucaugacucgaacaaagguguaacggcagcauguccucaugcuggagcaaaaagcuucuacaaaaauuuaauauggcuaguuaaaaaaggaaauucauacccaaagcucagcaaauccuacauuaaugauaaagggaaagaaguccucgugcuauggggcauucaccauccaucuacuagugcugaccaacaaagucucuaucagaaugcagaugcauauguuuuuguggggacaucaagauacagcaagaaguucaagccggaaauagcaauaagacccaaagugagggaucaagaagggagaaugaacuauuacuggacacuaguagagccgggagacaaaauaacauucgaagcaacuggaaaucuagugguaccgagauaugcauucgcaauggaaagaaaugcuggaucugguauuaucauuucagauacaccaguccacgauugcaauacaacuugucagacacccaagggugcuauaaacaccagccucccauuucagaauauacauccgaucacaauuggaaaauguccaaaauauguaaaaagcacaaaauugagacuggccacaggauugaggaaugucccgucuauucaaucuagaggccuauuuggggccauugccgguuucauugaagggggguggacagggaugguagauggaugguacgguuaucaccaucaaaaugagcaggggucaggauaugcagccgaccugaagagcacacagaaugccauugacgagauuacuaacaaaguaaauucuguuauugaaaagaugaauacacaguucacagcaguagguaaagaguucaaccaccuggaaaaaagaauagagaauuuaaauaaaaaaguugaugaugguuuccuggacauuuggacuuacaaugccgaacuguugguucuguuggaaaaugaaagaacuuuggacuaccacgauucaaaugugaagaacuuauaugaaaagguaagaagccaguuaaaaaacaaugccaaggaaauuggaaacggcugcuuugaauuuuaccacaaaugcgauaacacgugcauggaaagugucaaaaaugggacuuaugacuacccaaaauacucagaggaagcaaaauuaaacagagaagaaauagaugggguaaagcuggaaucaacaaggauuuaccagauuuuggcgaucuauucaacugucgccaguucauugguacugguagucucccugggggcaaucaguuucuggaugugcucuaaugggucucuacaguguagaauauguauuuaa

SEQ ID NO: 41435 - RNA, 1701 nt, Artificial Sequence
  derived and/or modified CDS sequence (wt) from hemagglutinin__InfluenzaA__AFN19351
augaagacuaucauugcuuugagcuacauucuaugucugguuuucgcucaaaaacuuccuggaaaugacaacagcauggcaacgcugugccuugggcaccaugcaguaccaaacggaacgauagugaaaacaaucacgaaugaccaaauugaaguuacuaaugcuacugagcugguucagaauuccucaauaggugaaauaugcgacaguccucaucagauccuugauggagaaaacugcacacuaauagaugcucuauugggagacccucagugugauggcuuccaaaauaagaaaugggaccuuuuuguugaacgaagcaaagccuacagcaacuguuacccuuaugaugugccggauuaugccucccuuaggucacuaguugccucauccggcacacuggaguuuaacaaugaaagcuucaauuggacuggagucacucaaaacggaacaaguucugcuugcauaaggagaucuaauaauaguuucuuuaguagauugaauugguugacccacuuaaacuucaaauacccagcauugaacgugacuaugccaaacaaugaacaauuugacaaauuguacauuugggggguucaccacccggguacggacaaggaccaaaucuuccuguaugcucaaucaucaggaagaaucacaguaucuaccaaaagaagccaacaagcuguaaucccgaauaucggaucuagacccagaauaaggaauaucccuagcagaauaagcaucuauuggacaauaguaaaaccgggagacauacuuuugauuaacagcacagggaaucuaauugcuccuagggguuacuucaaaauacgaagugggaaaagcucaauaaugagaucagaugcacccauuggcaaaugcaauucugaaugcaucacuccaaauggaagcauucccaaugacaaaccauuccaaaauguaaacaggaucacauacggggccugucccagauauguuaagcaaagcacucugaaauuggcaacaggaaugcgaaauguaccagagaaacaaacuagaggcauauuuggcgcaauagcggguuucauagaaaaugguugggagggaaugguggaugguugguacgguuucaggcaucaaaauucugagggaagaggacaagcagcagaucucaaaagcacucaagcagcaaucgaucaaaucaaugggaagcugaaucgauugaucgggaaaaccaacgagaaauuccaucagauugaaaaagaauucucagaagucgaagggagaauucaggaccuugagaaauauguugaggacacuaaaauagaucucuggucauacaacgcggagcuucuuguugcccuggagaaccaacauacaauugaucuaacugacucagaaaugaacaaacuguuugaaaaaacaaagaagcaacugagggaaaaugcugaggauaugggcaaugguuguuucaaaauauaccacaaaugugacaaugccugcauaggaucaaucagaaauggaacuuaugaccacgauguauacagagaugaagcauuaaacaaccgguuccagaucaagggaguugagcugaagucaggguacaaagauuggauccuauggauuuccuuugccauaucauguuuuuugcuuuguguugcuuuguugggguucaucaugugggccugccaaaagggcaacguuaggugcaacauuugcauuuga

SEQ ID NO: 41436 - RNA, 1701 nt, Artificial Sequence
  derived and/or modified CDS sequence (wt) from hemagglutinin__InfluenzaA__AFN19355
augaagacuaucauugcuuugagcuacauucuaugucugguuuucgcucaaaaacuuccuggaaaugacaacagcacggcaacgcugugccuugggcaccaugcaguaccaaacggaacgauagugaaaacaaucacgaaugaccaaauugaaguuacuaaugcuacugagcugguucagaguuccucaacaggugaaauaugcgacaguccucaucagauccuugauggagaaaacugcacacuaauagaugcucuauugggagacccucagugugauggcuuccaaaauaagaagugggaccuuuuuguugaacgaagcaaagccuacagcaacuguuacccuuaugaugugccggauuaugccucccuuaggucacuaguugccucauccggcacacuggaguuuaacaaugaaagcuucaauuggacuggagucacucaaaacggaacaagcucugcuugcauaaggagaucuaauaguaguuucuuuaguagauugaauugguugacccacuuaaacuucaaauacccagcauugaacgugacuaugccaaacaaugaacaauuugacaaauuguacauuugggggguucaccacccggguacggacaaggaccaaaucuuccuguaugcucaaucaucaggaagaaucacaguaucuaccaaaagaagccaacaagcuguaaucccgaauaucggaucuagacccagaauaaggaauaucccuagcagaauaagcaucuauuggacaauaguaaaaccgggagacauacuuuugauuaacagcacagggaaucuaauugcuccuagggguuacuucaaaauacgaagugggaaaagcucaauaaugagaucagaugcacccauuggcaaaugcaauucugaaugcaucacuccaaauggaagcauucccaaugacaaaccauuccaaaauguaaacaggaucacauacggggccugucccagauauguuaagcaaagcacucugaaauuggcaacaggaaugcgaaauguaccagagaaacaaacuagaggcauauuuggcgcaauagcggguuucauagaaaaugguugggagggaaugguggaugguugguacgguuucaggcaucaaaauucugagggaagaggacaagcagcagaucucaaaagcacucaagcagcaaucgaucaaaucaaugggaagcugaaucgauugaucgggaaaaccaacgagaaauuccaucagauugaaaaagaauucucagaagucgaagggagaauucaggaccuugagaaauauguugaggacacuaaaauagaucucuggucauacaacgcggagcuucuuguugcccuggagaaccaacauacaauugaucuaacugacucagaaaugaacaaacuguuugaaaaaacaaagaagcaacugagggaaaaugcugaggauaugggcaaugguuguuucaaaauauaccacaaaugugacaaugccugcauaggaucaaucagaaauggaacuuauaaccacgauguauacagagaugaagcauuaaacaaccgguuccagaucaagggaguugagcugaagucaggguacaaagauuggauccuauggauuuccuuugccauaucauguuuuuugcuuuguguugcuuuguugggguucaucaugugggccugccaaaagggcaacauuaggugcaacauuugcauuuga

SEQ ID NO: 41437 - RNA, 1701 nt, Artificial Sequence
  derived and/or modified CDS sequence (wt) from hemagglutinin__InfluenzaA__AFN19357
augaagacuaucauugcuuugagcuacauucuaugucugguuuucgcucaaaaacuuccuggaaaugacaacagcacggcaacgcugugccuugggcaccaugcaguaccaaacggaacgauagugaaaacaaucacgaaugaccaaauugaaguuacuaaugcuacugagcugguucagaguuccucaacaggugaaauaugcgacaguccucaucagauccuugauggagaaaacugcacacuaauagaugcucuauugggagacccucagugugauggcuuccaaaauaagaagugggaccuuuuuguugaacgaagcaaagccuacagcaacuguuacccuuaugaugugccggauuaugccucccuuaggucacuaguugccucauccggcacacuggaguuuaacaaugaaagcuucaauuggacuggagucacucaaaacggaacaagcucugcuugcauaaggagaucuaauaguaguuucuuuaguagauugaauugguugacccacuuaaacuucaaauacccagcauugaacgugacuaugccaaacaaugaacaauuugacaaauuguacauuugggggguucaccacccggguacggacaaggaccaaaucuuccuguaugcucaaucaucaggaagaaucacaguaucuaccaaaagaagccaacaagcuguaaucccgaauaucggaucuagacccagaauaaggaauaucccuagcagaauaagcaucuauuggacaauaguaaaaccgggagacauacuuuugauuaacagcacagggaaucuaauugcuccuagggguuacuucaaaauacgaagugggaaaagcucaauaaugagaucagaugcacccauuggcaaaugcaauucugaaugcaucacuccaaauggaagcauucccaaugacaaaccauuccaaaauguaaacaggaucacauacggggccugucccagauauguuaagcaaagcacucugaaauuggcaacaggaaugcgaaauguaccagagaaacaaacuagaggcauauuuggcgcaauagcggguuucauagaaaaugguugggagggaaugguggaugguugguacgguuucaggcaucaaaauucugagggaagaggacaagcagcagaucucaaaagcacccaagcagcaaucgaucaaaucaaugggaagcugaaucgauugaucgggaaaaccaacgagaaauuccaucagauugaaaaagaauucucagaagucgaagggagaauucaggaccuugagaaauauguugaggacacuaaaauagaucucuggucauacaacgcggagcuucuuguugcccuggagaaccaacauacaauugaucuaacugacucagaaaugaacaaacuguuugaaaaaacaaagaagcagcugagggaaaaugcugaggauaugggcaaugguuguuucaaaauauaccacaaaugugacaaugccugcauaggaucaaucagaaauggaacuuauaaccacgauguauacagagaugaagcauuaaacaaccgguuccagaucaagggaguugagcugaagucaggguacaaagauuggauccuauggauuuccuuugccauaucauguuuuuugcuuuguguugcuuuguugggguucaucaugugggccugccaaaagggcaacauuaggugcaacauuugcauuuga

SEQ ID NO: 41438 - RNA, 1701 nt, Artificial Sequence
  derived and/or modified CDS sequence (wt) from hemagglutinin__InfluenzaA__AFN19361
augaagacuaucauugcuuugagcuacauucuaugucugguuuucgcucaaaaacuuccuggaaaugacaacagcacggcaacgcugugccuugggcaccaugcaguaccaaacggaacgauagugaaaacaaucacaaaugaccaaauugaaguuacuaaugcuacugagcugguucagaguuccucaacaggugaaauaugcgacaguccucaucagauccuugauggagaaaacugcacacuaauagaugcucuauugggagacccucagugugauggcuuccaaaauaagaagugggaccuuuuuguugaacgaagcaaagccuacagcaacuguuacccuuaugaugugccggauuaugccucccuuaggucacuaguugccucauccggcacacuggaguuuaacaaugaaagcuucaauuggacuggagucacucaaaacggaacaagcucugcuugcauaaggagaucuaauaguaguuucuuuaguagauugaauugguugacccacuuaaacuucaaauacccagcauugaacgugacuaugccaaacaaugaacaauuugacaaauuguacauuugggggguucaccacccggguacggacaaggaccaaaucuuccuguaugcucaaucaucaggaagaaucacaguaucuaccaaaagaagccaacaagcuguaaucccgaauaucggaucuagacccagaauaaggaauaucccuagcagaauaagcaucuauuggacaauaguaaaaccgggagacauacuuuugauuaacagcacagggaaucuaauugcuccuagggguuacuucaaaauacgaagugggaaaagcucaauaaugagaucagaugcacccauuggcaaaugcaauucugaaugcaucacuccaaauggaagcauucccaaugacaaaccauuccaaaauguaaacaggaucacauacggggccugucccagauauguuaagcaaagcacucugaaauuggcaacaggaaugcgaaauguaccagagaaacaaacuagaggcauauuuggcgcaauagcggguuucauagaaaaugguugggagggaaugguggaugguugguacgguuucaggcaucaaaauucugagggaagaggacaagcagcagaucucaaaagcacucaagcagcaaucgaucaaaucaaugggaagcugaaucgauugaucgggaaaaccaacgagaaauuccaucagauugaaaaagaauucucagaagucgaagggagaauucaggaccuugagaaauauguugaggacacuaaaauagaucucuggucauacaacgcggagcuucuuguugcccuggagaaccagcauacaauugaucuaacugacucagaaaugaacaaacuguuugaaaaaacaaagaagcaacugagggaaaaugcugaggauaugggcaaugguuguuucaaaauauaccacaaaugugacaaugccugcauaggaucaaucagaaauggaacuuauaaccacgauguauacagagaugaagcauuaaacaaccgguuccagaucaagggaguugagcugaagucaggguacaaagauuggauccuauggauuuccuuugccauaucauguuuuuugcuuuguguugcuuuguugggguucaucaugugggccugccaaaagggcaacauuaggugcaacauuugcauuuga

SEQ ID NO: 41439 - RNA, 1701 nt, Artificial Sequence
  derived and/or modified CDS sequence (wt) from hemagglutinin__InfluenzaA__AFN19363
augaagacuaucauugcuuugagcuacauucuaugucugguuuucgcucaaaaacuuccuggaaaugacaacagcacggcaacgcugugccuugggcaccaugcaguaccaaacggaacgauagugaagacaaucacgaaugaccaaauugaaguuacuaaugccacugagcugguucagauuuccucaacaggugaaauaugcgacaguccucaucagauccuugauggagaaaacugcacacuaauagaugcucuauugggagacccucagugugauggcuuccaaaauaagaagugggaccuuuuuguugaacgaagcaaagccuacagcaacuguuacccuuaugaugugccggauuaugccucccuuaggucacuaguugccucauccggcacacuggaguuuaacaaugaaagcuucaauuggacuggagucacucaaaacggaacaagcucugcuugcauaaggagaucuaauaguaguuucuuuaguagauugaauugguugacccacuuaaacuucaaauacccagcauugaacgugacuaugccaaacaaugaacaauuugacaaauuguacauuugggggguucaccacccggguacggacaaggaccaaaucuuccuguaugcucaaucaucaggaagaaucacaguaucuaccaaaagaagccaacaagcuguaaucccgaauaucggaucuagacccagaauaaggaauaucccuagcagaauaagcaucuauuggacaauaguaaaaccgggagacauacuuuugauuaacagcacagggaaucuaauugcuccuagggguuacuucaaaauacgaagugggaaaagcucaauaaugagaucagaugcacccauuggcaaaugcaauucugaaugcaucacuccaaauggaagcauucccaaugacaaaccauuccaaaauguaaacaggaucacauacggggccugucccagauauguuaagcaaagcacucugaaauuggcaacaggaaugcgaaauguaccagagaaacaaacuagaggcauauuuggcgcaauagcggguuucauagaaaaugguugggagggaaugguggaugguugguacgguuucaggcaucaaaauucugagggaagaggacaagcagcagaucucaaaagcacucaagcagcaaucgaucaaaucaaugggaagcugaaucgauugaucgggaaaaccaacgagaaauuccaucagauugaaaaagaauucucagaagucgaagggagaauucaggaccuugagaaauauguugaggacacuaaaauagaucucuggucauacaacgcggagcuucuuguugcccuggagaaccaacauacaauugaucuaacugacucagaaaugaacaaacuguuugaaaaaacaaagaagcaacugagggaaaaugcugaggauaugggcaaugguuguuucaaaauauaccacaaaugugacaaugccugcauaggaucaaucagaaauggaacuuauaaccacgauguauacagagaugaagcauuaaacaaccgguuccagaucaagggaguugagcugaagucaggguacaaagauuggauccuauggauuuccuuugccauaucauguuuuuugcuuuguguugcuuuguugggguucaucaugugggccugccaaaagggcaacauuaggugcaacauuugcauuuga

SEQ ID NO: 41440 - RNA, 1701 nt, Artificial Sequence
  derived and/or modified CDS sequence (wt) from hemagglutinin__InfluenzaA__AFN19365
augaagaccaucauugcuuugagcuacauucuaugucugguuuucgcucaaaaacuuccuggaaaugacaacagcacggcaacgcugugccuugggcaccaugcagugccaaacggaacgauagugaaaacaaucacgaaugaccaaauugaaguuacuaaugcuacugagcugguucagaguuccucaacaggugaaauaugcaacaguccucaucagauccuugauggagaaaacugcacacuaauagaugcucuauugggagacccucagugugauggcuuccaaaacaagaaaugggaccuuuuuguugaacgaagcaaagcccacagcaacuguuacccuuaugaugugccggauuaugccucccuuaggucacuaguugccucauccggcacacuggaguuuaacaaugaaagcuucaauuggacuggagucacucaaaacggaacaagcucugcuugcauaaggagaucuaauaauaguuucuuuaguagauugaauugguugacccacuuaaacuucaaauacccagcauugaacgugacuaugccaaacaaugaacaauuugacaaauuguacauuugggggguucaccacccggguacggacaaggaccaaaucuuccuguaugcucaagcaucaggaagaaucacaguaucuaccaaaagaagccaacaagcuguaauuccgaauaucggaucuagacccagaguaaggaauaucccuagcagaguaagcaucuauuggacaauaguaaaaccgggagacauacuuuugauuaacagcacagggaaucuaauugcuccuagggguuacuucaaaauacgaagugggaaaagcucaauaaugagaucagaugcacccauuggcaaaugcaauucugcaugcaucacuccaaauggaagcauucccaaugacaaaccauuccaaaauguaaacaggaucacauacggggccugucccagauauguuaagcaaaacacucugaaauuggcaacaggaaugagaaauguaccagagaaacaaacuagaggcauauuuggcgcaauagcggguuucauagaaaaugguugggagggaaugguagaugguugguacgguuucaggcaucaaaauucugagggaaggggacaagcagcagaucucaaaagcacucaagcagcaaucgaucaaaucaaugggaagcugaauagauugaucgggaaaaccaacgagaaauuccaucagauugaaaaagaauucucagaagucgaagggagaauucaggaccuugagaaauauguugaggacacuaaaauagaucucuggucauacaacgcggagcuucuuguugcccuggagaaccaacacacaauugaucuaacugacucagaaaugaacaaacuguuugaaaaaacaaagaagcaacugagggaaaaugcugaggauaugggcaaugguuguuucaaaauauaccacaaaugugacaaugccugcauaggaucaaucagaaauggaacuuaugaccacgauguguacagagaugaagcauuaaacaaccgauuccagaucaagggaguugagcugaagucaggguacaaagauuggauccuauggauuuccuuugccauaucauguuuuuugcuuuguguugcuuuguugggguucaucaugugggccugccaaaaaggcaacauuaggugcaacauuugcauuuga

SEQ ID NO: 41441 - RNA, 1701 nt, Artificial Sequence
  derived and/or modified CDS sequence (wt) from hemagglutinin__InfluenzaA__AFN19367
augaagacuaucauugcuuugagcuacauucuaugucugguuuucgcucaaaaacuuccugaaaaugacaacagcacggcaacgcugugccuugggcaccaugcaguaccaaacggaacgauagugaaaacaaucacgaaugaccaaauugaaguuacuaaugcuacugagcugguucagaguuccucaacaggugaaauaugcgacaguccucaucagauccuugauggaguaaacugcacacuaauagaugcucuauugggagacccucagugugauggcuuccaaaauaagaagugggaccuuuuuguugaacgaagcaaagccuacagcaacuguuacccuuaugaugugccggauuaugccucccuuaggucacuaguugccucauccggcacacuggaguuuaacaaugaaagcuucaauuggacuggagucacucaaaacggaacaagcucugcuugcauaaggagaucuaauaguaguuucuuuaguagauugaauugguugacccacuuaaacuucaaauacccagcauugaacgugacuaugccaaacaaugaacaauuugacaaauuguacauuugggggguucaccacccggguacggacaaggaccaaaucuuccuguaugcucaaucaucaggaagaaucacaguaucuaccaaaagaagccaacaagcuguaaucccgaauaucggaucuagacccagaauaaggaauaucccuagcagaauaagcaucuauuggacaauaguaaaaccgggagacauacuuuugauuaacagcacagggaaucuaauugcuccuagggguuacuucaaaauacaaagugggaaaagcucaauaaugagaucagaugcacccauuggcaaaugcaauucugaaugcaucacuccaaauggaagcauucccaaugacaaaccauuccaaaauguaaacaggaucacauacggggccugucccagauauguuaagcaaagcacucugaaauuggcaacaggaaugcgaaauguaccagagaaacaaacuagaggcauauuuggcgcaauagcggguuucauagaaaaugguugggagggaaugguggaugguugguacgguuucaggcaucaaaauucugagggaagaggacaagcagcagaucucaaaagcacucaagcagcaaucgaucaaaucaaugggaagcugaaucgauugaucgggaaaaccaacgagaaauuccaucagauugaaaaagaauucucagaagucgaagggagaauucaggaccuugagaaauauguugaggacacuaaaauagaucucuggucauacaacgcggagcuucuuguugcccuggagaaccaacauacaauugaucuaacugacucagaaaugaacaaacuguuugaaaaaacaaagaagcaacugagggaaaaugcugaggauaugggcaaugguuguuucaaaauauaccacaaaugugacaaugccugcauaggaucaaucagaaauggaacuuauaaccacgauguauacagagaugaagcauuaaacaaccgguuccagaucaagggaguugagcugaagucaggguacaaagauuggauccuauggauuuccuuugccauaucauguuuuuugcuuuguguugcuuuguugggguucaucaugugggccugccaaaagggcaacauuaggugcaacauuugcauuuga

SEQ ID NO: 41442 - RNA, 1701 nt, Artificial Sequence
  derived and/or modified CDS sequence (wt) from hemagglutinin__InfluenzaA__AFN19369
augaagacuaucauugcuuugagcuacauucuaugucugguuuucgcucaaaaacuuccugaaaaugacaacagcacggcaacgcugugccuugggcaccaugcaguaccaaacggaacgauagugaaaacaaucacgaaugaccaaauugaaguuacuaaugcuacugagcugguucagaguuccucaacaggugaaauaugcgacaguccucaucagauccuugauggaguaaacugcacacuaauagaugcucuauugggagacccucagugugauggcuuccaaaauaagaagugggaccuuuuuguugaacgaagcaaagccuacagcaacuguuacccuuaugaugugccggauuaugccucccuuaggucacuaguugccucauccggcacacuggaguuuaacaaugaaagcuucaauuggacuggagucacucaaaacggaacaagcucugcuugcauaaggagaucuaauaguaguuucuuuaguagauugaauugguugacccacuuaaacuucaaauacccagcauugaacgugacuaugccaaacaaugaacaauuugacaaauuguacauuugggggguucaccacccggguacggacaaggaccaaaucuuccuguaugcucaaucaucaggaagaaucacaguaucuaccaaaagaagccaacaagcuguaaucccgaauaucggaucuagacccagaauaaggaauaucccuagcagaauaagcaucuauuggacaauaguaaaaccgggagacauacuuuugauuaacagcacagggaaucuaauugcuccuagggguuacuucaaaauacgaagugggaaaagcucaauaaugagaucagaugcacccauuggcaaaugcaauucugaaugcaucacuccaaauggaagcauucccaaugacaaaccauuccaaaauguaaacaggaucacauacggggccugucccagauauguuaagcaaagcacucugaaauuggcaacaggaaugcgaaauguaccagagaaacaaacuagaggcauauuuggcgcaauagcggguuucauagaaaaugguugggagggaaugguggaugguugguacgguuucaggcaucaaaauucugagggaagaggacaagcagcagaucucaaaagcacucaagcagcaaucgaucaaaucaaugggaagcugaaucgauugaucgggaaaaccaacgagaaauuccaucagauugaaaaagaauucucagaagucgaagggagaauucaggaccuugagaaauauguugaggacacuaaaauagaucucuggucauacaacgcggagcuucuuguugcccuggagaaccaacauacaauugaucuaacugacucagaaaugaacaaacuguuugaaaaaacaaagaagcaacugagggaaaaugcugaggauaugggcaaugguuguuucaaaauauaccacaaaugugacaaugccugcauaggaucaaucagaaauggaacuuauaaccacgauguauacagagaugaagcauuaaacaaccgguuccagaucaagggaguugagcugaagucaggguacaaagauuggauccuauggauuuccuuugccauaucauguuuuuugcuuuguguugcuuuguugggguucaucaugugggccugccaaaagggcaacauuaggugcaacauuugcauuuga

SEQ ID NO: 41443 - RNA, 1701 nt, Artificial Sequence
  derived and/or modified CDS sequence (wt) from hemagglutinin__InfluenzaA__AFN19373
augaagacuaucauugcuuugagcuacauucuaugucugguuuucgcucaaaaacuuccuggaaaugacaacagcacggcaacgcugugccuugggcaccaugcaguaccaaacggaacgauagugaaaacaaucacgaaugaccaaauugaaguuacuaaugcuacugagcugguucagaauuccucaauaggugaaauaugcgacaguccucaucagauccuugauggagaaaacugcacacuaauagaugcucuauugggagacccucagugugauggcuuccaaaauaagaaaugggaccuuuuuguugaacgaagcaaagccuacagcaacuguuacccuuaugaugugccggauuaugccucccuuaggucacuaguugccucauccggcacacuggaguuuaacaaugaaagcuucaauuggacuggagucacucaaaacggaacaaguucugcuugcauaaggagaucuaauaauaguuucuuuaguagauuaaauugguugacccacuuaaacuucaaauacccagcauugaacgugacuaugccaaacaaugaacaauuugacaaauuguacauuugggggguucaccacccggguacggacaaggaccaaaucuuccuguaugcucaaucaucaggaagaaucacaguaucuaccaaaagaagccaacaagcuguaaucccgaauaucggaucuagacccagaauaaggaauaucccuagcagaauaagcaucuauuggacaauaguaaaaccgggagacauacuuuugauuaacagcacagggaaucuaauugcuccuagggguuacuucaaaauacgaagugggaaaagcucaauaaugagaucagaugcacccauuggcaaaugcaauucugaaugcaucacuccaaauggaagcauucccaaugacaaaccauuccaaaauguaaacaggaucacauacggggccugucccagauauguuaagcaaagcacucugaaauuggcaacaggaaugcgaaauguaccagagaaacaaacuagaggcauauuuggcgcaauagcggguuucauagaaaaugguugggagggaaugguggaugguugguacgguuucaggcaucaaaauucugagggaagaggacaagcagcagaucucaaaagcacucaagcagcaaucgaucaaaucaaugggaagcugaaucgauugaucgggaaaaccaacgagaaauuccaucagauugaaaaagaauucucagaagucgaagggagaauucaggaccuugagaaauauguugaggacacuaaaauagaucucuggucauacaacgcggagcuucuuguugcccuggagaaccaacauacaauugaucuaacugacucagaaaugaacaaacuguuugaaaaaacaaagaagcaacugagggaaaaugcugaggauaugggcaaugguuguuucaaaauauaccacaaaugugacaaugccugcauaggaucaaucagaaauggaacuuaugaccacgauguauacagagaugaagcauuaaacaaccgguuccagaucaagggaguugagcugaagucaggguacaaagauuggauccuauggauuuccuuugccauaucauguuuuuugcuuuguguugcuuuguugggguucaucaugugggccugccaaaagggcaacauuaggugcaacauuugcauuuga

SEQ ID NO: 41444 - RNA, 1701 nt, Artificial Sequence
  derived and/or modified CDS sequence (wt) from hemagglutinin__InfluenzaA__AFN19375
augaagacuaucauugcuuugagcuacauucuaugucugguuuucgcucaaaaacuuccuggaaaugacaacagcacggcaacgcugugccuugggcaccaugcaguaccaaacggaacgauagugaaaacaaucacgaaugaccaaauugaaguuacuaaugcuacugagcugguucagaguuccucaacaggugaaauaugcgacaguccucaucagauccuugauggagaaaacugcacacuaauagaugcucuauugggagacccucagugugauggcuuccaaaauaagaagugggaccuuuuuguugaacgaagcaaagccuacagcaacuguuacccuuaugaugugccggauuaugccucccuuaggucacuaguugccucauccggcacacuggaguuuaacaaugaaagcuucaauuggacuggagucacucaaaacggaacaagcucugcuugcauaaggagaucuaauaguaguuucuuuaguagauugaauugguugacccacuuaaacuucaaauacccagcauugaacgugacuaugccaaacaaugaacaauuugacaaauuguacauuugggggguucaccacccggguacggacaaggaccaaaucuuccuguaugcucaaucaucaggaagaaucacaguaucuaccaaaagaagccaacaagcuguaaucccgaauaucggaucuagacccagaauaaggaauaucccuagcagaauaagcaucuauuggacaauaguaaaaccgggagacauacuuuugauuaacagcacagggaaucuaauugcuccuagggguuacuucaaaauacgaagugggaaaagcucaauaaugagaucagaugcacccauuggcaaaugcaauucugaaugcaucacuccaaauggaagcauucccaaugacaaaccauuccaaaauguaaacaggaucacauacggggccugucccagauauguuaagcaaagcacucugaaauuggcaacaggaaugcgaaauguaccagagaaacaaacuagaggcauauuuggcgcaauagcggguuucauagaaaaugguugggagggaaugguggaugguugguacgguuucaggcaucaaaauucugagggaagaggacaagcagcagaucucaaaagcacucaagcagcaaucgaucaaaucaaugggaagcugaaucgauugaucgggaaaaccaaugagaaauuccaucagauugaaaaagaauucucagaagucgaagggagaauucaggaccuugagaaauauguugaggacacuaaaauagaucucuggucauacaacgcggagcuucuuguugcccuggagaaccaacauacaauugaucuaacugacucagaaaugaacaaacuguuugaaaaaacaaagaagcaacugagggaaaaugcugaggauaugggcaaugguuguuucaaaauauaccacaaaugugacaaugccugcauaggaucaaucagaaauggaacuuauaaccacgauguauacagagaugaagcauuaaacaaccgguuccagaucaagggaguugagcugaagucaggguacaaagauuggauccuauggauuuccuuugccauaucauguuuuuugcuuuguguugcuuuguugggguucaucaugugggccugccaaaagggcaacauuaggugcaacauuugcauuuga

SEQ ID NO: 41445 - RNA, 1701 nt, Artificial Sequence
  derived and/or modified CDS sequence (wt) from hemagglutinin__InfluenzaA__AFN19377
augaagacuaucauugcuuugagcuacauucuaugucugguuuucgcucaaaaacuuccugaaaaugacaacagcacggcaacgcugugccuugggcaccaugcaguaccaaacggaacgauagugaaaacaaucacgaaugaccaaauugaaguuacuaaugcuacugagcugguucagaguuccucaacaggugaaauaugcgacaguccucaucagauccuugauggaguaaacugcacacuaauagaugcucuauugggagacccucagugugauggcuuccaaaauaagaagugggaccuuuuuguugaacgaagcaaagccuacagcaacuguuacccuuaugaugugccggauuaugccucccuuaggucacuaguugccucauccggcacacuggaguuuaacaaugaaagcuucaauuggacuggagucacucaaaacggaacaagcucugcuugcauaaggagaucuaauaguaguuucuuuaguagauugaauugguugacccacuuaaacuucaaauacccagcauugaacgugacuaugccaaacaaugaacaauuugacaaauuguacauuugggggguucaccacccggguacggacaaggaccaaaucuuccuguaugcucaaucaucaggaagaaucacaguaucuaccaaaagaagccaacaagcuguaaucccgaauaucggaucuagacccagaauaaggaauaucccuagcagaauaagcaucuauuggacaauaguaaaaccgggagacauacuuuugauuaacagcacagggaaucuaauugcuccuagggguuacuucaaaauacgaagugggaaaagcucaauaaugagaucagaugcacccauuggcaaaugcaauucugaaugcaucacuccaaauggaagcauucccaaugacaaaccauuccaaaauguaaacaggaucacauacggggccugucccagauauguuaagcaaagcacucugaaauuggcaacaggaaugcgaaauguaccagagaaacaaacuagaggcauauuuggcgcaauagcggguuucauagaaaaugguugggagggaaugguggaugguugguacgguuucaggcaucaaaauucugagggaagaggacaagcagcagaucucaaaagcacucaagcagcaaucgaucaaaucaaugggaagcugaaucgauugaucgggaaaaccaacgagaaauuccaucagauugaaaaagaauucucagaagucgaagggagaauucaggaccuugagaaauaugucgaggacacuaaaauagaucucuggucauacaacgcggagcuucuuguugcccuggagaaccaacauacaauugaucuaacugacucagaaaugaacaaacuguuugaaaaaacaaagaagcaacugagggaaaaugcugaggauaugggcaaugguuguuucaaaauauaccacaaaugugacaaugccugcauaggaucaaucagaaauggaacuuauaaccacgauguauacagagaugaagcauuaaacaaccgguuccagaucaagggaguugagcugaagucaggguacaaagauuggauccuauggauuuccuuugccauaucauguuuuuugcuuuguguugcuuuguugggguucaucaugugggccugccaaaauggcaacauuaggugcaacauuugcauuuga

SEQ ID NO: 41446 - RNA, 1701 nt, Artificial Sequence
  derived and/or modified CDS sequence (wt) from hemagglutinin__InfluenzaA__AFN19379
augaagacuaucauugcuuugagcuacauucuaugucugguuuucgcucaaaaacuuccuggaaaugacaacagcacggcaacgcugugccuugggcaccaugcaguaccaaacggaacgauagugaaaacaaucacgaaugaccaaauugaaguuacuaaugcuacugagcugguucagaguuccucaacaggugaaauaugcgacaguccucaucagauccuugauggagaaaacugcacacuaauagaugcucuauugggagacccucagugugauggcuuccaaaauaagaagugggaccuuuuuguugaacgaagcaaagccuacagcaacuguuacccuuaugaugugccggauuaugccucccuuaggucacuaguugccucauccggcacacuggaguuuaacaaugaaagcuucaauuggacuggagucacucaaaacggaacaagcucugcuugcauaaggagaucuaauaguaguuucuuuaguagauugaauugguugacccacuuaaacuucaaauacccagcauugaacgugacuaugccaaacaaugaacaauuugacaaauuguacauuugggggguucaccacccggguacggacaaggaccaaaucuuccuguaugcucaaucaucaggaagaaucacaguaucuaccaaaagaagccaacaagcuguaaucccgaauaucggaucuagacccagaauaaggaauaucccuagcagaauaagcaucuauuggacaauaguaaaaccgggagacauacuuuugauuaacagcacagggaaucuaauugcuccuagggguuacuucaaaauacgaagugggaaaagcucaauaaugagaucagaugcacccauuggcaaaugcaauucugaaugcaucacuccaaauggaagcauucccaaugacaaaccauuccaaaauguaaacaggaucacauacggggccugucccagauauguuaagcaaagcacucugaaauuggcaacaggaaugcgaaauguaccagagaaacaaacuagaggcauauuuggcgcaauagcggguuucauagaaaaugguugggagggaaugguggaugguugguacgguuucaggcaucaaaauucugagggaagaggacaagcagcagaucucaaaagcacucaagcagcaaucgaucaaaucaauggaaagcugaaucgauugaucgggaaaaccaacgagaaauuccaucagauugaaaaagaauucucagaagucgaagggagaauucaggaccuugagaaauauguugaggacacuaaaauagaucucuggucauacaacgcggagcuucuuguugcccuggagaaccaacauacaauugaucuaacugacucagaaaugaacaaacuguuugaaaaaacaaagaagcaacugagggaaaaugcugaggauaugggcaaugguuguuucaaaauauaccacaaaugugacaaugccugcauaggaucaaucagaaauggaacuuauaaccacgauguauacagagaugaagcauuaaacaaccgguuccagaucaagggaguugagcugaagucaggguacaaagauuggauccuauggauuuccuuugccauaucauguuuuuugcuuuguguugcuuuguugggguucaucaugugggccugccaaaagggcaacauuaggugcaacauuugcauuuga

SEQ ID NO: 41447 - RNA, 1701 nt, Artificial Sequence; identical to SEQ ID NO: 41443
  derived and/or modified CDS sequence (wt) from hemagglutinin__InfluenzaA__AFN19381

SEQ ID NO: 41448 - RNA, 1701 nt, Artificial Sequence
  derived and/or modified CDS sequence (wt) from hemagglutinin__InfluenzaA__AFN19383
augaagacuaucauugcuuugagcuacauucuaugucugguuuucgcucaaaaacuuccugaaaaugacaacagcacggcaacgcugugccuugggcaccaugcaguaccaaacggaacgauagugaaaacaaucacgaaugaccaaauugaaguuacuaaugcuacugagcugguucagaguuccucaacaggugaaauaugcgacaguccucaucagauccuugauggaguaaacugcacacuaauagaugcucuauugggagacccucagugugauggcuuccaaaauaagaagugggaccuuuuuguugaacgaagcaaagccuacagcaacuguuacccuuaugaugugccggauuaugccucccuuaggucacuaguugccucauccggcacacuggaguuuaacaaugaaagcuucaauuggacuggagucacucaaaacggaacaagcucugcuugcauaaggagaucuaauaguaguuucuuuaguagauugaauugguugacccacuuaaacuucaaauacccagcauugaacgugacuaugccaaacaaugaacaauuugacaaauuguacauuugggggguucaccacccggguacggacaaggaccaaaucuuccuguaugcucaaucaucaggaagaaucacaguaucuaccaaaagaagccaacaagcuguaaucccgaauaucggaucuagacccaggauaaggaauaucccuagcagaauaagcaucuauuggacaauaguaaaaccgggggacauacuuuugauuaacagcacagggaaucuaauugcuccuagggguuacuucaaaauacgaagugggaaaagcucaauaaugagaucagaugcacccauuggcaaaugcaauucugaaugcaucacuccaaauggaagcauucccaaugacaaaccauuccaaaauguaaacaggaucacauacggggccugucccagauauguuaagcaaagcacucugaaauuggcaacaggaaugcgaaauguaccagagaaacaaacuagaggcauauuuggcgcaauagcggguuucauagaaaaugguugggagggaaugguggaugguugguacgguuucaggcaucaaaauucugagggaagaggacaagcagcagaucucaaaagcacucaagcagcaaucgaucaaaucaacgggaagcugaaucgauugaucgggaaaaccaacgagaaauuccaucagauugaaaaagaauucucagaagucgaagggagaauucaggaccuugagaaauauguugaggacacuaaaauagaucucuggucauacaacgcggagcuucuuguugcccuggagaaccaacauacaauugaucuaacugacucagaaaugaacaaacuguuugaaaaaacaaagaagcaacugagggaaaaugcugaggauaugggcaaugguuguuucaaaauauaccacaaaugugacaaugccugcauaggaucaaucagaaauggaacuuauaaccacgauguauacagagaugaagcauuaaacaaccgguuccagaucaagggaguugagcugaagucaggguacaaagauuggauccuauggauuuccuuugccauaucauguuuuuugcuuuguguugcuuuguugggguucaucaugugggccugccaaaagggcaacauuaggugcaacauuugcauuuga

SEQ ID NO: 41449 - RNA, 1701 nt, Artificial Sequence
  derived and/or modified CDS sequence (wt) from hemagglutinin__InfluenzaA__AFN19385
augaagacuaucauugcuuugagcuacauucuaugucugguuuucgcucaaaaacuuccugaaaaugacaacagcacggcaacgcugugccuugggcaccaugcaguaccaaacggaacgauagugaaaacaaucacgaaugaccaaauugaaguuacuaaugcuacugagcugguucagaguuccucaacaggugaaauaugcgacaguccucaucagauccuugauggaguaaacugcacacuaauagaugcucuauugggagacccucagugugauggcuuccaaaauaagaagugggaccuuuuuguugaacgaagcaaagccuacagcaacuguuacccuuaugaugugccggauuaugccucccuuaggucacuaguugccucauccggcacacuggaguuuaacaaugaaagcuucaauuggacuggagucacucaaaacggaacaagcucugcuugcauaaggagaucuaauaguaguuucuuuaguagauugaauugguugacccacuuaaacuucaaauacccagcauugaacgugacuaugccaaacaaugaacaauuugacaaauuguacauuugggggguucaccacccggguacggacaaggaccaaaucuuccuguaugcucaaucaucaggaagaaucacaguaucuaccaaaagaagccaacaagcuguaaucccgaauaucggaucuagacccagaauaaggaauaucccuagcagaauaagcaucuauuggacaauaguaaaaccgggagacauacuuuugauuaacagcacagggaaucuaauugcuccuagggguuacuucaaaauacaaagugggaaaagcucaauaaugagaucagaugcacccauuggcaaaugcaauucugaaugcaucacuccaaauggaagcauucccaaugacaaaccauuccaaaauguaaacaggaucacauacggggccugucccagauauguuaagcaaagcacucugaaauuggcaacaggaaugcgaaauguaccagagaaacaaacuagaggcauauuuggcgcaauagcggguuucauagaaaaugguugggagggaaugguggaugguugguacgguuucaggcaucaaaauucugagggaagaggacaagcagcagaucucaaaagcacucaagcagcaaucgaucaaaucaaugggaagcugaaucgauugaucgggaaaaccaacgagaaauuccaucagauugaaaaagaauucucagaagucgaagggagaauucaggaccuugagaaauauguugaggacacuaaaauagauaucuggucauacaacgcggagcuucuuguugcccuggagaaccaacauacaauugaucuaacugacucagaaaugaacaaacuguuugaaaaaacaaagaagcaacugagggaaaaugcugaggauaugggcaaugguuguuucaaaauauaccacaaaugugacaaugccugcauaggaucaaucagaaauggaacuuauaaccacgauguauacagagaugaagcauuaaacaaccgguuccagaucaagggaguugagcugaagucaggguacaaagauuggauccuauggauuuccuuugccauaucauguuuuuugcuuuguguugcuuuguugggguucaucaugugggccugccaaaagggcaacauuaggugcaacauuugcauuuga

SEQ ID NO: 41450 - RNA, 1701 nt, Artificial Sequence
  derived and/or modified CDS sequence (wt) from hemagglutinin__InfluenzaA__AFN19387
augaagacuaucauugcuuugagcuacauucuaugucugguuuucgcucaaaaacuuccugaaaaugacaacagcacggcaacgcugugccuugggcaccaugcaguaccaaacggaacgauagugaaaacaaucacgaaugaccaaauugaaguuacuaaugcuacugagcugguucagaguuccucaacaggugaaauaugcgacaguccucaucagauccuugauggaguaaacugcacacuaauagaugcucuauugggagacccucagugugauggcuuccaaaauaagaagugggaccuuuuuguugaacgaagcaaagccuacagcaacuguuacccuuaugaugugccggauuaugccucccuuaggucacuaguugccucauccggcacacuggaguuuaacaaugaaagcuucaauuggacuggagucacucaaaacggaacaagcucugcuugcauaaggagaucuaauaguaguuucuuuaguagauugaauugguugacccacuuaaacuucaaauacccagcauugaacgugacuaugccaaacaaugaacaauuugacaaauuguacauuugggggguucaccacccggguacggacaaggaccaaaucuuccuguaugcucaaucaucaggaagaaucacaguaucuaccaaaagaagccaacaagcuguaaucccgaauaucggaucuagacccagaauaaggaauaucccuagcagaauaagcaucuauuggacaauaguaaaaccgggagacauacuuuugauuaacagcacagggaaucuaauugcuccuagggguuacuucaaaauacgaagugggaaaagcucaauaaugagaucagaugcacccauuggcaaaugcaauucugaaugcaucacuccaaauggaagcauucccaaugacaaaccauuccaaaauguaaacaggaucacauacggggccugucccagauauguuaagcaaagcacucugaaauuggcaacaggaaugcgaaauguaccagagaaacaaacuagaggcauauuuggcgcaauagcggguuucauagaaaaugguugggagggaaugguggaugguugguacgguuucaggcaucaaaauucugagggaagaggacaagcagcagaucucaaaagcacucaagcagcaaucgaucaaaucaaugggaagcugaaucgauugaucgggaaaaccaacgagaaauuccaucagauugaaaaagaauucucagaagucgaagggagaauucaggaccuugagaaauaugucgaggacacuaaaauagaucucuggucauacaacgcggagcuucuuguugcccuggagaaccaacauacaauugaucuaacugacucagaaaugaacaaacuguuugaaaaaacaaagaagcaacugagggaaaaugcugaggauaugggcaaugguuguuucaaaauauaccacaaaugugacaaugccugcauaggaucaaucagaaauggaacuuauaaccacgauguauacagagaugaagcauuaaacaaccgguuccagaucaagggaguugagcugaagucaggguacaaagauuggauccuauggauuuccuuugccauaucauguuuuuugcuuuguguugcuuuguugggguucaucaugugggccugccaaaagggcaacauuaggugcaacauuugcauuuga

SEQ ID NO: 41451 - RNA, 1701 nt, Artificial Sequence
  derived and/or modified CDS sequence (wt) from hemagglutinin__InfluenzaA__AFN19389
augaagacuaucauugcuuugagcuacauucuaugucugguuuucgcucaaaaacuuccuggaaaugacaacagcacggcaacgcuaugccuugggcaccaugcaguaccaaacggaacgauagugaaaacaaucacgaaugaccaaauugaaguuacuaaugcuacugagcugguucagaguuccucaacaggugaaauaugcgacaguccucaucagauccuugauggagaaaacugcacacuaauagaugcucuauugggagacccucagugugauggcuuccaaaauaagaagugggaccuuuuuguugaacgaagcaaagccuacagcaacuguuacccuuaugaugugccggauuaugccucccuuaggucacuaguugccucauccggcacacuggaguuuaacaaugaaagcuucaauuggacuggagucacucaaaacggaacaagcucugcuugcauaaggagaucuaauaguaguuucuuuaguagauugaauugguugacccacuuaaacuucaaauacccagcauugaacgugacuaugccaaacaaugaacaauuugacaaauuguacauuugggggguucaccacccggguacggacaaggaccaaaucuuccuguaugcucaaucaucaggaagaaucacaguaucuaccaaaagaagccaacaagcuguaaucccgaauaucggaucuagacccagaauaaggaauaucccuagcagaauaagcaucuauuggacaauaguaaaaccgggagacauacuuuugauuaacagcacagggaaucuaauugcuccuagggguuacuucaaaauacgaagugggaaaagcucaauaaugagaucagaugcacccauuggcaaaugcaauucugaaugcaucacuccaaauggaagcauucccaaugacaaaccauuccaaaauguaaacaggaucacauacggggccugucccagauauguuaagcaaagcacucugaaauuggcaacaggaaugcgaaauguaccagagaaacaaacuagaggcauauuuggcgcaauagcggguuucauagaaaaugguugggagggaaugguggaugguugguacgguuucaggcaucaaaauucugagggaagaggacaagcagcagaucucaaaagcacucaagcagcaaucgaucaaaucaaugggaagcugaaucgauugaucgggaaaaccaacgagaaauuccaucagauugaaaaagaauucucagaagucgaagggagaauucaggaccuugagaaauauguugaggacacuaaaauagaucucuggucauacaacgcggagcuucuuguugcccuggagaaccaacauacaauugaucuaacugacucagaaaugaacaaacuguuugaaaaaacaaagaagcaacugagggaaaaugcugaggauaugggcaaugguuguuucaaaauauaccacaaaugugacaaugccugcauaggaucaaucagaaauggaacuuauaaccacgauguauacagagaugaagcauuaaacaaccgguuccagaucaagggaguugagcugaagucaggguacaaagauuggauccuauggauuuccuuugccauaucauguuuuuugcuuuguguugcuuuguugggguucaucaugugggccugccaaaagggcaacauuaggugcaacauuugcauuuga

SEQ ID NO: 41452 - RNA, 1701 nt, Artificial Sequence; identical to SEQ ID NO: 41436
  derived and/or modified CDS sequence (wt) from hemagglutinin__InfluenzaA__AFN19391

SEQ ID NO: 41453 - RNA, 1701 nt, Artificial Sequence
  derived and/or modified CDS sequence (wt) from hemagglutinin__InfluenzaA__AFN19393
augaagaccaucauugcuuugagcuacauucuaugucugguuuucgcucaaaaacuuccuggaaaugacaacagcacggcaacgcugugccuugggcaccaugcaguaccaaacggaacgauagugaaaacaaucacgaaugaccaaauugaaguuacuaaugcuacugagcugguucagaguuccucagcaggugaaauaugcgacaguccucaucauauccuugauggagaaaacugcacacuaauagaugcucuauugggagacccucagugugauggcuuccaaaauaagaaaugggaccuuuuuguugaacgaagcagagccuacagcaacuguuacccuuaugaugugccggauuaugccucccuuaggucacuaguugccucauccggcacacuggaguuuaacaaugaaagcuucaauuggacuggagucacucaaaacggaacaagcucugcuugcauaaggagaucuaauaauaguuucuuuaguagauugaauugguugacccacuuaaacuucaaauacccagcauugaacgugacuaugccaaacaaugaacaauuugacaaauuguacauuugggggguucaccacccggguacggacaaggaccaaaucuuccuguaugcucaagcaucaggaagaaucacaguaucuaccaaaagaagccaacaagcuguaaucccgaauaucggaucuagacccagaguaaggaauaucccuagcagaauaagcaucuauuggacaauaguaaaaccgggagacauacuuuugauuaacagcacagggaaucuaauugcuccuagggguuacuucaaaauacgaagugggaaaagcucaauaaugagaucagaugcacccauuggcaaaugcaauucugaaugcaucacuccaaauggaagcauucccaaugacaaaccauuccaaaauguaaacaggaucacauacggggccugucccagauauguuaagcaaagcacucugaaauuggcaacaggaaugcgaaauguaccagagaaacaaacuagaggcauauuuggcgcaauagcggguuucauagaaaaugguugggagggaaugauggaugguugguacgguuucaggcaucaaaauucugagggaagaggacaagcagcagaucucaaaagcacucaagcagcaaucgaucaaaucaauggaaagcugaauagauugaucgggaaaaccaacgagaaauuccaucagauugaaaaagaauucucagaagucgaagggagaauucaggaccuugagaaauauguugaggacacuaaaauagaucucuggucauacaacgcggagcuucuuguugcccuggagaaucaacauacaauugaucuaacugacucagaaaugaacaaacuguuugaaaaaacaaagaagcaacugagggaaaaugcugaggauaugggcaaugguuguuucaaaauauaccacaaaugugacaaugccugcauaggaucaaucagaaauggaacuuaugaccacgauguauacagagaugaagcauuaagcaaccgguuccagaucaagggaguugagcugaagucaggguacaaagauuggauccuauggauuuccuuugccauaucauguuuuuugcuuuguguugcuuuguugggguucaucaugugggccugccaaaaaggcaacauuaggugcaacauuugcauuuga

SEQ ID NO: 41454 - RNA, 1701 nt, Artificial Sequence
  derived and/or modified CDS sequence (wt) from hemagglutinin__InfluenzaA__AFN19397
augaagacuaucauugcuuugagcuacauucuaugucugguuuucgcucaaaaacuuccugaaaaugacaacagcacggcaacgcugugccuugggcaccaugcaguaccaaacggaacgauagugaaaacaaucacgaaugaccaaauugaaguuacuaaugcuacugagcugguucagaguuccucaacaggugaaauaugcgacaguccucaucagauccuugauggaguaaacugcacacuaauagaugcucuauugggagacccucagugugauggcuuccaaaauaagaagugggaccuuuuuguugaacgaagcaaagccuacagcaacuguuacccuuaugaugugccagauuaugccucccuuaggucacuaguugccucauccggcacacuggaguuuaacaaugaaagcuucaauuggacuggagucacucaaaacggaacaagcucugcuugcauaaggagaucuaauaguaguuucuuuaguagauugaauugguugacccacuuaaacuucaaauacccagcauugaacgugacuaugccaaacaaugaacaauuugacaaauuguacauuugggggguucaccacccggguacggacaaggaccaaaucuuccuguaugcucaaucaucaggaagaaucacaguaucuaccaaaagaagccaacaagcuguaaucccgaauaucggaucuagacccagaauaaggaauaucccuagcagaauaagcaucuauuggacaauaguaaaaccgggagacauacuuuugauuaacagcacagggaaucuaauugcuccuagggguuacuucaaaauacgaagugggaaaagcucaauaaugagaucagaugcacccauuggcaaaugcaauucugaaugcaucacuccaaauggaagcauucccaaugacaaaccauuccaaaauguaaacaggaucacauacggggccugucccagauauguuaagcaaagcacucugaaauuggcaacaggaaugcgaaauguaccagagaaacaaacuagaggcauauuuggcgcaauagcggguuucauagaaaaugguugggagggaaugguggaugguugguacgguuucaggcaucaaaauucugagggaagaggacaagcagcagaucucaaaagcacucaagcagcaaucgaucaaaucaaugggaagcugaaucgauugaucgggaaaaccaacgagaaauuccaucagauugaaaaagaauucucagaagucgaagggagaauucaggaccuugagaaauaugucgaggacacuaaaauagaucucuggucauacaacgcggagcuucuuguugcccuggagaaccaacauacaauugaucuaacugacucagaaaugaacaaacuguuugaaaaaacaaagaagcaacugagggaaaaugcugaggauaugggcaaugguuguuucaaaauauaccacaaaugugacaaugccugcauaggaucaaucagaaauggaacuuauaaccacgauguauacagagaugaagcauuaaacaaccgguuccagaucaagggaguugagcugaagucaggguacaaagauuggauccuauggauuuccuuugccauaucauguuuuuugcuuuguguugcuuuguugggguucaucaugugggccugccaaaagggcaacauuaggugcaacauuugcauuuga

SEQ ID NO: 41455 - RNA, 1701 nt, Artificial Sequence; identical to SEQ ID NO: 41436
  derived and/or modified CDS sequence (wt) from hemagglutinin__InfluenzaA__AFN19399

SEQ ID NO: 41456 - RNA, 1701 nt, Artificial Sequence; identical to SEQ ID NO: 41454
  derived and/or modified CDS sequence (wt) from hemagglutinin__InfluenzaA__AFN19401

SEQ ID NO: 41457 - RNA, 1701 nt, Artificial Sequence; identical to SEQ ID NO: 41436
  derived and/or modified CDS sequence (wt) from hemagglutinin__InfluenzaA__AFN19403

SEQ ID NO: 41458 - RNA, 1701 nt, Artificial Sequence
  derived and/or modified CDS sequence (wt) from hemagglutinin__InfluenzaA__AFN19405
augaagacuaucauugcuuugagcuacauucuaugucugguuuucgcucaaaaacuuccugaaaaugacaacagcacggcaacgcugugccuugggcaccaugcaguaccaaacggaacgauagugaaaacaaucacgaaugaccaaauugaaguuacuaaugcuacugagcugguucagaguuccucaacaggugaaauaugcgacaguccucaucagauccuugauggaguaaacugcacacuaauagaugcucuauugggagacccucagugugauggcuuccaaaauaagaagugggaccuuuuuguugaacgaagcaaagccuacagcaacuguuacccuuaugaugugccagauuaugccucccuuaggucacuaguugccucauccggcacacuggaguuuaacaaugaaagcuucaauuggacuggagucacucaaaacggaacaagcucugcuugcauaaggagaucuaauaguaguuucuuuaguagauugaauugguugacccacuuaaacuucaaauacccagcauugaacgugacuaugccaaacaaugaacaauuugacaaauuguacauuugggggguucaccacccggguacggacaaggaccaaaucuuccuguaugcucaaucaucaggaagaaucacaguaucuaccaaaagaagccaacaagcuguaaucccgaauaucggaucuagacccagaauaaggaauaucccuagcagaauaagcaucuauuggacaauaguaaaaccgggagacauacuuuugauuaacagcacagggaaucuaauugcuccuagggguuacuucaaaauacgaagugggaaaagcucaauaaugagaucagaugcacccauuggcaaaugcaauucugaaugcaucacuccaaauggaagcauucccaaugacaaaccauuccaaaauguaaacaggaucacauacggggccugucccagauauguuaagcaaagcacucugaaauuggcaacaggaaugcgaaauguaccagagaaacaaacuagaggcauauuuggcgcaauagcggguuucauagagaaugguugggagggaaugguggaugguugguacgguuucaggcaucaaaauucugagggaagaggacaagcagcagaucucaaaagcacucaagcagcaaucgaucaaaucaaugggaagcugaaucgauugaucgggaaaaccaacgagaaauuccaucagauugaaaaagaauucucagaagucgaagggagaauucaggaccuugagaaauaugucgaggacacuaaaauagaucucuggucauacaacgcggagcuucuuguugcccuggagaaccaacauacaauugaucuaacugacucagaaaugaacaaacuguuugaaaaaacaaagaagcaacugagggaaaaugcugaggauaugggcaaugguuguuucaaaauauaccacaaaugugacaaugccugcauaggaucaaucagaaauggaacuuauaaccacgauguauacagagaugaagcauuaaacaaccgguuccagaucaagggaguugagcugaagucaggguacaaagauuggauccuauggauuuccuuugccauaucauguuuuuugcuuuguguugcuuuguugggguucaucaugugggccugccaaaagggcaacauuaggugcaacauuugcauuuga

SEQ ID NO: 41459 - RNA, 1701 nt, Artificial Sequence
  derived and/or modified CDS sequence (wt) from hemagglutinin__InfluenzaA__AFN19407
augaagacuaucauugcuuugagcuacauucuaugucugguuuucgcucaaaaacuuccuggaaaugacaacagcacggcaacgcugugccuugggcaccaugcaguaccaaacggaacgauagugaaaacaaucacgaaugaccaaauugaaguuacuaaugcuacugagcugguucagaauuccucaauaggugaaauaugcgacaguccucaucagauccuugauggagaaaacugcacacuaauagaugcucuauugggagacccucagugugauggcuuccaaaauaagaaaugggaccuuuuuguugaacgaagcaaagccuacagcaacuguuacccuuaugaugugccggauuaugccucccuuaggucacuaguugccucauccggcacacuggaguuuaacaaugaaagcuucaauuggucuggagucacucaaaacggaacaaguucugcuugcaugaggagaucuaauaguaguuucuuuaguagauugaauugguugacccacuuaaacuucaaauacccagcauugaacgugacuaugccaaacaaugaacaguuugacaaauuguacauuugggggguucaccacccggguacggacaaggaccaaaucuuccuguaugcucaaucaucaggaagaaucacaguaucuaccaaaagaagccaacaagcuguaaucccgaauaucggaucuagacccagaauaagaaauaucccuagcagaauaagcaucuauuggacaauaguaaaaccgggagacauacuuuugauuaacagcacagggaaucuaauugcuccuagggguuacuucaaaauacgaagugggaaaagcucaauaaugagaucagaugcacccauuggcaaaugcaauucugaaugcaucacuccaaauggaagcauucccaaugacaaaccauuccaaaauguaaacaggaucacauacggggccugucccagauauguuaagcaaagcacucugaaauuggcaacaggaaugcgaaauguaccagagaaacaaacuagaggcauauuuggcgcaauagcggguuucauagaaaaugguugggagggaaugguggaugguugguacgguuucaggcaucaaaauucugagggaagaggacaagcagcagaucucaaaagcacucaagcagcaaucgaucaaaucaaugggaagcugaaucgauugaucgggaaaaccaacgagaaauuccaucagauugaaaaagaauucucagaagucgaagggagaauucaggaccuugagaaauauguugaggacacuaaaauagaucucuggucauacaacgcggagcuucuuguugcccuggagaaccaacauacaauugaucuaacugacucagaaaugaacaaacuguuugaaaaaacaaagaagcaacugagggaaaaugcugaggauaugggcaaugguuguuucaaaauauaccacaaaugugacaaugccugcauaggaucaaucagaaauggaacuuaugaccacgauguauacagagaugaagcauuaaacaaccgguuccagaucaagggaguugagcugaagucaggguacaaagauuggauccuauggauuuccuuugccauaucauguuuuuugcuuuguguugcuuuguugggguucaucaugugggccugccaaaagggcaacauuaggugcaacauuugcauuuga

SEQ ID NO: 41460 - RNA, 1701 nt, Artificial Sequence
  derived and/or modified CDS sequence (wt) from hemagglutinin__InfluenzaA__AFN19409
augaagacuaucauugcuuugagcuacauucuaugucugguuuucgcucaaaaacuuccuggaaaugacaacagcacggcaacgcugugccuugggcaccaugcaguaccaaacggaacgauagugaaaacaaucacgaaugaccaaauugaaguuacuaaugcuacugagcugguucagaguuccucaauaggugaaauaugcgacaguccucaucagauccuugauggagaaaacugcacacuaauagaugcucuauugggagacccucagugugauggcuuccaaaauaagaagugggaccuuuuuguugaacgaagcaaagccuacagcaacuguuacccuuaugaugugccggauuaugccucccuuaggucacuaguugccucauccggcacacuggaguuuaacaaugaaagcuucaauuggacuggagucacucaaaacggaacaagcucugcuugcauaaggagaucuaauaguaguuucuuuaguagauugaauugguugacccacuuaaacuucaaauacccagcauugaacgugacuaugccaaacaaugaacaauuugacaaauuguacauuugggggguucaccacccggguacggacaaggaccaaaucuuccuguaugcucaaucaucaggaagaaucacaguaucuaccaaaagaagccaacaagcuguaaucccgaauaucggaucuagacccagaauaaggaauaucccuagcagaauaagcaucuauuggacaauaguaaaaccgggagacauacuuuugauuaacagcacagggaaucuaauugcuccuagggguuacuucaaaauacgaagugggaaaagcucaauaaugagaucagaugcacccauuggcaaaugcaauucugaaugcaucacuccaaauggaagcauucccaaugacaaaccauuccaaaauguaaacaggaucacauacggggccugucccagauauguuaagcaaagcacucugaaauuggcaacaggaaugcgaaauguaccagagaaacaaacuagaggcauauuuggcgcaauagcggguuucauagaaaaugguugggagggaaugguggaugguugguacgguuucaggcaucaaaauucugagggaagaggacaagcagcagaucucaaaagcacucaagcagcaaucgaucaaaucaaugggaagcugaaucgauugaucgggaaaaccaacgagaaauuccaucagauugaaaaagaauucucagaagucgaagggagaauucaggaccuugagaaauauguugaggacacuaaaauagaucucuggucauacaacgcggagcuucuuguugcccuggagaaccaacauacaauugaucuaacugacucagaaaugaacaaacuguuugaaaaaacaaagaagcaacugagggaaaaugcugaggauaugggcaaugguuguuucaaaauauaccacaaaugugacaaugccugcauaggaucaaucagaaauggaacuuauaaccacgauguauacagagaugaagcauuaaacaaccgguuccagaucaagggaguugagcugaagucaggguacaaagauuggauccuauggauuuccuuugccauaucauguuuuuugcuuuguguugcuuuguugggguucaucaugugggccugccaaaagggcaacauuaggugcaacauuugcauuuga

SEQ ID NO: 41461 - RNA, 1701 nt, Artificial Sequence; identical to SEQ ID NO: 41450
  derived and/or modified CDS sequence (wt) from hemagglutinin__InfluenzaA__AFN19411

SEQ ID NO: 41462 - RNA, 1701 nt, Artificial Sequence; identical to SEQ ID NO: 41436
  derived and/or modified CDS sequence (wt) from hemagglutinin__InfluenzaA__AFN19413

SEQ ID NO: 41463 - RNA, 1701 nt, Artificial Sequence
  derived and/or modified CDS sequence (wt) from hemagglutinin__InfluenzaA__AFN19415
augaagacuaucauugcuuugagcuacauucuaugucugguuuucgcucaaaaacuuccuggaaaugacaacagcacggcaacgcugugccuugggcaccaugcaguaccaaacggaacgauagugaaaacaaucacgaaugaccaaauugaaguuacuaaugcuacugagcugguucagaguuccucaacaggugaaauaugcgacaguccucaucagauccuugauggagaaaacugcacacuaauagaugcucuauugggagacccucagugugauggcuuccaaaauaagaagugggaccuuuuuguugaacgaagcaaagccuacagcaacuguuacccuuaugaugugccggauuaugccucccuuaggucacuaguugccucauccggcacacuggaguuuaacaaugaaagcuucaauuggacuggagucacucaaaacggaacaagcucugcuugcauaaggagaucuaauaguaguuucuuuaguagauugaauugguugacccacuuaaacuucaaauacccagcauugaacgugacuaugccaaacaaugaacaauuugacaaauuguacauuugggggguucaccacccggguacggacaaggaccaaaucuuccuguaugcucaaucaucaggaagaaucacaguaucuaccaaaagaagccaacaagcuguaaucccgaauaucggaucuagacccagaauaaggaauaucccuagcagaauaagcaucuauuggacaauaguaaaaccgggagacauacuuuugauuaacagcacagggaaucuaauugcuccuagggguuacuucaaaauacgaagugggaaaagcucaguaaugagaucagaugcacccauuggcaaaugcaauucugaaugcaucacuccaaauggaagcauucccaaugacaaaccauuccaaaauguaaacaggaucacauacggggccugucccagauauguuaagcaaagcacucugaaauuggcaacaggaaugcgaaauguaccagagaaacaaacuagaggcauauuuggcgcaauagcggguuucauagaaaaugguugggagggaaugguggaugguugguacgguuucaggcaucaaaauucugagggaagaggacaagcagcagaucucaaaagcacucaagcagcaaucgaucaaaucaaugggaagcugaaucgauugaucgggaaaaccaacgagaaauuccaucagauugaaaaagaauucucagaagucgaagggagaauucaggaccuugagaaauauguugaggacacuaaaauagaucucuggucauacaacgcggagcuucuuguugcccuggagaaccaacauacaauugaucuaacugacucagaaaugaacaaacuguuugaaaaaacaaagaagcaacugagggaaaaugcugaggauaugggcaaugguuguuucaaaauauaccacaaaugugacaaugccugcauaggaucaaucagaaauggaacuuauaaccacgauguauacagagaugaagcauuaaacaaccgguuccagaucaagggaguugagcugaagucaggguacaaagauuggauccuauggauuuccuuugccauaucauguuuuuugcuuuguguugcuuuguugggguucaucaugugggccugccaaaagggcaacauuaggugcaacauuugcauuuga

SEQ ID NO: 41464 - RNA, 1701 nt, Artificial Sequence
  derived and/or modified CDS sequence (wt) from hemagglutinin__InfluenzaA__AFN19417
augaagacuaucauugcuuugagcuacauucuaugucugguuuucgcucaaaaacuuccuggaaaugacaacagcacggcaacgcugugccuugggcaccaugcaguaccaaacggaacgauagugaaaacaaucacgaaugaccaaauugaaguuacuaaugcuacugagcugguucagaguuccucaacaggugaaauaugcgacaguccucaucagauccuugauggagaaaacugcacacuaauagaugcucuauugggagacccucagugugauggcuuccaaaauaagaagugggaccuuuuuguugaacgaagcaaagccuacagcaacuguuacccuuaugaugugccggauuaugccucccuuaggucacuaauugccucauccggcacacuggaguuuaacaaugaaagcuucaauuggacuggagucacucaaaacggaacaagcucugcuugcauaaggagaucuaauaguaguuucuuuaguagauugaauugguugacccacuuaaacuucaaauacccagcauugaacgugacuaugccaaacaaugaacaauuugacaaauuguacauuugggggguucaccacccggguacggacaaggaccaaaucuuccuguaugcucaaucaucuggaagaaucacaguaucuaccaaaagaagccaacaagcuguaaucccgaauaucggaucuagacccagaauaaggaauaucccuagcagaauaagcaucuauuggacaauaguaaaaccgggagacauacuuuugauaaacagcacagggaaucuaauugcuccuagggguuacuucaaaauacgaagugggaaaagcucaauaaugagaucagaugcacccauuggcaaaugcaauucugaaugcaucacuccaaauggaagcauucccaaugacaaaccauuccaaaauguaaacaggaucacauacggggccugucccagauauguuaagcaaagcacucugaaauuggcaacaggaaugcgaaauguaccagagaaacaaacuagaggcauauuuggcgcaauagcggguuucauagaaaaugguugggagggaaugguggacgguugguacgguuucaggcaucaaaauucugagggaagaggacaagcagcagaucucaaaagcacucaagcagcaaucgaucaaaucaaugggaagcugaaucgauugaucgggaaaaccaacgagaaauuccaucagauugaaaaagaauucucagaagucgaagggagaauucaggaccuugagaaauauguugaggacacuaaaauagaucucuggucauacaacgcggagcuucuuguugcccuggagaaccaacauacaauugaucuaacugacucagaaaugaacaaacuguuugaaaaaacaaagaagcaacugagggaaaaugcugaggauaugggcaaugguuguuucaaaauauaccacaaaugugacaaugccugcauaggaucaaucagaaauggaacuuauaaccacgauguauacagagaugaagcauuaaacaaccgguuccagaucaagggaguugagcugaagucaggguacaaagauuggauccuauggauuuccuuugccauaucauguuuuuugcuuuguguugcuuuguugggguucaucaugugggcuugccaaaagggcaacauuaggugcaacauuugcauuuga

SEQ ID NO: 41465 - RNA, 1701 nt, Artificial Sequence
  derived and/or modified CDS sequence (wt) from hemagglutinin__InfluenzaA__AFN19423
augaagacuaucauugcuuugagcuacauucuaugucugguuuucgcucaaaaacuuccuggaaaugacaauagcacggcaacgcugugccuugggcaccaugcaguaccaaacggaacgauagugaaaacaaucacgaaugaccgaauugaaguuacuaaugcuacugagcugguucagaauuccucaauaggugaaauaugcgacaguccucaucagauccuugauggagaaaacugcacacuaauagaugcucuauugggagacccucagugugauggcuuccaaaauaagaaaugggaccuuuuuguugaacgaagcaaagccuacagcaacuguuacccuuaugaugugccggauuaugccucccuuaggucacuaguugccucauccggcacacuggaguuuaacaaugaaagcuucaauuggacuggagucacucaaaacggaacaaguucugcuugcauaaggagaucuaauaauaguuucuuuaguagauuaaauugguugacccacuuaaacuucaaauacccagcauugaacgugacuaugccaaacaaugaacaauuugacaaauuguacauuugggggguucaucacccggguacggacaaggaccaaaucuuccuguaugcucaaucaucaggaagaaucacaguaucuaccaaaagaagccaacaagcuguaaucccgaauaucggaucuagacccagaauaaggaauaucccuagcagaauaagcaucuauuggacaauaguaaaaccgggagacauacuuuugauuaacagcacagggaaucuaauugcuccuagggguuacuucaaaauacgaagugggaaaagcucaauaaugagaucagaugcacccauuggcaaaugcaagucugaaugcaucacuccaaauggaagcauucccaaugacaaaccauuccaaaauguaaacaggaucacauacggggccugucccagauauguuaagcaaagcacucugaaauuggcaacaggaaugcgaaauguaccagagaaacaaacuagaggcauauuuggcgcaauagcggguuucauagaaaaugguugggagggaaugguggaugguugguacgguuucaggcaucaaaauucugagggaagaggacaagcagcagaucucaaaagcacucaagcagcaaucgaucaaaucaaugggaagcugaaucgauugaucgggaaaaccaacgagaaauuccaucagauugaaaaagaauucucagaaguagaagggagaauucaggaccuugagaaauauguugaggacacuaaaauagaucucuggucauacaacgcggagcuucuuguugcccuggagaaccaacauacaauugaucuaacugacucagaaaugaacaaacuguuugaaaaaacaaagaagcaacugagggaaaaugcugaggauaugggcaaugguuguuucaaaauauaccacaaaugugacaaugccugcauaggaucaaucagaaauggaacuuaugaccacgauguauacagagaugaagcauuaaacaaccgguuccagaucaagggaguugagcugaagucaggguacaaagauuggauccuauggauuuccuuugccauaucauguuuuuugcuuuguguugcuuuguugggguucaucaugugggccugccaaaagggcaacauuaggugcaacauuugcauuuga

SEQ ID NO: 41466 - RNA, 1701 nt, Artificial Sequence
  derived and/or modified CDS sequence (wt) from hemagglutinin__InfluenzaA__AFN19425
augaagacuaucauugcuuugagcuacauucuaugucugguuuucgcucaaaaacuuccugaaaaugacaacagcacggcaacgcugugccuugggcaccaugcaguaccaaacggaacgauagugaaaacaaucacgaaugaccaaauugaaguuacuaaugcuacugagcugguucagaguuccucaacaggugaaauaugcgacaguccucaucagauccuugauggaguaaacugcacacuaauagaugcucuauugggagacccucagugugauggcuuccaaaauaagaagugggaccuuuuuguugaacgaagcaaagccuacagcaacuguuacccuuaugaugugccggauuaugccucccuuaggucacuaguugccucauccggcacacuggaguuuaacaaugaaagcuucaauuggacuggagucacucaaaacggaacaagcucugcuugcauaaggagaucuaauaguaguuucuuuaguagauugaauugguugacccacuuaaacuucaaauacccagcauugaacgugacuaugccaaacaaugaacaauuugacaaauuguacauuugggggguucaccacccggguacggacaaggaccaaaucuuccuguaugcucaaucaucaggaagaaucacaguaucuaccaaaagaagccaacaagcuguaaucccgaauaucggaucuagacccagaauaaggaauaucccuagcagaauaagcaucuauuggacaauaguaaaaccgggagacauacuuuugauuaacagcacagggaaucuaauugcuccuagggguuacuucaaaauacgaagugggaaaagcucaauaaugagaucagaugcacccauuggcaaaugcaauucugaaugcaucacuccaaauggaagcauucccaaugacaaaccauuccaaaauguaaacaggaucacauacggggccugucccagauauguuaagcaaaguacucugaaauuggcaacaggaaugcgaaauguaccagagaaacaaacuagaggcauauuuggcgcaauagcggguuucauagaaaaugguugggagggaaugguggaugguugguacgguuucaggcaucaaaauucugagggaagaggacaagcagcagaucucaaaagcacucaagcagcaaucgaucaaaucaaugggaagcugaaucgauugaucgggaaaaccaacgagaaauuccaucagauugaaaaagaauucucagaagucgaagggagaauucaggaccuugagaaauaugucgaggacacuaaaauagaucucuggucauacaacgcggagcuucuuguugcccuggagaaccaacauacaauugaucuaacugacucagaaaugaacaaacuguuugaaaaaacaaagaagcaacugagggaaaaugcugaggauaugggcaaugguuguuucaaaauauaccacaaaugugacaaugccugcauaggaucaaucagaaauggaacuuauaaccacgauguauacagagaugaagcauuaaacaaccgguuccagaucaagggaguugagcugaagucaggguacaaagauuggauccuauggauuuccuuugccauaucauguuuuuugcuuuguguugcuuuguugggguucaucaugugggccugccaaaagggcaacauuaggugcaacauuugcauuuga

SEQ ID NO: 41467 - RNA, 1701 nt, Artificial Sequence
  derived and/or modified CDS sequence (wt) from hemagglutinin__InfluenzaA__AFN19437
augaagacuaucauugcuuugagcuacauucuaugucugguuuucgcucaaaaacuuccuggaaaugacaacagcacggcaacgcugugccuugggcaccaugcaguaccaaacggaacgauagugaaaacaaucacgaaugaccaaauugaaguuacuaaugcuacugagcugguucagaauuccucaauaggugaaauaugcgacaguccucaucagauccuugauggagaaaacugcacacuaauagaugcucuauugggagacccucagugugauggcuuccaaaauaagaaaugggaccuuuuuguugaacgaagcaaagccuacagcaacuguuacccuuaugaugugccggauuaugccucccuuaggucacuaguugccucauccggcacacuggaguuuaacaaugaaagcuucaauuggacuggagucacucaaaacggaacaaguucugcuugcauaaggagaucuaauaguaguuucuuuaguagauugaauugguugacccacuuaaacuucaaauacccagcauugaacgugacuaugccaaacaaugaacaauuugacaaauuguacauuugggggguucaccacccggguacggacaaggaccaaaucuuccuguaugcucaaucaucaggaagaaucacaguaucuaccaaaagaagccaacaagcuguaaucccgaauaucggaucuagacccagaauaagaaauaucccuagcagaauaagcaucuauuggacaauaguaaaaccgggagacauacuuuugauuaacagcacagggaaucuaauugcuccuagggguuacuucagaauacgaagugggaaaagcucaauaaugagaucagaugcacccauuggcaaaugcaauucugaaugcaucacuccaaauggaagcauucccaaugacaaaccauuccaaaauguaaacaggaucacauacggggccugucccagauauguuaagcaaagcacucugaaauuggcaacaggaaugcgaaauguaccagagaaacaaacuagaggcauauuuggcgcaauagcggguuucauagaaaaugguugggagggaaugguggaugguugguacgguuucaggcaucaaaauucugagggaagaggacaagcagcagaucucaaaagcacucaagcagcaaucgaucaaaucaauaggaagcugaaucgauugaucgggaaaaccaacgagaaauuccaucagauugaaaaagaauucucagaagucgaagggagaauucaggaccuugagaaauauguugaggacacuaaaauagaucucuggucauacaacgcggagcuucuuguugcccuggagaaccaacauacaauugaucuaacugacucagaaaugaacaaacuguuugaaaaaacaaagaagcaacugagggaaaaugcugaggauaugggcaaugguuguuucaaaauauaccacaaaugugacaaugccugcauaggaucaaucagaaauggaacuuaugaccacuauguauacagagaugaagcauuaaacaaccgguuccagaucaagggaguugagcugaagucaggguacaaagauuggauccuauggauuuccuuugccauaucauguuuuuugcuuuguguugcuuuguugggguucaucaugugggccugccaaaagggcaacauuaggugcaacauuugcauuuga

SEQ ID NO: 41468 - RNA, 1701 nt, Artificial Sequence
  derived and/or modified CDS sequence (wt) from hemagglutinin__InfluenzaA__AFN19439
augaagacuaucauugcuuugagccacauucuaugucugguuuucgcucaaaaacuuccugaaaaugacaacagcacggcaacgcugugucuugggcaccaugcaguaccaaacggaacgauagugaaaacaaucacgaaugaccaaauugaaguuacuaaugcuacugagcugguucagaguuccucaacaggugaaauaugcgacaguccucaucagauccuugauggaauaaacugcacacuaauagaugcucuauugggagacccucagugugauggcuuccaaaauaagaagugggaccuuuuuguugaacgaagcaaagccuacagcaacuguuacccuuaugaugugccggauuaugccucccuuaggucacuaguugccucauccggcacacuggaguuuaacaaugaaagcuucaauuggacuggagucacucaaaacggaacaagcucugcuugcauaaggagaucuaauaguaguuucuuuaguagauugaauugguugacccacuuaaacuucaaauacccagcauugaacgugacuaugccaaacaaugaacaauuugacaaauuguacauuugggggguucaccacccggguacggacaaggaccaaaucuuccuguaugcucaaccaucaggaagaaucacaguaucuacaaaaagaagccaacaagcuguaaucccgaauaucggaucuagacccagaauaaggaauaucccuagcagaauaagcaucuauuggacaauaguaaaaccgggagacauacuuuugauuaacagcacagggaaucuaauugcuccuagggguuacuucaaaauacgaagugggaaaagcucaauaaugagaucagaugcacccauuggcaaaugcaauucugaaugcaucacuccaaauggaagcauucccaaugacaaaccauuccaaaauguaaacaggaucacauacggggccugucccagauauguuaagcaaagcacucugaaauuggcaacaggaaugcgaaauguaccagagaaacaaacuagaggcauauuuggcgcaauagcggguuucauagaaaaugguugggagggaaugguggaugguugguacgguuucaggcaucaaaauucugagggaagaggacaagcagcagaucucaaaagcacucaagcagcaaucgaucaaaucaaugggaagcugaaucgauugaucgggaaaaccaacgagaaauuccaucagauugaaaaagaauucucagaagucgaagggagaauucaggaccuugagaaauauguugaggacacuaaaauagaucucuggucauacaacgcggagcuucuuguugcccuggagaaccaacauacaauugaucuaacugacucagaaaugaacaaacuguuugaaaaaacaaagaagcaacugagggaaaaugcugaggauaugggcaaugguuguuucaaaauauaccacaaaugugacaaugccugcauaggaucaaucagaaauggaacuuauaaccacgauguauacagagaugaagcauuaaacaaccgguuccagaucaagggaguugagcugaagucaggguacaaagauuggauccuauggauuuccuuugccauaucauguuuuuugcuuuguguugcuuuguugggguucaucaugugggccugccaaaagggcaacauuaggugcaacauuugcauuuga

SEQ ID NO: 41469 - RNA, 1701 nt, Artificial Sequence
  derived and/or modified CDS sequence (wt) from hemagglutinin__InfluenzaA__AFN19443
augaagacuaucauugcuuugagcuacauucuaugucugguuuucgcucaaaaacuuccuggaaaugacaacagcacggcaacgcugugccuugggcaccaugcaguaccaaacggaacgauagugaaaacaaucacgaaugaccaaauugaaguuacuaaugcuacugagcugguucagaauuccucaauaggugaaauaugcgacaguccucaucagauccuugauggagaaaacugcacacuaauagaugcucuauugggagacccucagugugauggcuuccaaaauaagaaaugggaccuuuuuguugaacgaagcaaagccuacagcaacuguuacccuuaugaugugccggauuaugccucccuuaggucacuaguugccucauccggcacacuggaguuuaacaaugaaagcuucaauuggacuggagucacucaaaacggaacaaguucugcuugcauaaggagaucuaauaauagcuucuuuaguagauuaaauugguugacucacuuaaacuucaaauacccagcauugaacgugacuaugccaaacaaugaacaauuugacaaauuguacauuugggggguucaccacccggguacggacaaggaccaaaucuuccuguaugcucaaucaucaggaagaaucacaguaucuaccaaaagaagccaacaagcuguaaucccgaauaucggaucuagacccaggauaaggaauaucccuagcagaauaagcaucuauuggacaauaguaaaaccgggagacauacuuuugauuaacagcacagggaaucuaauugcuccuagggguuacuucaaaauacgaagugggaaaagcucaauaaugagaucagaugcacccauuggcaaaugcaauucugaaugcaucacuccaaauggaagcauucccaaugacaaaccauuccaaaauguaaacaggaucacauacggggccugucccagauauguuaagcaaagcacucugaaauuggcaacaggaaugcgaaauguaccagagaaacaaacuagaggcauauuuggugcaauagcggguuucauagaaaaugguugggagggaaugguggaugguugguacgguuucaggcaucaaaauucugagggaagaggacaagcagcagaucucaaaagcacucaagcagcaaucgaucaaaucaaugggaagcugaaucgauugaucgggaaaaccaacgagaaauuccaucagauugaaaaagaauucucagaagucgaagggagaauucaggaccuugagaaauauguugaggacacuaaaauagaucucuggucauacaacgcggagcuucuuguugcccuggagaaucaacauacaauugaccuaacugacucagaaaugaacaaacuguuugaaaaaacaaagaagcaacugagggaaaaugcugaggauaugggcaaugguuguuucaaaauauaccacaaaugugacaaugccugcauaggaucaaucagaaauggaacuuaugaccacgauguauacagagaugaagcauuaaacaaucgguuccagaucaagggaguugagcugaagucaggguacaaagauuggauccuauggaucuccuuugccauaucauguuuuuugcuuuguguugcuuuguugggguucaucaugugggccugccaaaagggcaacauuaggugcaacauuugcauuuga

SEQ ID NO: 41470 - RNA, 1701 nt, Artificial Sequence
  derived and/or modified CDS sequence (wt) from hemagglutinin__InfluenzaA__AFN19445
augaagacuaucauugcuuugagcuacauucuaugucugguuuucgcucaaaaacuuccuggaaaugacaauagcacggcaacgcugugccuugggcaccaugcaguaccaaacggaacgauagugaaaacaaucacgaaugaccgaauugaaguuacuaaugcuacugagcugguucagaauuccucaauaggugaaauaugcgacaguccucaucagauccuugauggagaaaacugcacacuaauagaugcucuauugggagacccucagugugauggcuuccaaaauaagaaaugggaccuuuuuguugaacgaagcaaagccuacagcaacuguuacccuuaugaugugccggauuaugccucccuuaggucacuaguugccucauccggcacacuggaguuuaacaaugaaagcuucaauuggacuggagucacucaaaacggaacaaguucugcuugcauaaggagaucuaauaauaguuucuuuaguagauuaaauugguugacccacuuaaacuucaaauacccagcauugaacgugacuaugccaaacaaugaacaauuugacaaauuguacauuugggggguucaccacccggguacggacaaggaccaaaucuuccuguaugcucaaucaucaggaagaaucacaguaucuaccaaaagaagccaacaagcuguaaucccgaauaucggaucuagacccagaauaaggaauaucccuagcagaauaagcaucuauuggacaauaguaaaaccgggagacauacuuuugauuaacagcacagggaaucuaauugcuccuagggguuacuucaaaauacgaagugggaaaagcucaauaaugagaucagaugcacccauuggcaaaugcaagucugaaugcaucacuccaaauggaagcauuccuaaugacaaaccauuccaaaauguaaacaggaucacauacggggccugucccagauauguuaagcaaagcacucugagauuggcaacaggaaugcgaaauguaccagagaaacaaacuagaggcauauuuggcgcaauagcggguuucauagaaaaugguugggagggaaugguggaugguugguacgguuucaggcaucaaaauucugagggaagaggacaagcagcagaucucaaaagcacucaagcagcaaucgaucaaaucaaugggaagcugaaucgauugaucgggaaaaccaacgagaaauuccaucagauugaaaaagaauucucagaaguagaagggagaauucaggaccuugagaaauauguugaggacacuaaaauagaucucuggucauacaacgcggagcuucuuguugcccuggagaaccaacauacaauugaucuaacugacucagaaaugaacaaacuguuugaaaaaacaaagaagcaacugagggaaaaugcugaggauaugggcaaugguuguuucaaaauauaccacaaaugugacaaugccugcauaggaucaaucagaaauggaacuuaugaccacgauguauacagagaugaagcauuaaacaaccgguuccagaucaagggaguugagcugaagucaggguacaaagauuggauccuauggauuuccuuugccauaucauguuuuuugcuuuguguugcuuuguugggguucaucaugugggccugccaaaagggcaacauuaggugcaacauuugcauuuga

SEQ ID NO: 41471 - RNA, 1701 nt, Artificial Sequence
  derived and/or modified CDS sequence (wt) from hemagglutinin__InfluenzaA__AFN19447
augaagacuaucauugcuuugagcuacauucuaugucugguuuucgcucaaaaacuuccuggaaaugacaauagcacggcaacgcugugccuugggcaccaugcaguaccaaacggaacgauagugaaaacaaucacgaaugaccgaauugaaguuacuaaugcuacugagcugguucagaauuccucaauaggugaaauaugcgacaguccucaucagauccuugauggagaaaacugcacacuaauagaugcucuauugggagacccucagugugauggcuuccaaaauaagaaaugggaccuuuuuguugaacgaagcaaagccuacagcaacuguuacccuuaugaugugccggauuaugccucccuuaggucacuaguugccucauccggcacacuggaguuuaacaaugaaagcuucaauuggacuggagucacucaaaacggaacaaguucugcuugcauaaggagaucuaauaauaguuucuuuaguagauuaaauugguugacccacuuaaacuucaaauacccagcauugaacgugacuaugccaaacaaugaacaauuugacaaauuguacauuugggggguucaccacccggguacggacaaggaccaaaucuuccuguaugcucaaucaucaggaagaaucacaguaucuaccaaaagaagccaacaagcuguaaucccgaauaucggaucuagacccagaauaaggaauaucccuagcagaauaagcaucuauuggacaauaguaaaaccgggagacauacuuuugauuaacagcacagggaaucuaauugcuccuagggguuacuucaaaauacgaagugggaaaagcucaauaaugagaucagaugcacccauuggcaaaugcaagucugaaugcaucacuccaaauggaagcauucccaaugacaaaccauuccaaaauguaaacaggaucacauacggggccugucccagauauguuaagcaaagcacucugaaauuggcaacaggaaugcgaaauguaccagagaaacaaacuagaggcauauuuggcgcaauagcggguuucauagaaaaugguugggagggaaugguggaugguugguacgguuucaggcaucaaaauucugagggaagaggacaagcagcagaucucaaaagcacucaagcagcaaucgaucaaaucaaugggaagcugaaucgauugaucgggaaaaccaacgagaaauuccaucagauugaaaaagaauucucagaaguagaagggagaauucaggaccuugagaaauauguugaggacacuaaaauagaucucuggucauacaacgcggagcuucuuguugcccuggagaaccaacauacaauugaucuaacugacucagaaaugaacaaacuguuugaaaaaacaaagaagcaacugagggaaaaugcugaggauaugggcaaugguuguuucaaaauauaccacaaaugugacaaugccugcauaggaucaaucagaaauggaacuuaugaccacgauguauacagagaugaagcauuaaacaaccgguuccagaucaagggaguugagcugaagucaggguacaaagauuggauccuauggauuuccuuugccauaucauguuuuuugcuuuguguugcuuuguugggguucaucaugugggccugccaaaagggcaacauuaggugcaacauuugcauuuga

SEQ ID NO: 41472 - RNA, 1701 nt, Artificial Sequence
  derived and/or modified CDS sequence (wt) from hemagglutinin__InfluenzaA__AFN19451
augaagacuaucauugcuuugagcuacauucuaugucugguuuucgcucaaaaacuuccuggaaaugacaacagcacggcaacgcugugccuugggcaccaugcaguaccaaacggaacgauagugaaaacaaucacgaaugaccaaauugaaguuacuaaugcuacugagcugguucagaauuccucaauaggugaaauaugcgacaguccucaucagauccuugauggagaaaacugcacacuaauagaugcucuauugggagacccucagugugauggcuuccaaaauaagaaaugggaccuuuuuguugaacgaagcaaagccuacagcaacuguuacccuuaugaugugccggauuaugccucccuuaggucacuaguugccucauccggcacacuggaguuuaacaaugaaagcuucaauuggacuggagucacucaaaacggaacaaguucugcuugcauaaggagaucuaauaguaguuucuuuaguagauugaauugguugacccacuuaaacuucaaauacccagcauugaacgugacuaugccaaacaaugaacaauuugacaaauuguacauuugggggguucaccacccggguacggacaaggaccaaaucuuccuguaugcucaaucaucaggaagaaucacaguaucuaccaaaagaagccaacaagcuguaaucccgaauaucggaucuagacccagaauaagaaauaucccuagcagaauaagcaucuauuggacaauaguaaaaccgggagacauacuuuugauuaacagcacagggaaucuaauugcuccuagggguuacuucaaaauacgaagugggaaaagcucaauaaugagaucagaugcacccauuggcaaaugcaauucugaaugcaucacuccaaauggaagcauucccaaugacaaaccauuccaaaauguaaacaggaucacauacggggccugucccagauauguuaagcaaagcacucugaaauuggcaacaggaaugcgaaauguaccagagaaacaaacuagaggcauauuuggcgcaauagcggguuucauagaaaaugguugggagggaaugguggaugguugguacgguuucaggcaucaaaauucugagggaagaggacaagcagcagaucucaaaagcacucaagcagcaaucgaucaaaucaaugggaagcugaaucgauugaucgggaaaaccaacgagaaauuccaucagauugaaaaagaauucucagaagucgaagggagaauucaggaccuugagaaauauguugaggacacuaaaauagaucucuggucauacaacgcggagcuucuuguugcccuggagaaccaacauacaauugaucuaacugacucagaaaugaacaaacuguuugaaaaaacaaagaagcaacugagggaaaaugcugaggauaugggcaaugguuguuucaaaauauaccacaaaugugacaaugccugcauaggaucaaucagaaauggaacuuaugaccacgauguauacagagaugaagcauuaaacaaccgguuccagaucaauggaguugagcugaagucaggguacaaagauuggauccuauggauuucauuugccauaucauguuuuuugcuuuguguugcuuuguugggguucaucaugugggccugccaaaagggcaacauuaggugcaacauuugcauuuga

SEQ ID NO: 41473 - RNA, 1701 nt, Artificial Sequence
  derived and/or modified CDS sequence (wt) from hemagglutinin__InfluenzaA__AFN19453
augaagacuaucauugcuuugagcuacauucuaugucugguuuucgcucaaaaacuuccuggaaaugacaacagcacggcaacgcugugccuugggcaccaugcaguaccaaacggaacgauagugaaaacaaucacgaaugaccaaauugaaguuacuaaugcuacggagcugguucagaauuccucaauaggugaaauaugcgacaguccucaucagauccuugauggagaaaacugcacacuaauagaugcucuauugggagacccucagugugauggcuuccaaaauaagaaaugggaccuuuuuguugaacgaagcaaagccuacagcaacuguuacccuuaugaugugccggauuaugccucccuuaggucacuaguugccucauccggcacacuggaguuuaacaaugaaagcuucaauuggacuggagucacucaaaacggaacaaguucugcuugcauaaggagaucuaauaguaguuucuuuaguagauugaauugguugacccacuuaaacuucaaauacccagcauugaacgugacuaugccaaacaaugaacaauuugacaaauuguacauuugggggguucaccacccggguacggacaaggaccaaaucuuccuguaugcucaaucaucaggaagaaucacaguaucuaccaaaagaagccaacaagcuguaaucccgaauaucggaucuagacccagaauaagaaauaucccuagcagaauaagcaucuauuggacaauaguaaaaccgggagacauacuuuugauuaacagcacagggaaucuaauugcuccuagggguuacuucaaaauacgaagugggaaaagcucaauaaugagaucagaugcacccauuggcaagugcaauucugaaugcaucacuccaaauggaagcauucccaaugacaaaccauuccaaaauguaaacaggaucacauacggggccugucccagauauguuaagcaaagcacucugaaauuggcaacaggaaugcgaaauguaccagagaaacaaacuagaggcauauuuggcgcaauagcggguuucauagaaaaugguugggagggaaugguggaugguugguacgguuucaggcaucaaaauucugagggaagaggacaagcagcagaucucaaaagcacucaagcagcaaucgaucaaaucaaugggaagcugaaucgauugaucgggaaaaccaacgagaaauuccaucagauugaaaaagaauucucagaagucgaagggagaauucaggaccuugagaaauauguugaggacacuaaaauagaucucuggucauacaacgcggagcuucuuguugcccuggagaaccaacauacaauugaucuaacugacucagaaaugaacaaacuguuugaaaaaacaaagaagcaacugagggaaaaugcugaggauaugggcaaugguuguuucaaaauauaccacaaaugugacaaugccugcauaggaucaaucagaaauggaacuuaugaccacgauguauacagagaugaagcauuaaacaaccgguuccaggucaagggaguugagcugaagucaggguacaaagauuggauccuauggauuuccuuugccauaucauguuuuuugcuuuguguugcuuuguugggguucaucaugugggccugccaaaagggcaacauuaggugcaacauuugcauuuga

SEQ ID NO: 41474 - RNA, 1701 nt, Artificial Sequence
  derived and/or modified CDS sequence (wt) from hemagglutinin__InfluenzaA__AFN19455
augaagacuaucauugcuuugagcuacauucuaugucugguuuucgcucaaaaacuuccuggaaaugacaauagcacggcaacgcugugccuugggcaccaugcaguaccaaacggaacgauagugaaaacaaucacgaaugaccgaauugaaguuacuaaugcuacugagcugguucagaauuccucaauaggugaaauaugcgacaguccucaucagauccuugauggagaaaacugcacacuaauagaugcucuauugggagacccucagugugauggcuuccaaaauaagaaaugggaccuuuuuguugaacgaagcaaagccuacagcaacuguuacccuuacgaugugccggauuaugccucccuuaggucacuaguugccucauccggaacacuggaguuuaacaaugaaagcuucaauuggacuggagucacucaaaacggaacaaguucugcuugcauaaggagaucuaauaauaguuucuuuaguagauuaaauugguugacccacuuaaacuucaaauacccagcauugaacgugacuaugccaaacaaugaacaauuugacaaauuguacauuugggggguucaccacccggguacggacaaggaccaaaucuuccuguaugcucaaucaucaggaagaaucacaguaucuaccaaaagaagccaacaagcuguaaucccgaauaucggaucuagacccagaauaaggaauaucccuagcagaauaagcaucuauuggacaauaguaaaaccgggagacauacuuuugauuaacagcacagggaaucuaauugcuccuagggguuacuucaaaauacgaagugggaaaagcucaauaaugagaucagaugcacccauuggcaaaugcaagucugaaugcaucacuccaaauggaagcauucccaaugacaaaccauuccaaaauguaaacaggaucacauacggggccugucccagauauguuaagcaaagcacucugaaauuggcaacaggaaugcgaaauguaccagagaaacaaacuagaggcauauuuggcgcaauagcggguuucauagaaaaugguugggagggaaugguggaugguugguacgguuucaggcaucaaaauucugagggaagaggacaagcagcagaucucaaaagcacucaagcagcaaucgaucaaaucaaugggaagcugaaucgauugaucgggaaaaccaacgagaaauuccaucagauugaaaaagaauucucagaaguagaagggagaauucaggaccuugagaaauauguugaggacacuaaaauagaucucuggucauacaacgcggagcuucuuguugcccuggagaaccaacauacaauugaucuaacugacucagaaaugaacaaacuguuugaaaaaacaaagaagcaacugagggaaaaugcugaggauaugggcaaugguuguuucaaaauauaccacaaaugugacaaugccugcauaggaucaaucagaaauggaacuuaugaccacgauguauacagagaugaagcauuaaacaaccgguuccagaucaagggaguugagcugaagucaggguacaaagauuggauccuauggauuuccuuugccauaucauguuuuuugcuuuguguugcuuuguugggguucaucaugugggccugccaaaagggcaacauuaggugcaacauuugcauuuga

SEQ ID NO: 41475 - RNA, 1701 nt, Artificial Sequence
  derived and/or modified CDS sequence (wt) from hemagglutinin__InfluenzaA__AFN19457
augaagacuaucauugcuuugagcuacauucuaugucugguuuucgcucaaaaacuuccuggaaaugacaacagcacggcaacgcugugccuugggcaccaugcaguaccaaacggaacgauagugaaaacaaucacgaaugaccaaauugaaguuacuaaugcuacugagcugguucagaguuccucaacaggugaaauaugcgacaguccucaucagauccuugauggagaaaacugcacacuaauagaugcucuauugggagacccacagugugauggcuuccaaaauaagaagugggaccuuuuuguugaacgaagcaaagccuacagcaacuguuacccuuaugaugugccggauuaugccucccuuaggucacuaguugccucauccggcacacuggaguuuaacaaugaaagcuucaauuggacuggagucacucaaaacggaacaagcucugcuugcauaaggagaucuaauaguaguuucuuuaguagauugaauugguugacccacuuaaacuucaaauacccagcauugaacgugacuaugccaaacaaugaacaauuugacaaauuguacauuugggggguucaccacccggguacggacaaggaccaaaucuuccuguaugcucaaucaucaggaagaaucacaguaucuaccaaaagaagccaacaagcuguaaucccgaauaucggaucuagacccagaauaaggaauaucccuagcagaauaagcaucuauuggacaauaguaaaaccgggagacauacuuuugauuaacagcacagggaaucuaauugcuccuagggguuacuucaaaauacggagugggaaaagcucaauaaugagaucagaugcacccauuggcaaaugcaauucugaaugcaucacuccaaauggaagcauucccaaugacaaaccauuccaaaauguaaacaggaucacauacggggccugucccagauauguuaagcaaagcacucugaaauuggcaacaggaaugcgaaauguaccagagaaacaaacuagaggcauauuuggcgcaauagcggguuucauagaaaaugguugggagggaaugguggaugguugguacgguuucaggcaucaaaauucugagggaagaggacaagcagcagaucucaaaagcacucaagcagcaaucgaucaaaucaaugggaagcugaaucgauugaucgggaaaaccaacgagaaauuccaucagauugaaaaagaauucucagaagucgaagggagaauucaggaccuugagaaauauguugaggacacuaaaauagaucucuggucauacaacgcggagcuucuuguugcccuggagaaccaacauacaauugaucuaacugacucagaaaugaacaaacuguuugaaaaaacaaagaagcaacugagggaaaaugcugaggauaugggcaaugguuguuucaaaauauaccacaaaugugacaaugccugcauaggaucaaucagaaauggaacuuauaaccacgauguauacagagaugaagcauuaaacaaccgguuccagaucaagggaguugagcugaagucaggguacaaagauuggauccuauggauuuccuuugccauaucauguuuuuugcuuuguguugcuuuguugggguucaucaugugggccugccaaaagggcaacauuaggugcaacauuugcauuuga

SEQ ID NO: 41476 - RNA, 1701 nt, Artificial Sequence
  derived and/or modified CDS sequence (wt) from hemagglutinin__InfluenzaA__AFN19459
augaagacuaucauugcuuugagcuacauucuaugucugguuuucgcucaaaaacuuccuggaaaugacaacagcacggcaacgcugugccuugggcaccaugcaguaccaaacggaacgauagugaaaacaaucacgaaugaccaaauugaaguuacuaaugcuacugagcugguucagaguuccucaacaggugaaauaugcgacaguccucaucagauccuugauggagaaaacugcacacuaauagaugcucuauugggagacccucagugugauggcuuccaaaauaagaagugggaccuuuuuguugaacgaagcaaagccuacagcaacuguuacccuuaugaugugccggauuaugccucccuuaggucacuaguugccucauccggcacacuggaguuuaacaaugaaagcuucaauuggacuggagucacucaaaacggaacaagcucugcuugcauaaggagaucuaauaguaguuucuuuaguagauugaauugguugacccacuuaaacuucaaauacccagcauugaacgugacuaugccaaacaaugaacaauuugacaaauuguacauuugggggguucaccacccggguacggacaaggaccaaaucuuccuguaugcucaaucaucaggaagaaucacaguaucuaccaaaagaagccaacaagcuguaaucccgaauaucggaucuagacccagaauaaggaauaucccuagcagaauaagcaucuauuggacaauaguaaaaccgggagacauacuuuugauuaacagcacagggaaucuaauugcuccuagggguuacuucaaaauacgaagugggaaaagcucaauaaugagaucagaugcacccauuggcaaaugcaauucugaaugcaucacuccaaauggaagcauucccaaugacaaaccauuccaaaauguaaacaggaucacauacggggccugucccagauauguuaagcaaagcacucugaaauuggcaacaggaaugcgaaauguaccagagaaacaaacuagaggcauauuuggcgcaauagcggguuucauagaaaaugguugggagggaaugguggaugguugguacgguuucaggcaucaaaauucugaaggaagaggacaagcagcagaucucaaaagcacucaagcagcaaucgaucaaaucaaugggaagcugaaucgauugaucgggaaaaccaacgagaaauuccaucagauugaaaaagaauucucagaagucgaagggagaauucaggaccuugagaaauauguugaggacacuaaaauagaucucuggucauacaacgcggagcuucuuguugcccuggagaaccaacauacaauugaucuaacugacucagaaaugaacaaacuguuugaaaaaacaaagaagcaacugagggaaaaugcugaggauaugggcaaugguuguuucaaaauauaccacaaaugugacaaugccugcauaggaucaaucagaaauggaacuuauaaccacgauguauacagagaugaagcauuaaacaaccgguuccagaucaagggaguugagcugaagucaggguacaaagauuggauccuauggauuuccuuugccauaucauguuuuuugcuuuguguugcuuuguugggguucaucaugugggccugccaaaagggcaacauuaggugcaacauuugcauuuga

SEQ ID NO: 41477 - RNA, 1701 nt, Artificial Sequence
  derived and/or modified CDS sequence (wt) from hemagglutinin__InfluenzaA__AFN19461
augaagacuaucauugcuuugagcuacauucuaugucugguuuucgcucaaaaacuuccuggaaaugacaacagcacggcaacgcugugccuugggcaccaugcaguaccaaacggaacgauagugaaaacaaucacgaaugaccaaauugaaguuacuaaugcuacugagcugguucagaauuccucaauaggugaaauaugcgacagcccucaucagauccuugauggagaaaacugcacacuaauagaugcucuauugggagacccucagugugauggcuuccaaaauaagaaaugggaccuuuuuguugaacgaagcaaagccuacagcaacuguuacccuuaugaugugccggauuaugccucccuuaggucacuaguugccucauccggcacacuggaguuuaacaaugaaagcuucaauuggacuggagucacucaaaacggaacaaguucugcuugcauaaggagaucuaauaauagcuucuuuaguagauuaaauugguugacccacuuaaacuucaaauacccagcauugaacgugacuaugccaaacaaugaacaauuugacaaauuguacauuugggggguccaccacccggguacggacaaggaccaaaucuuccuguaugcucaaucaucaggaagaaucacaguaucuaccaaaagaagccaacaagcuguaaucccgaauaucggaucuagacccagaauaaggaauaucccuagcagaauaagcaucuauuggacaauaguaaaaccgggagacauacuuuugauuaacagcacagggaaucuaauugcuccuagggguuacuucaaaauacgaagugggaaaagcucaauaaugagaucagaugcacccauuggcaaaugcaauucugaaugcaucacuccaaauggaagcauucccaaugacaaaccauuccaaaauguaaacaggaucacauacggggccugucccagauauguuaagcaaagcacucugaaauuggcaacaggaaugcgaaauguaccagagaaacaaacuagaggcauauuuggugcaauagcggguuucauagaaaaugguugggagggaaugguggaugguugguacgguuucaggcaucaaaauucugagggaagaggacaagcagcagaucucaaaagcacucaagcagcaaucgaucaaaucaaugggaagcugaaucgauugaucgggaaaaccaacgagaaauuccaucagauugaaaaagaauucucagaggucgaagggagaauucaggaccuugagaaauauguugaggacacuaaaauagaucucuggucauacaacgcggagcuucuuguugcccuggagaaccaacauacaauugaucuaacugacucagaaaugaacaaacuguuugaaaaaacaaagaagcaacugagggaaaaugcugaggauaugggcaaugguuguuucaaaauauaccacaaaugugacaaugccugcauaggaucaaucagaaauggaacuuaugaccacgauguauacagagaugaagcauuaaacaaccgguuccagaucaagggaguugagcugaagucaggguacaaagauuggauccuauggauuuccuuugccauaucauguuuuuugcuuuguguugcuuuguugggguucaucaugugggccugccaaaagggcaacauuaggugcaacauuugcauuuga

SEQ ID NO: 41478 - RNA, 1701 nt, Artificial Sequence
  derived and/or modified CDS sequence (wt) from hemagglutinin__InfluenzaA__AFN19465
augaagacuaucauugcuuugagcuacauucuaugucugguuuucgcucaaaaacuuccuggaaaugacaacagcacggcaacgcugugccuugggcaccaugcaguaccaaacggaacgauagugaaaacaaucacgaaugaccaaauugaaguuacuaaugcuacugagcugguucagaguuccucaacaggugaaauaugcgacaguccucaucagauccuugauggagaaaacugcacacuaauagaugcucuauugggagacccucagugugauggcuuccaaaauaagaagugggaccuuuuuguugaacgaagcaaagccuacagcaacuguuacccuuaugaugugccggauuaugccucccuuaggucacuaguugccucauccggcacacuggaguuuaacaaugaaagcuucaauuggacuggagucacucaaaacggaacaagcucugcuugcauaaggagaucuaauaguaguuucuuuaguagauugaauugguugacccacuuaaacuucaaauacccagcauugaacgugacuaugccaaacaaugaacaauuugacaaauuguacauuugggggguucaccacccgggcacggacaaggaccaaaucuuccuguaugcucaaucaucaggaagaaucacaguaucuaccaaaagaagccaacaagcuguaaucccgaauaucggaucuagacccagaauaaggaauaucccuagcagaauaagcaucuauuggacaauaguaaaaccgggagacauacuuuugauuaacagcacagggaaucuaauugcuccuagggguuacuucaaaauacgaagugggaaaagcucaauaaugagaucagaugcacccauuggcaaaugcaauucugaaugcaucacuccaaauggaagcauucccaaugacaaaccauuccaaaauguaaacaggaucacauacggggccugucccagauauguuaagcaaagcacucugaaauuggcaacaggaaugcgaaauguaccagagaaacaaacuagaggcauauuuggcgcaauagcggguuucauagaaaaugguugggagggaaugguggaugguugguacgguuucaggcaucaaaauucugagggaagaggacaagcagcagaucucaaaagcacucaagcagcaaucgaucaaaucaaugggaagcugaaucgauugaucgggaaaaccaacgagaaauuccaucagauugaaaaagaauucucagaagucgaagggagaauucaggaccuugagaaauauguugaggacacuaaaauagaucucuggucauacaacgcggagcuucuuguugcccuggagaaccaacauacaauugaucuaacugacucagaaaugaacaaacuguuugaaaaaacaaagaagcaacugagggaaaaugcugaggauauaggcaaugguuguuucaaaauauaccacaaaugugacaaugccugcauaggaucaaucagaaauggaacuuauaaccacgauguauacagagaugaagcauuaaacaaccgguuccagaucaagggaguugagcugaagucaggguacaaagauuggauccuauggauuuccuuugccauaucauguuuuuugcuuuguauugcuuuguugggguucaucaugugggccugccaaaagggcaacauuaggugcaacauuugcauuuga

SEQ ID NO: 41479 - RNA, 1701 nt, Artificial Sequence
  derived and/or modified CDS sequence (wt) from hemagglutinin__InfluenzaA__AFN19467
augaagacuaucauugcuuugagcuacauucuaugucugguuuucgcucaaaaacuuccuggaaaugacaauagcacggcaacgcugugccuugggcaccaugcaguaccaaacggaacgauagugaaaacaaucacgaaugaccgaauugaaguuacuaaugcuacugagcugguucagaauuccucaauaggugaaauaugcgacaguccucaucagauccuugauggagaaaacugcacacuaauagaugcucuauugggagacccucagugugauggcuuccaaaauaagaaaugggaccuuuuuguugaacgaagcaaagccuacagcaacuguuacccuuaugaugugccggauuaugccucccuuaggucacuaguugccucauccggcacacuggaguuuaacaaugaaagcuucaauuggacuggagucacucaaaacggaacaaguucugcuugcauaaggagaucuaauaauaguuucuuuaguagauuaaauugguugacccacuuaaacuucaaauacccagcauugaacgugacuaugccaaacaaugaacaauuugacaaauuguacauuugggggguucaccacccggguacggacaaggaccaaaucuuccuguaugcucaaucaucaggaagaaucacaguaucuaccaaaagaagccaacaagcuguaaucccgaauaucggaucuagacccagaauaaggaauaucccuagcagaauaagcaucuauuggacaauaguaaaaccgggagacauacuuuugauuaacagcacagggaaucuaauugcuccuagggguuacuucaaaauacgaagugggaaaagcucaauaaugagaucagaugcacccauuggcaaaugcaagucugaaugcaucacuccaaauggaagcauucccaaugacaaaccauuccaaaauguaaacagaaucacauacggggccugucccagauauguuaagcaaagcacucugaaauuggcaacaggaaugcgaaauguaccagagaaacaaacuagaggcauauuuggcgcaauagcggguuucauagaaaaugguugggagggaaugguggaugguugguacgguuucaggcaucaaaauucugagggaagaggacaagcagcagaucucaaaagcacucaagcagcaaucgaucaaaucaaugggaagcugaaucgauugaucgggaaaaccaacgagaaauuccaucagauugaaaaagaauucucagaaguagaagggagaauucaggaccuugagaaauauguugaggacacuaaaauagaucucuggucauacaacgcggagcuucuuguugcccuggagaaccaacauacaauugaucuaacugacucagaaaugaacaaacuguuugaaaaaacaaagaagcaacugagggaaaaugcugaggauaugggcaaugguuguuucaaaauauaccacaaaugugacaaugccugcauaggaucaaucagaaauggaacuuaugaccacgauguauacagagaugaagcauuaaacaaccgguuccagaucaagggaguugagcugaagucaggguacaaagauuggauccuauggauuuccuuugccauaucauguuuuuugcuuuguguugcuuuguugggguucaucaugugggccugccaaaagggcaacauuaggugcaacauuugcauuuga

SEQ ID NO: 41480 - RNA, 1701 nt, Artificial Sequence; identical to SEQ ID NO: 41473
  derived and/or modified CDS sequence (wt) from hemagglutinin__InfluenzaA__AFN19469

SEQ ID NO: 41481 - RNA, 1701 nt, Artificial Sequence
  derived and/or modified CDS sequence (wt) from hemagglutinin__InfluenzaA__AFN19471
augaagacuaucauugcuuugagcuacauucuaugucugguuuucgcucaaaaacuuccuggaaaugacaacagcacggcaacgcugugccuugggcaccaugcaguaccaaacggaacgauagugaaaacaaucacgaaugaccaaauugaaguuacuaaugcuacugagcugguucagaguuccucaacaggugaaauaugcgacaguccucaucagauccuugauggagaaaacugcacacuaauagaugcucuauugggagacccucagugugauggcuuccaaaauaagaagugggaccuuuuuguugaacgaagcaaagccuacagcaacuguuacccuuaugaugugccggauuaugccucccuuaggucacuaguugccucauccggcacacuggaguuuaacaaugaaagcuucaauuggacuggagucacucaaaacggaacaagcucugcuugcauaaggagaucuaauaguaguuucuuuaguagauugaauugguugacccacuuaaacuucaaauacccagcguugaacgugacuaugccaaacaaugaacaauuugacaaauuguacauuugggggguucaccacccggguacggacaaggaccaaaucuuccuguaugcucaaucaucaggaagaaucacaguaucuaccaaaagaagccaacaagcuguaaucccgaauaucggaucuagacccagaauaaggaauaucccuagcagaauaagcaucuauuggacaauaguaaaaccgggagacauacuuuugauuaacagcacagggaaucuaauugcuccuagggguuacuucaaaauacgaagugggaaaagcucaauaaugagaucagaugcacccauuggcaaaugcaauucugaaugcaucacuccaaauggaagcauucccaaugacaaaccauuccaaaauguaaacaggaucacauacggggccugucccagauauguuaagcaaagcacucugaaauuggcaacaggaaugcgaaauguaccagagaaacaaacuagaggcauauuuggcgcaauagcggguuucauagaaaaugguugggagggaaugguggaugguugguacgguuucaggcaucaaaauucugagggaagaggacaagcagcagaucucaaaagcacucaagcagcaaucgaucaaaucaaugggaagcugaaucgauugaucgggaaaaccaacgagaaauuccaucagauugaaaaagaauucucagaagucgaagggagaauucaggaccuugagaaauauguugaggacacuaaaauagaucucuggucauacaacgcggagcuucuuguugcccuggagaaccaacauacaauugaucuaacugacucagaaaugaacaaacuguuugaaaaaacaaagaagcaacugagggaaaaugcugaggauaugggcaaugguuguuucaaaauauaccacaaaugugacaaugccugcauaggaucaaucagaaauggaacuuauaaccacgauguauacagagaugaagcauuaaacaaccgguuccagaucaagggaguugagcugaagucaggguacaaagauuggauccuauggauuuccuuugccauaucauguuuuuugcuuuguguugcuuuguugggguucaucaugugggccugccaaaagggcaacauuaggugcaacauuugcauuuga

SEQ ID NO: 41482 - RNA, 1701 nt, Artificial Sequence
  derived and/or modified CDS sequence (wt) from hemagglutinin__InfluenzaA__AFN19473
augaagacuaucauugcuuugagcuacauucuaugucugguuuucgcucaaaaacuuccuggaaaugacaacagcacggcaacgcugugccuugggcaccaugcaguaccaaacggaacgauagugaaaacaaucacgaaugaccaaauugaaguuacuaaugcuacugagcugguucagaguuccucaacaggugaaauaugcggcaguccucaucagauccuugauggagaaaacugcacacuaauagaugcucuauugggagacccucagugugauggcuuccaaaauaagaagugggaccuuuuuguugaacgaagcaaagccuacagcaacuguuacccuuaugaugugccggauuaugccucccuuaggucacuaguugccucauccggcacacuggaguuuaacaaugaaagcuucaauuggacuggagucacucaaaacggaacaagcucugcuugcauaaggagaucuaauaguaguuucuuuaguagauugaauugguugacccacuuaaacuucaaauacccagcauugaacgugacuaugccaaacaaugaacaauuugacaaauuguacauuugggggguucaccacccggguacggacaaggaccaaaucuuccuguaugcucaaucaucaggaagaaucacaguaucuaccaaaagaagccaacaagcuguaaucccgaauaucggaucuagacccagaauaaggaauaucccuagcagaauaagcaucuauuggacaaucguaaaaccgggagacauacuuuugauuaacagcacagggaaucuaauugcuccuagggguuacuucaaaauacgaagugggaaaagcucaauaaugagaucagaugcacccauuggcaaaugcaauucugaaugcaucacuccaaauggaagcauucccaaugauaaaccauuccaaaauguaaacaggaucacauacggggccugucccagauauguuaagcaaagcacucugaaauuggcaacaggaaugcgaaauguaccagagaaacaaacuagaggcauauuuggcgcaauagcggguuucauagaaaaugguugggagggaaugguggaugguugguacgguuucaggcaucaaaauucugagggaagaggacaagcagcagaucucaaaagcacucaagcagcaaucgaucaaaucaaugggaagcugaaucgauugaucgggaaaaccaacgagaaauuccaucagauugaaaaagaauucucagaagucgaagggagaauucaggaccuugagaaauauguugaggacacuaaaauagaucucuggucauacaacgcagagcuucuuguugcccuggagaaccaacauacaauugaucuaacugacucagaaaugaacaaacuguuugaaaaaacaaagaagcaacugagggaaaaugcugaggauaugggcaaugguuguuucaaaauauaccacaaaugugacaaugccugcauaggaucaaucagaaauggaacuuauaaccacgauguauacagagaugaagcauuaaacaaccgguuccagaucaagggaguugagcugaagucaggguacaaagauuggauccuauggauuuccuuugccauaucauguuuuuugcuuuguguugcuuuguugggguucaucaugugggccugccaaaagggcaacauuaggugcaacauuugcauuuga

SEQ ID NO: 41483 - RNA, 1701 nt, Artificial Sequence
  derived and/or modified CDS sequence (wt) from hemagglutinin__InfluenzaA__AFN19475
augaagacuaucauugcuuugagcuacauucuaugucugguuuucgcucaaaaacuuccuggaaaugacaauagcacggcaacgcugugccuugggcaccaugcaguaccaaacggaacgauagugaaaacaaucacgaaugaccgaauugaaguuacuaaugcuacugagcugguucagaauuccucaauaggugaaauaugcgacaguccucaucagauccuugauggagaaaacugcacacuaauagaugcucuauugggagacccucagugugauggcuuccaaaauaagaaaugggaccuuuuuguugaacgaagcaaagccuacagcaacuguuacccuuaugaugugccggauuaugccucccuuaggucacuaguugccucauccggcacacuggaguuuaacaaugaaagcuucaauuggacuggagucacucaaaacggaacaaguucugcuugcauaaggagaucuaauaauaguuucuuuaguagauuaaauugguugacccacuuaaacuucaaauacccagcauugaacgugacuaugccaaacaaugaacaauuugacaaauuguacauuugggggguucaccacccggguacggacaaggaccaaaucuuccuguaugcucaaucaucaggaagaaucacaguaucuaccaaaagaagccaacaagcuguaaucccgaauaucggaucuagacccagaauaaggaauaucccuagcagaauaagcaucuauuggacaauaguaaaaccgggagacauacuuuugauuaacagcacagggaaucuaauugcuccuagggguuacuucaaaauacgaagugggaaaagcucaauaaugagaucagaugcacccauuggcaaaugcaagucugaaugcaucacuccaaauggaagcauucccaaugacaaaccauuccaaaauguaaacaggaucacauacggggccugucccagauauguuaagcaaagcacucugaaauuggcaacaggaaugcgaaauguaccagagaaacaaacuagaggcauauuuggcgcaauagcggguuucauagaaaaugguugggagggaaugguggaugguugguacgguuucaggcaucaaaauucugagggaagaggacaagcagcagaucucaaaagcacucaagcagcaaucgaucaaaucaaugggaaacugaaucgauugaucgggaaaaccaacgagaaauuccaucagauugaaaaagaauucucagaaguagaagggagaauucaggaccuugagaaauauguugaggacacuaaaauagaucucuggucauacaacgcggagcuucuuguugcccuggagaaccaacauacaauugaucuaacugacucagaaaugaacaaacuguuugaaaaaacaaagaagcaacugagggaaaaugcugaggauaugggcaaugguuguuucaaaauauaccacaaaugugacaaugccugcauaggaucaaucagaaauggaacuuaugaccacgauguauacagagaugaagcauuaaacaaccgguuccagaucaagggaguugagcugaagucaggguacaaagauuggauccuauggauuuccuuugccauaucauguuuuuugcuuuguguugcuuuguugggguucaucaugugggccugccaaaagggcaacauuaggugcaacauuugcauuuga

SEQ ID NO: 41484 - RNA, 1701 nt, Artificial Sequence
  derived and/or modified CDS sequence (wt) from hemagglutinin__InfluenzaA__AFN19477
augaagacuaucauugcuuugagcuacauucuaugucugguuuucgcucaaaaacuuccuggaaaugacaacagcacggcaacgcugugccuugggcaccaugcaguaccaaacggaacgauagugaaaacaaucacgaaugaccaaauugaaguuacuaaugcuacugagcugguucagaguuccucaacaggugaaauaugcgacaguccucaucagauacuugauggagaaaacugcacacuaauagaugcucuauugggagacccucagugugauggcuuccaaaauaagaagugggaccuuuuuguugaacgaagcaaagccuacagcaacuguuacccuuaugaugugccggauuaugccucccuuaggucacuaguugccucaucaggcacacuggaguuuaacaaugaaagcuucaauuggacuggagucacucaaaacggaacaagcucugcuugcauaaggagaucuaauaguaguuucuuuaguagauugaauugguugacccacuuaaacuucaaauacccagcauugaacgugacuaugccaaacaaugaacaauuugacaaauuguacauuugggggguucaccacccggguacggacaaggaccaaaucuuccuguaugcucaaucaucaggaagaaucacaguaucuaccaaaagaagccaacaagcuguaaucccgaauaucggaucuagacccagaauaaggaauaucccuagcagaauaagcaucuauuggacaauaguaaaaccgggagacauacuuuugauuaacagcacagggaaucuaauugcuccuagggguuacuucaaaauacgaagugggaaaagcucaauaaugagaucagaugcacccauuggcaaaugcaauucugaaugcaucacuccaaauggaagcauucccaaugacaaaccauuccaaaauguaaacaggaucacauacggggccugucccagauauguuaagcaaagcacucugaaauuggcaacaggaaugcgaaauguaccagagaaacaaacuagaggcauauuuggcgcaauagcggguuucauagaaaaugguugggagggaaugguggaugguugguacgguuucaggcaucaaaauucugagggaagaggacaagcagcagaucucaaaagcacucaagcagcaaucgaucaaaucaaugggaagcugaaucgauugaucgggaaaaccaacgagaaauuccaucagauugaaaaagaauucucagaagucgaagggagaauucaggaccuugagaaauauguugaggacacuaaaauagaucucuggucauacaacgcggagcuucuuguugcccuggagaaccaacauacaauugaucuaacugacucagaaaugaacaaacuguuugaaaaaacaaagaagcaacugagggaaaaugcugaggauaugggcaaugguuguuucaaaauauaucacaaaugugacaaugccugcauaggaucaaucagaaauggaacuuauaaccacgauguauacagagaugaagcauuaaacaaccgguuccagaucaagggaguugagcugaagucaggguacaaagauuggauccuauggauuuccuuugccauaucauguuuuuugcuuuguguugcuuuguugggguucaucaugugggccugccaaaagggcaacauuaggugcaacauuugcauuuga

SEQ ID NO: 41485 - RNA, 1701 nt, Artificial Sequence
  derived and/or modified CDS sequence (wt) from hemagglutinin__InfluenzaA__AFN19479
augaagacuaucauugcuuugagcugcauucuaugucugguuuucgcucaaaaacuuccuggaaaugacaacagcacggcaacgcugugccuugggcaccaugcaguaccaaacggaacgauagugaaaacaaucacgaaugaccaaauugaaguuacuaaugcuacugagcugguucagaauuccucaauaggugaaauaugcgacaguccucaucagauccuugauggagaaaacugcacacuaauagaugcucuauugggagacccucagugugauggcuuccaaaauaagaaaugggaccuuuuuguugaacgaagcaaagccuacagcaacuguuacccuuaugaugugccggauuaugccucccuuaggucacuaguugccucauccggcacacuggaguuuaacaaugaaagcuucaauuggacuggagucacucaaaacggaacaaguucugcuugcauaaggagaucuaauaguaguuucuuuaguagauugaauugguugacccacuuaaacuucaaauacccagcauugaacgugacuaugccaaacaaugaacaauuugacaaauuguacauuugggggguucaccacccggguacggacaaggaccaaaucuuccuguaugcucaaucaucaggaagaaucacaguaucuaccaaaagaagccaacaagcuguaaucccgaauaucggaucuagacccagaauaagaaauaucccuagcagaauaagcaucuauuggacaauaguaaaaccgggagacauacuuuugauuaacagcacagggaaucuaauugcuccuagggguuacuucaaaauacgaagugggaaaagcucaauaaugagaucagaugcacccauuggcaaaugcaauucugaaugcaucacuccaaauggaagcauucccaaugacaaaccauuccaaaauguaaacaggaucacauacggggccugucccagauauguuaagcaaagcacucugaaauuggcaacaggaaugcgaaauguaccagagaaacaaacuagaggcauauuuggcgcaauagcggguuucauagaaaaugguugggagggaaugguggaugguugguacgguuucaggcaucaaaauucugagggaagaggacaagcagcagaucucaaaaguacucaagcagcaaucgaucaaaucaaugggaagcugaaucgauugaucgggaaaaccaacgagaaauuccaucagauugaaaaagaauucucagaagucgaagggagaauucaggaccuugagaaauauguugaggacacuaaaauagaucucuggucauacaacgcggagcuucuuguugcccuggagaaccaacauacaauugaucuaacugacucagaaaugaacaaacuguuugaaaaaacaaagaagcaacugagggaaaaugcugaggauaugggcaaugguuguuucaaaauauaccacaaaugugacaaugccugcauaggaucaaucagaaauggaacuuaugaccacgauguauacagagaugaagcauuaaacaaccgguuccagaucaagggaguugagcugaagucaggguacaaagauuggauccuauggauuuccuuugccauaucauguuuuuugcuuugugucgcuuuguugggguucaucaugugggccugccaaaagggcaacauuaggugcaacauuugcauuuga

SEQ ID NO: 41486 - RNA, 1701 nt, Artificial Sequence
  derived and/or modified CDS sequence (wt) from hemagglutinin__InfluenzaA__AFN19483
augaagacuaucauugcuuugagcuacauucuaugucugguuuucgcucaaaaacuuccuggaaaugacaauagcacagcaacgcugugccuugggcaccaugcaguaccaaacggaacgauagugaaaacaaucacgaaugaccgaauugaaguuacuaaugcuacugagcugguucagaauuccucaauaggugaaauaugcgacaguccucaucagauccuugauggagaaaacugcacacuaauagaugcucuauugggagacccucagugugauggcuuccaaaauaagaaaugggaccuuuuuguugaacgaagcaaagccuacagcaacuguuacccuuaugaugugccggauuaugccucccuuaggucacuaguugccucauccggcacacuggaguuuaacaaugaaagcuucaauuggacuggagucacucaaaacggaacaaguucugcuugcauaaggagaucuaauaauaguuucuuuaguagauuaaauugguugacccacuuaaacuucaaauacccagcauugaacgugacuaugccaaacaaugaacaauuugacaaauuguacauuugggggguucaccacccggguacggacaaggaccaaaucuuccuguaugcucaaucaucaggaagaaucacaguaucuaccaaaagaagccaacaagcuguaaucccgaauaucggaucuagacccagaauaaggaauaucccuagcagaauaagcaucuauuggacaauaguaaaaccgggagacauacuuuugauuaacagcacagggaaucuaauugcuccuagggguuacuucaaaauacgaagugggaaaagcucaauaaugagaucagaugcacccauuggcaaaugcaagucugaaugcaucacuccaaauggaagcauucccaaugacaaaccauuccaaaauguaaacagaaucacauacggggccugucccagauauguuaagcaaagcacucugaaauuggcaacaggaaugcgaaauguaccagagaaacaaacuagaggcauauuuggcgcaauagcggguuucauagaaaaugguugggagggaaugguggaugguugguacgguuucaggcaucaaaauucugagggaagaggacaagcagcagaucucaaaagcacucaagcagcaaucgaucaaaucaaugggaagcugaaucgauugaucgggaaaaccaacgagaaauuccaucagauugaaaaagaauucucagaaguagaagggagaauucaggaccuugagaaauauguugaggacacuaaaauagaucucuggucauacaacgcggagcuucuuguugcccuggagaaccaacauacaauugaucuaacugacucagaaaugaacaaacuguuugaaaaaacaaagaagcaacugagggaaaaugcugaggauaugggcaaugguuguuucaaaauauaccacaaaugugacaaugccugcauaggaucaaucagaaauggaacuuaugaccacgauguauacagagaugaagcauuaaacaaccgguuccagaucaagggaguugagcugaagucaggguacaaagauuggauccuauggauuuccuuugccauaucauguuuuuugcuuuguguugcuuuguugggguucaucaugugggccugccaaaagggcaacauuaggugcaacauuugcauuuga

SEQ ID NO: 41487 - RNA, 1701 nt, Artificial Sequence
  derived and/or modified CDS sequence (wt) from hemagglutinin__InfluenzaA__AFN19485
augaagacuaucauugcuuugagcuacauucuaugucugguuuucgcucaaaaacuuccuggaaaugacaacagcacggcaacgcugugccuugggcaccaugcagugccaaacggaacgauagugaaaacaaucacgaaugaccaaauugaaguuacuaaugcuacugagcugguucagaguuccucaacaggugaaauaugcaacaguccucaucagauccuugauggagaaaacugcacacuaauagaugcucuauugggagacccucagugugauggcuuccaaaacaagaaaugggaccuuuuuguugaacgaagcaaagcccacagcaacuguuacccuuaugaugugccggauuaugccucccuuaggucacuaguugccucauccggcacacuggaguuuaacaaugaaagcuucaauuggacuggagucacucaaaacggaacaagcucugcuugcauaaggagaucuaauaauaguuucuuuaguagauugaauugguugacccacuuaaacuucaaauacccagcauugaacgugacuaugccaaacaaugaacaauuugacaaauuguacauuugggggguucaccacccggguacggacaaggaccaaaucuuccuguaugcucaagcagcaggaagaaucacaguaucuaccaaaagaagccaacaagcuguaauuccgaauaucggaucuagacccagaguaaggaauaucccuagcagaguaagcaucuauuggacaauaguaaaaccgggagacauacuuuugauuaacagcacagggaaucuaauugcuccuagggguuacuucaaaauacgaagugggaaaagcucaauaaugagaucagaugcaccuauuggcaaaugcaauucugcaugcaucacuccaaauggaagcauucccaaugacaaaccauuccaaaauguaaacaggaucacauacggggccugucccagauauguuaagcaaaacacucugaaauuggcaacaggaaugagaaauguaccagagaaacaaacuagaggcauauuuggcgcaauagcugguuucauagaaaaugguugggagggaaugguggaugguugguacgguuucaggcaucaaaauucugagggaaggggacaagcagcagaucucaaaagcacucaagcagcaaucgaucaaaucaaugggaagcugaauagauugaucgggaaaaccaacgagaaauuccaucagauugaaaaagaauucucagaagucgaagggagaauucaggaccuugagaaauauguugaggacacuaaaauagaucucuggucauacaacgcggagcuucuuguugcccuggagaaccaacacacaauugaucuaacugacucagaaaugaacaaacuguuugaaaaaacaaagaagcaacugagggaaaaugcugaggauaugggcaaugguuguuucaaaauauaccacaaaugugacaaugccugcauaggaucaaucagaaauggaacuuaugaccacgauguguacagagaugaagcauuaaacaaccgauuccagaucaagggaguugagcugaagucaggguacaaagauuggauccuauggauuuccuuugccauaucauguuuuuugcuuuguguugcuuuguugggguucaucaugugggccugccaaaaaggcaacauuaggugcaacauuugcauuuga

SEQ ID NO: 41488 - RNA, 1701 nt, Artificial Sequence
  derived and/or modified CDS sequence (wt) from hemagglutinin__InfluenzaA__AFN19487
augaagacuaucauugcuuugagcuacauucuaugucugguuuucgcucaaaaacuuccuggaaaugacaacagcacggcaacgcugugccuugggcaccaugcaguaccaaacggaacgauagugaaaacaaucacgaaugaccaaauugaaguuacuaaugcuacugagcugguucagaguuccucaacaggugaaauaugcgacaguccucaucagauccuugauggagaaaacugcacacuaauagaugcucuauugggagacccucagugugauggcuuccaaaauaagaagugggaccuuuuuguugaacgaagcaaagccuacagcaacuguuacccuuaugaugugccggauuaugccucccuuaggucacuaguugccucauccggcacacuggaguuuaacaaugaaagcuucaauuggacuggagucacucaaaacggaacaagcucugcuugcauaaggagaucuaauaguaguuucuuuaguagauugaauugguugacccacuuaaacuucaaauacccagcauugaacgugacuaugccaaacaaugaacaauuugacaaauuguacauuugggggguucaccacccggguacggacaaggaccaaaucuuccuguaugcucaaucaucaggaagaaucacaguaucuaccaaaagaagccaacaagcuguaaucccgaauaucggaucuagacccagaauaaggaauaucccuagcagaauaagcaucuauuggacaauaguaaaaccgggagacauacuuuugauuaacagcacagggaaucuaauugcuccuagggguuacuucaaaauacgaagugggaaaagcucaauaaugagaucagaugcacccauuggcaaaugcaauucugaaugcaucacuccaaauggaagcauucccaaugacaaaccauuccaaaauguaaacaggaucacauacggggccugucccagauauguuaagcaaagcacucugaaauuggcaacaggaaugcgaaauguaccagagaaacaaacuagaggcauauuuggcgcaauagcggguuucauagaaaaugguugggagggaaugguggaugguugguacgguuucaggcaucaaaauucugagggaagaggacaagcagcagaucucaaaagcacucaagcagcaaucgaucaaaucaaugggaagcugaaucgauugaucgggaaaaccaacgagaaauuccaucagauugaaaaagaauucucagaagucgaagggagaauucaggaccuugagaaauauguugaggacacuaaaauagaucucuggucauacaacgcggagcuucuuguugcccuggagaaccaacauacaauugaucuaacugacucagaaaugaacaaacuguuugaaaaaacaaagaagcaacugagggaaaaugcugaggauaugggcaaugguuguuucaaaauauaccacaaaugugacaaugccugcauaggaucaaucagaaauggaacuuauaaccacgauguauacagagaugaagcuuuaaacaaccgguuccagaucaagggaguugagcugaagucaggguacaaagauuggauccuauggauuuccuuugccauaucauguuuuuugcuuuguguugcuuuguugggguucaucaugugggccugccaaaagggcaacauuaggugcaacauuugcauuuga

SEQ ID NO: 41489 - RNA, 1701 nt, Artificial Sequence
  derived and/or modified CDS sequence (wt) from hemagglutinin__InfluenzaA__AFN19491
augaagacuaucauugcuuugagcuacauucuaugucugguuuucgcucaaaaacuuccuggaaaugacaacagcacggcaacgcugugccuugggcaccaugcaguaccaaacgggacgauagugaaaacaaucacgaaugaccaaauugaaguuacuaaugcuacugagcugguucagaguuccucaacaggugaaauaugcgacaguccucaucagauccuugauggagaaaacugcacacuaauagaugcucuauugggagacccucagugugauggcuuccaaaauaagaagugggaccuuuuuguugaacgaagcaaagccuacagcaacuguuacccuuaugaugugccggauuaugccucccuuaggucacuaguugccucauccggcacacuggaguuuaacaaugaaagcuucaauuggacuggagucacucaaaacggaacaagcucugcuugcauaaggagaucuaauaguaguuucuuuaguagauugaauugguugacccacuuaaacuucaaauacccagcauugaacgugacuaugccaaacaaugaacaauuugacaaauuguacauuugggggguucaccacccgggcacggacaaggaccaaaucuuccuguaugcucaaucaucaggaagaaucacaguaucuaccaaaagaagccaacaagcuguaaucccgaauaucggauccagacccagaauaaggaauaucccuagcagaauaagcaucuauuggacaauaguaaaaccgggagacauacuuuugauuaacagcacagggaaucuaauugcuccuagggguuacuucaaaauacgaagugggaaaagcucaauaaugagaucagaugcacccauuggcaaaugcaauucugaaugcaucacuccaaauggaagcauucccaaugacaaaccauuccaaaauguaaacaggaucacauacggggccugucccagauauguuaagcaaagcacucugaaauuggcaacaggaaugcgaaauguaccagagaaacaaacuagaggcauauuuggcgcaauagcggguuucauagaaaaugguugggagggaaugguggaugguugguacgguuucaggcaucaaaauucugagggaagaggacaagcagcagaucucaaaagcacucaagcagcaaucgaucaaaucaaugggaagcugaaucgauugaucgggaaaaccaacgagaaauuccaucagauugaaaaagaauucucagaggucgaagggagaauucaagaccuugagaaauauguugaggacacuaaaauagaucucuggucauacaacgcggagcuucuuguugcccuggagaaccaacauacaauugaucuaacugacucagaaaugaacaaacuguuugaaaaaacaaagaagcaacugagggaaaaugcugaggauaugggcaaugguuguuucaaaauauaccacaaaugugacaaugccugcauaggaucaaucagaaauggaacuuauaaccacgauguauacagagaugaagcauuaaacaaccgguuccagaucaagggaguugagcugaagucaggguacaaagauuggauccuauggauuuccuuugccauaucauguuuuuugcuuuguguuguuuuguugggguucaucaugugggccugccaaaagggcaacauuaggugcaacauuugcauuuga

SEQ ID NO: 41490 - RNA, 1701 nt, Artificial Sequence
  derived and/or modified CDS sequence (wt) from hemagglutinin__InfluenzaA__AFN19493
augaagacuaucauugcuuugagcuacauucuaugucugguuuucgcucaaaaacuuccuggaaaugacaacagcacggcaacgcugugccuugggcaccaugcagugccaaacggaacgauagugaaaacaaucacgaaugaccaaauugaaguuacuaaugcuacugagcugguucagaguuccucaacaggugaaauaugcaacaguccucaucagauccuugauggagaaaacugcacacuaauagaugcucuauugggagacccucagugugauggcuuccaaaacaagaaaugggaccuuuuuguugaacgaagcaaagcccacagcaacuguuacccuuaugaugugccggauuaugccucccuuaggucacuaguugccucauccggcacacuggaguuuaacaaugaaagcuucaauuggacuggagucacucaaaacggaacaagcucugcuugcauaaggagaucuaauaauagcuucuuuaguagauugaauugguugacccacuuaaacuucaaauacccagcauugaacgugacuaugccaaacaaugaacaauuugacaaauuguacauuugggggguucaccacccggguacggacaaggaccaaaucuuccuguaugcucaagcaucaggaagaaucacaguauccaccaaaagaagccaacaaacuguaauuccgaauaucggaucuagacccagaguaaggaauaucccuagcagaguaagcaucuauuggacaauaguaaaaccgggagacauacuuuugauuaacagcacagggaaucuaauugcuccuagggguuacuucaaaauacgaagugggaaaagcucaauaaugagaucagaugcacccauuggcaaaugcaauucugcaugcaucacuccaaauggaagcauucccaaugacaaaccauuccaaaauguaaacaggaucacauacggggccugucccagauauguuaagcaaaacacucugaaauuggcaacaggaaugagaaauguaccagagaaacaaacuagaggcauauuuggcgcaauagcggguuucauagaaaaugguugggagggaaugguggaugguugguacgguuucaggcaucaaaauucugagggaaggggacaagcagcagaucucaaaagcacucaagcagcaaucgaucaaaucaaugggaagcugaauagauugaucgggaaaaccaacgagaaauuccaucagauugaaaaagaauucucagaagucgaagggagaauucaggaccuugagaaauauguugaggacacuaaaauagaucucuggucauacaacgcggagcuucuuguugcccuggagaaccaacacacaauugaucuaacugacucagaaaugaacaaacuguuugaaaaaacaaagaagcaacugagggaaaaugcugaggauaugggcaaugguuguuucaaaauauaccacaaaugugacaaugccugcauaggaucaaucagaaauggaacuuaugaccacgauguguacagagaugaagcauuaaacaaccgauuccagaucaagggaguugagcugaagucaggguacaaagauuggauccuauggauuuccuuugccauaucauguuuuuugcuuuguguugcuuuguugggguucaucaugugggccugccaaaaaggcaacauuaggugcaacauuugcauuuga

SEQ ID NO: 41491 - RNA, 1701 nt, Artificial Sequence
  derived and/or modified CDS sequence (wt) from hemagglutinin__InfluenzaA__AFN19495
augaagaccaucauugcuuugagcuacauucuaugucugguuuucgcucaaaaaauuccuggaaaugacaacagcacggcaacgcugugccuugggcaccaugcaguaccaaacggaacgauagugaaaacaaucacgaaugaccaaauugaaguuacuaaugcuacugagcugguucagaguuccucagcaggugaaauaugcgacaguccucaucauauccuugauggagaaaacugcacacuaauagaugcucuauugggagacccucagugugauggcuuccaaaauaagaaaugggaccuuuuuguugaacgaagcagagccuacagcaacuguuacccuuaugaugugccggauuaugccucccuuaggucacuaguugccucauccggcacacuggaguuuaacaaugaaagcuucaauuggacuggagucacucaaaacggaacaagcucugcuugcauaaggagaucuaauaauaguuucuuuaguagauugaauugguugacccacuuaaacuucaaauacccagcauugaacgugacuaugccaaacaaugaacaauuugacaaauuguacauuugggggguucaccacccggguacggacaaggaccaaaucuuccuguaugcucaagcaucaggaagaaucacaguaucuaccaaaagaagccaacaagcuguaaucccgaauaucggaucuagacccagaguaaggaauaucccuagcagaauaagcaucuauuggacaauaguaaaaccgggagacauacuuuugauuaacagcacagggaaucuaauugcuccuagggguuacuucaaaauacgaagugggaaaagcucaauaaugagaucagaugcacccauuggcaaaugcaauucugaaugcaucacuccaaauggaagcauucccaaugacaaaccauuccaaaauguaaacaggaucacauacggggccugucccagauauguuaagcaaagcacucugaaauuggcaacaggaaugcgaaauguaccagagaaacaaacuagaggcauauuuggcgcaauagcggguuucauagaaaaugguugggagggaaugauggaugguugguacgguuucaggcaucaaaauucugagggaagaggacaagcagcagaucucaaaagcacucaagcagcaaucgaucaaaucaauggaaagcugaauagauugaucgggaaaaccaacgagaaauuccaucagauugaaaaagaauucucagaagucgaagggagaauucaggaccuugagaaauauguugaggacacuaaaauagaucucuggucauacaacgcggagcuucuuguugcccuggagaaccaacauacaauugaucuaacugacucagaaaugaacaaacuguuugaaaaaacaaagaagcaacugagggaaaaugcugaggauaugggcaaugguuguuucaaaauauaccacaaaugugacaaugccugcauaggaucaaucagaaauggaacuuaugaccacgauguauacagagaugaagcauuaaacaaccgguuccagaucaagggaguugagcugaagucaggguacaaagauuggauccuauggauuuccuuugccacaucauguuuuuugcuuuguguugcuuuguugggguucaucaugugggccugccaaaaaggcaacauuaggugcaacauuugcauuuga

SEQ ID NO: 41492 - RNA, 1701 nt, Artificial Sequence
  derived and/or modified CDS sequence (wt) from hemagglutinin__InfluenzaA__AFN19497
augaagacuaucauugcuuugagcuacauucuaugucugguuuucgcucaaaaacuuccugaaaaugacaacagcacggcaacgcugugccuugggcaccaugcagugccaaacggaacgauagugaaaacaaucacgaaugaccaaauugaaguuacuaaugcuacugagcugguucagaguuccucaacaggugaaauaugcaacaguccucaucagauccuugauggagaaaacugcacacuaauagaugcucuauugggagacccucagugugauggcuuccaaaacaagaaaugggaccuuuuuguugaacgaagcaaagcccacagcaacuguuacccuuaugaugugccggauuaugccucccuuaggucacuaguugccucauccggcacacuggaguuuaacaaugaaagcuucaauuggacuggagucacucaaaacggaacaagcucugcuugcauaaggagaucuaauaauaguuucuuuaguagauugaauugguugacccacuuaaacuucaaauacccagcauugaacgugacuaugccaaacaaugaacaauuugacaaauuauacauuugggggguucaccacccggguacggacaaggaccaaaucuuccuguaugcucaagcaucaggaagaaucacaguaucuaccaaaagaagccaacaagcuguaauuccgaauaucggaucuagacccagaguaaggaauaucccuagcagaguaagcaucuauuggacaauaguaaaaccgggagacauacuuuugauuaacagcacagggaaucuaauugcuccuagggguuacuucaaaauacgaagugggaaaagcucaauaaugagaucagaugcacccauuggcaaaugcaauucuacaugcaucacuccaaauggaagcauucccaaugacaaaccauuccaaaauguaaacaggaucacauacggggccugucccagauauguuaagcaaaacacucugaaauuggcaacaggaaugagaaauguaccagagaaacaaacuagaggcauauuuggcgcaauagcggguuucauagaaaaugguugggagggaaugguggaugguugguacgguuucaggcaucaaaauucugagggaaggggacaagcagcagaucucaaaagcacucaagcagcaaucgaucaaaucaaugggaagcugaauagauugaucgggaaaaccaacgagaaauuccaucagauugaaaaagaauucucagaagucgaagggagaauucaggaccuugagaaauauguugaggacacuaaaauagaucucuggucauacaacgcggagcuucuuguugcccuggagaaccaacacacaauugaucuaacugacucagaaaugaacaaacuguuugaaaaaacaaagaagcaacugagggaaaaugcugaggauaugggcaaugguuguuucaaaauauaccacaaaugugacaaugccugcauaggaucaaucagaaauggaaccuaugaccacgauguguacagagaugaagcauuaaacaaccgauuccagaucaagggaguugagcugaagucaggguacaaagauuggauccuauggauuuccuuugccauaucauguuuuuugcuuuguguugcuuuguugggguucaucaugugggccugccaaaaaggcaacauuaggugcaacauuugcauuuga

SEQ ID NO: 41493 - RNA, 1701 nt, Artificial Sequence; identical to SEQ ID NO: 41443
  derived and/or modified CDS sequence (wt) from hemagglutinin__InfluenzaA__AFN19499

SEQ ID NO: 41494 - RNA, 1701 nt, Artificial Sequence; identical to SEQ ID NO: 41442
  derived and/or modified CDS sequence (wt) from hemagglutinin__InfluenzaA__AFN19501

SEQ ID NO: 41495 - RNA, 1701 nt, Artificial Sequence; identical to SEQ ID NO: 39772
  derived and/or modified CDS sequence (wt) from hemagglutinin__InfluenzaA__AFN19503

SEQ ID NO: 41496 - RNA, 1701 nt, Artificial Sequence; identical to SEQ ID NO: 41443
  derived and/or modified CDS sequence (wt) from hemagglutinin__InfluenzaA__AFN19507

SEQ ID NO: 41497 - RNA, 1701 nt, Artificial Sequence; identical to SEQ ID NO: 41442
  derived and/or modified CDS sequence (wt) from hemagglutinin__InfluenzaA__AFN19509

SEQ ID NO: 41498 - RNA, 1701 nt, Artificial Sequence
  derived and/or modified CDS sequence (wt) from hemagglutinin__InfluenzaA__AFN19513
augaagacuaucauugcuuugagcuacauucuaugucugguuuucgcucaaaaacuuccuggaaaugacaacagcacggcaacgcugugccuugggcaccaugcaguaccaaacggaacgauagugaaaacaaucacgaaugaccaaauugaaguuacuaaugcuacugagcugguucagaauuccucaauaggugaaauaugcgacaguccucaucagauccuugauggagaaaacugcacacuaauagaugcucuauugggagacccucagugugauggcuuccaaaauaagaaaugggaccuuuuuguugaacgaagcaaagccuacagcaacuguuacccuuaugaugugccggauuaugccucccuuaggucacuaguugccucauccggcacacuggaguuuaacaaugaaagcuucaauuggacuggagucacucaaaacggaacaaguucugcuugcauaaggagaucuaauaauaguuucuuuaguagauuaaauugguugacccacuuaaacuucaaauacccagcauugaacgugacuaugccaaacaaugaacaauuugacaaauuguacauuugggggguucaccacccggguacggacaaggaccaaaucuuccuguaugcucaaucaucaggaagaaucacaguaucuaccaaaagaagccaacaagcuguaaucccgaauaucggaucuagacccagaauaaggaauaucccuagcagaauaagcaucuauuggacaauaguaaaaccgggagacauacuuuugauuaacagcacagggaaucuaauugcuccuagggguuacuucaaaauacgaagugggaaaagcucaauaaugagaucagaugcacccauuggcaaaugcaauucugaaugcaucacuccaaauggaagcauucccaaugacaaaccauuccaaaauguaaacaggaucacauacggggccugucccagauauguuaagcaaagcacucugaaauuggcaacaggaaugcgaaauguaccagagaaacaaacuagaggcauauuuggcgcaauagcggguuucauagaaaaugguugggagggaaugguggaugguugguacgguuucaggcaucaaaauucugagggaagaggacaagcagcagaucucaaaagcacucaagcagcaaucgaucaaaucaaugggaagcugaaucgauugaucgggaaaaccaacgagaaauuccaucagauugaaaaagaauucucagaagucgaagggagaauucaggaccuugagaaauauguugaggacacuaaaauagaucucuggucauacaacgcggagcuucuuguugcccuggagaaccaacauacaauugaucuaacugacucagaaaugaacaaacuguuugaaaaaacaaagaagcaacugagggaaaaugcugaggauaugggcaaugguuguuucaaaauauaccacaaaugugacaaugccugcauaggaucaaucagaaauggaacuuaugaccacgauguauacagagaugaagcauuaaacaaccgguuccagaucaagggaguugagcugaagucaggguacaaagauuggauccuauggauuuccuuugccauaucauguuuuuugcuuuguguugcuuuguugggguucaucaugugggccugccaaaagggcaacauuaggugcaauauuugcauuuga

SEQ ID NO: 41499 - RNA, 1701 nt, Artificial Sequence
  derived and/or modified CDS sequence (wt) from hemagglutinin__InfluenzaA__AFN19515
augaagacuaucauugcuuugagcuacauucuaugucugguuuucgcucaaaaacuuccugaaaaugacaacagcacggcaacgcugugccuugggcaccaugcaguaccaaacggaacgauagugaaaacaaucacgaaugaccaaauugaaguuacuaaugcuacugagcugguucagaguuccucaacaggugaaauaugcgacaguccucaucagauccuugauggaguaaacugcacacuaauagaugcucuauugggagacccucagugugauggcuuccaaaauaagaagugggaccuuuuuguugaacgaagcaaagccuacagcaacuguuacccuuaugaugugccggauuaugccucccuuaggucacuaguugccucauccggcacacuggaguuuaacaaugaaagcuucaauuggacuggagucacucaaaacggaacaagcucugcuugcauaaggagaucuaauaguaguuucuuuaguagauugaauugguugacccacuuaaacuucaaauacccagcauugaacgugacuaugccaaacaaugaacaauuugacaaauuguacauuugggggguucaccacccggguacggacaaggaccaaaucuuccuguaugcucaaucaucaggaagaaucacaguaucuaccaaaagaagccaacaagcuguaaucccgaauaucggaucuagacccagaauaaggaauaucccuagcagaauaagcaucuauuggacaauaguaaaaccgggagacauacuuuugauuaacagcacagggaaucuaauugcuccuagggguuacuucaaaauacgaagugggaaaagcucaauaaugagaucagaugcacccauuggcaaaugcaauucugaaugcaucacuccaaauggaagcauucccaaugacaaaccauuccaaaauguaaacaggaucacauacggggccugucccagauauguuaagcaaagcacucugaaauuggcaacaggaaugcgaaauguaccagagaaacaaacuagaggcauauuuggcgcaauagcggguuucauagaaaaugguugggagggaaugguggaugguugguacgguuucaggcaucaaaauucugagggaagaggacaagcagcagaucucaaaagcacucaagcagcaaucgaucaaaucaaugggaagcugaaucgauugaucgggaaaaccaacgagaaauuccaucagauugaaaaagaauucucagaagucgaagggagaauucaggaccuugagaaauaugucgaggacacuaaaauagaucucuggucauacaacgcggagcuucuuguugcccuggagaaccaacauacaauugaucuaacugacucagaaaugaacaaacuguuugaaaaaacaaagaagcaacugagagaaaaugcugaggauaugggcaaugguuguuucaaaauauaccacaaaugugacaaugccugcauaggaucaaucagaaauggaacuuauaaccacgauguauacagagaugaagcauuaaacaaccgguuccagaucaagggaguugagcugaagucaggguacaaagauuggauccuauggauuuccuuugccauaucauguuuuuugcuuuguguugcuuuguugggguucaucaugugggccugccaaaagggcaacauuaggugcaacauuugcauuuga

SEQ ID NO: 41500 - RNA, 1701 nt, Artificial Sequence; identical to SEQ ID NO: 41443
  derived and/or modified CDS sequence (wt) from hemagglutinin__InfluenzaA__AFN19517

SEQ ID NO: 41501 - RNA, 1701 nt, Artificial Sequence; identical to SEQ ID NO: 41443
  derived and/or modified CDS sequence (wt) from hemagglutinin__InfluenzaA__AFN19519

SEQ ID NO: 41502 - RNA, 1701 nt, Artificial Sequence
  derived and/or modified CDS sequence (wt) from hemagglutinin__InfluenzaA__AFN19521
augaagacuaucauugcuuugagcuacauucuaugucugguuuucgcucaaaaacuuccuggaaaugacaacagcacggcaacgcugugccuugggcaccaugcaguaccaaacggaacgauagugaaaacaaucacgaaugaccaaauugaaguuacuaaugcuacugagcugguucagaguuccucaacaggugaaauaugcgacaguccucaucagauccuugauggagaaaacugcacacuaauagaugcucuauugggagacccucagugugauggcuuccaaaauaagaagugggaccuuuuuguugaacgaagcaaagccuacagcaacuguuacccuuaugaugugccggauuaugccucccuuaggucacuaguugccucauccggcacacuggaguuuaacaaugaaagcuucaauuggacuggagucacucaaaacggaacaagcucugcuugcauaaggagaucuaauaguaguuucuuuaguagauugaauugguugacccacuuaaacuucaaauacccagcauugaacgugacuaugccaaacaaugaacaauuugacaaauuguacauuugggggguucaccacccggguacggacaaggaccaaaucuuccuguaugcucaaucgucaggaagaaucacaguaucuaccaaaagaagccaacaagcuguaaucccgaauaucggaucuagacccagaauaaggaauaucccuagcagaauaagcaucuauuggacaauaguaaaaccgggagacauacuuuugauuaacagcacagggaaucuaauugcuccuagggguuacuucaaaauacgaagugggaaaagcucaauaaugagaucagaugcacccauuggcaaaugcaauucugaaugcaucacuccaaauggaagcauucccaaugacaaaccauuccaaaauguaaacaggaucacauacggggccugucccagauauguuaagcaaagcacucugaaauuggcaacaggaaugcgaaauguaccagagaaacaaacuagaggcauauuuggcgcaauagcggguuucauagaaaaugguugggagggaaugguggaugguugguacgguuucaggcaucaaaauucugagggaagaggacaagcagcagaucucaaaagcacucaagcagcaaucgaucaaaucaaugggaagcugaaucgauugaucgggaaaaccaacgagaaauuccaucagauugaaaaagaauucucagaagucgaagggagaauucaggaccuugagaaauauguugaggacacuaaaauagaucucuggucauacaacgcggagcuucuuguugcccuggagaaccaacauacaauugaucuaacugacucagaaaugaacaaacuguuugaaaaaacaaagaagcaacugagggaaaaugcugaggauaugggcaaugguuguuucaaaauauaccacaaaugugacaaugccugcauaggaucaaucagaaauggaacuuauaaccacgauguauacagagaugaagcauuaaacaaccgguuccagaucaagggaguugagcugaagucaggguacaaagauuggauccuauggauuuccuuugccauaucauguuuuuugcuuuguguugcuuuguugggguucaucaugugggccugccaaaagggcaacauuaggugcaacauuugcauuuga

SEQ ID NO: 41503 - RNA, 1701 nt, Artificial Sequence
  derived and/or modified CDS sequence (wt) from hemagglutinin__InfluenzaA__AFN19523
augaagacuaucauugcuuugagcuacauucuaugucugguuuucgcucaaaaacuuccugaaaaugacaacagcacggcaacgcugugccuugggcaccaugcaguaccaaacggaacgauagugaaaacaaucacgaaugaccaaauugaaguuacuaaugcuacugagcugguucagaguuccucaacaggugaaauaugcgacaguccucaucagauccuugauggaguaaacugcacacuaauagaugcucuauugggagacccucagugugauggcuuccaaaauaagaagugggaccuuuuuguugaacgaagcaaagccuacagcaacuguuacccuuaugaugugccggauuaugccucccuuaggucacuaguugccucauccggcacacuggaguuuaacaaugaaagcuucaauuggacuggagucacucaaaacggaacaagcucugcuugcauaaggagaucuaauaguaguuucuuuaguagauugaauugguugacccacuuaaacuucaaauacccagcauugaacgugacuaugccaaacaaugaacaauuugacaaauuguacauuugggggguucaccacccggguacggacaaggaccaaaucuuccuguaugcucaaucaucaggaagaaucacaguaucuaccaaaagaagccaacaagcuguaaucccgaauaucggaucuagacccagaauaaggaauaucccuagcagaauaagcaucuauuggacaauaguaaaaccgggagacauacuuuugauuaacagcacagggaaucuaauugcuccuagggguuacuucaaaauacgaagugggaaaagcucaauaaugagaucagaugcacccauuggcaaaugcaauucugaaugcaucacuccaaauggaagcauucccaaugacaaaccauuccaaaauguaaacaggaucacauacggggccugucccagauauguuaagcaaagcacucugaaauuggcaacaggaaugcgaaauguaccagagaaacaaacuagaggcauauuuggcgcaauagcggguuucauagaaaaugguugggagggaaugguggaugguugguacgguuucaggcaucaaaauucugagggaagaggacaagcagcagaucucaaaagcacucaagcagcaaucgaucaaaucaaugggaagcugaaucgauugaucgggaaaaccaacgagaaauuccaucagauugaaaaagaauucucagaagucgaagggagaauucaggaccuugagaaauaugucgaggacaccaaaauagaucucuggucauacaacgcggagcuucuuguugcccuggagaaccaacauacaauugaucuaacugacucagaaaugaacaaacuguuugaaaaaacaaagaagcaacugagggaaaaugcugaggauaugggcaaugguuguuucaaaauauaccacaaaugugacaaugccugcauaggaucaaucagaaauggaacuuauaaccacgauguauacagagaugaagcauuaaacaaccgguuccagaucaagggaguugagcugaagucaggguacaaagauuggauccuauggauuuccuuugccauaucauguuuuuugcuuuguguugcuuuguugggguucaucaugugggccugccaaaagggcaacauuaggugcaacauuugcauuuga

SEQ ID NO: 41504 - RNA, 1701 nt, Artificial Sequence
  derived and/or modified CDS sequence (wt) from hemagglutinin__InfluenzaA__AFN19527
augaagacuaucauugcuuugagcuacacucuaugucugguuuucgcucaaaaacuuccuggaaaugacaacagcacggcaacgcugugccuugggcaccaugcaguaccaaacggaacgauagugaaaacaaucacgaaugaccaaauugaaguuacuaaugcuacugagcugguucagaauuccucaauaggugaaauaugcgacaguccucaucagauccuugauggagaaaacugcacacuaauagaugcucuauugggagacccucagugugauggcuuccaaaauaagaaaugggaccuuuuuguugaacgaagcaaagccuacagcaacuguuacccuuaugaugugccggauuaugccucccuuaggucacuaguugccucauccggcacacuggaguuuaacaaugaaagcuucaauuggacuggagucacucaaaacggaacaaguucugcuugcauaaggagaucuaauaguaguuucuuuaguagauugaauugguugacccacuuaaacuucaaauacccagcauugaacgugacuaugccaaacaaugaacaauuugacaaauuguacauuugggggguucaccacccggguacggacaaggaccaaaucuuccuguaugcucaaucaucaggaagaaucacaguaucuaccaaaagaagccaacaagcuguaaucccgaauaucggaucuagacccagaauaagaaauaucccuagcagaauaagcaucuauuggacaauaguaaaaccgggagacauacuuuugauuaacagcacagggaaucuaauugcuccuagggguuacuucaaaauacgaagugggaaaagcucaauaaugagaucagaugcacccauuggcaaaugcaauucugaaugcaucacuccaaauggaagcauucccaaugacaaaccauuccaaaauguaaacaggaucacauacggggccugucccagauauguuaagcaaagcacucugaaauuggcaacaggaaugcgaaauguaccagagaaacaaacuagaggcauauuuggcgcaauagcggguuucauagaaaaugguugggagggaaugguggaugguugguacgguuucaggcaucaaaauucugagggaagaggacaagcagcagaucucaaaagcacucaagcagcaaucgaucaaaucaaugggaagcugaaucgauugaucgggaaaaccaacgagaaauuccaucagauugaaaaagaauucucagaagucgaagggagaauucaggaccuugagaaauauguugaggacacuaaaauagaucucuggucauacaacgcggagcuucuuguugcccuggagaaccaacauacaauugaucuaacugacucagaaaugaacaaacuguuugaaaaaacaaagaagcaacugagggaaaaugcugaggauaugggcaaugguuguuucaaaauauaccacaaaugugacaaugccugcauaggaucaaucagaaauggaacuuaugaccacgauguauacagagaugaagcauuaaacaaccgguuccagaucaagggaguugagcugaagucaggguacaaagauuggauccuauggauuucauuugccauaucauguuuuuugcuuuguguugcuuuguugggguucaucaugugggccugccaaaagggcaacauuaggugcaacauuugcauuuga

SEQ ID NO: 41505 - RNA, 1701 nt, Artificial Sequence
  derived and/or modified CDS sequence (wt) from hemagglutinin__InfluenzaA__AFN19529
augaagacuaucauugcuuugagcuacauucuaugucugguuuucgcucaaaaacuuccuggaaaugacaacagcacggcaacgcugugccuugggcaccaugcaguaccaaacggaacgauagugaaaacaaucacgaaugaccaaauugaaguuacuaaugcuacugagcugguucagaauuccucaauaggugaaauaugcgacaguccucaucagauccuugauggagaaaacugcacacuaauagaugcucuauugggagacccucagugugauggcuuccaaaauaagaaaugggaccuuuuuguugaacgaagcaaagccuacagcaacuguuacccuuaugaugugccggauuaugccucccuuaggucacuaguugccucauccggcacacuggaguuuaacaaugaaagcuucaauuggacuggagucacucaaaacggaacaaguucugcuugcauaaggagaucuaauaguaguuucuuuaguagauugaauugguugacccacuuaaacuucaaauacccagcauugaacgugacuaugccaaacaaugaacaauuugacaaauuguacauuugggggguucaccacccggguacggacaaggaccaaaucuuccuguaugcucaaucaucaggaagaaucacaguaucuaccaaaagaagccaacaagcuguaaucccgaauaucggaucuagacccagaauaagaaauaucccuagcagaauaagcaucuauuggacaauaguaaaaccgggagacauacuuuugauuaacagcacagggaaucuaauugcuccuagggguuacuucaaaauacgaagugggaaaagcucaauaaugagaucagaugcacccauuggcaaaugcaauucugaaugcaucacuccaaauggaagcauucccaaugacaaaccauuccaaaauguaaacaggaucacauacggggccugucccagauauguuaagcaaagcacucugaaauuggcaacaggaaugcgaaauguaccagagaaacaaacuagaggcauauuuggcgcaauagcggguuucauagaaaaugguugggagggaaugguggaugguugguacgguuucaggcaucaaaauucugagggaagaggacaagcagcagaucucaaaagcacucaagcagcaaucgaucaaaucaaugggaagcugaaucgauugaucgggaaaaccaacgagaaauuccaucagauugaaaaagaauucucagaagucgaagggagaauucaggaccuugagaaauauguugaggacacuaaaauagaucucuggucauacaacgcggagcuucuuguugcccuggagaaccaacauacaauugaucuaacugacucagaaaugaacaaacuguuugaaaaaacaaagaagcaacugagggaaaaugcugaggauaugggcaaugguuguuucaaaauauaccacaaaugugacaaugccugcauaggaucaaucagaaauggaacuuaugaccacgauguauacagagaugaagcauuaaacaaccgguuccagaucaagggaguugagcugaagucaggguacaaagauuggauccuauggauuucauuugccauaucauguuuuuugcuuuguguugcuuuguugggguucaucaugugggccugccaaaagggcaacauuaggugcaacauuugcauuuga

SEQ ID NO: 41506 - RNA, 1701 nt, Artificial Sequence
  derived and/or modified CDS sequence (wt) from hemagglutinin__InfluenzaA__AFN19531
augaagacuaucauugcuuugagcuacauucuaugucugguuuucgcucaaaaacuuccuggaaaugacaacagcacggcaacgcugugccuugggcaccaugcaguaccaaacggaacgauagugaaaacaaucacgaaugaccaaauugaaguuacuaaugcuacugagcugguucagaguuccucaacaggugaaauaugcgacaguccucaucagauccuugauggagaaaacugcacacuaauagaugcucuauugggagacccucagugugauggcuuccaaaauaagaagugggaccuuuuuguugaacgaagcaaagccuacagcaacuguuacccuuaugaugugccggauuaugccucccuuaggucacuaguugccucauccggcacacuggaguuuaacaaugaaagcuucaauuggacuggagucacucaaaacggaacaagcucugcuugcauaaggagaucuaauaguaguuucuuuaguagauugaauugguugacccacuuaaacuucaaauacccagcauugaacgugacuaugccaaacaaugaacaauuugacaaauuguacauuugggggguucaccacccggguacggacaaggaccaaaucuuccuguaugcucaaucaucaggaagaaucacaguaucuaccaaaagaagccaacaagcuguaaucccgaauaucggaucuagacccagaauaaggaauaucccuagcagaauaagcaucuauuggacaauaguaaaaccgggagacauacuuuugauuaacagcacagggaaucuaauugcuccuagggguuacuucaaaauacgaagugggaaaagcucaauaaugagaucagaugcacccauuggcaaaugcaauucugaaugcaucacuccaaauggaagcauucccaaugacaaaccauuccaaaauguaaacaggaucacauacggggccugucccagauauguuaagcaaagcacucugaaauuggcaacaggaaugcgaaauguaccagagaaacaaacuagaggcauauuuggcgcaauagcggguuucauagaaaaugguugggagggaaugguggaugguugguacgguuucaggcaucaaaauucugagggaagaggacaagcagcagaucucaagagcacucaagcagcaaucgaucaaaucaaugggaagcugaaucgauugaucgggaaaaccaacgagaaauuccaucagauugaaaaagaauucucagaagucgaagggagaauucaggaccuugagaaauauguugaggacacuaaaauagaucucuggucauacaacgcggagcuucuuguugcccuggagaaccaacauacaauugaucuaacugacucagaaaugaacaaacuguuugaaaaaacaaagaagcaacugagggaaaaugcugaggauaugggcaaugguuguuucaaaauauaccacaaaugugacaaugccugcauaggaucaaucagaaauggaacuuauaaccacgauguauacagagaugaagcauuaaacaaccgguuccagaucaagggaguugagcugaagucaggguacaaagauuggauccuauggauuuccuuugccauaucauguuuuuugcuuuguguugcuuuguugggguucaucaugugggcuugccaaaagggcaacauuaggugcaacauuugcauuuga

SEQ ID NO: 41507 - RNA, 1701 nt, Artificial Sequence
  derived and/or modified CDS sequence (wt) from hemagglutinin__InfluenzaA__AFN19533
augaagacuaucauugcuuugagcuacauucuaugucugguuuucgcucaaaaacuuccuggaaaugacaacagcacggcaacgcugugccuugggcaccaugcaguaccaaacggaacgauagugaaaacaaucacgaaugaccaaauugaaguuacuaaugcuacugagcugguucagaauuccucaauaggugaaauaugcgacaguccucaucagauccuugauggagaaaacugcacacuaauagaugcucuauugggagacccucagugugauggcuuccaaaauaagaaaugggaccuuuuuguugaacgaagcaaagccuacagcaacuguuacccuuaugaugugccggauuaugccucccuuaggucacuaguugccucauccggcacauuggaguuuaacaaugaaagcuucaauuggacuggagucacucaaaacggaacaaguucugcuugcauaaggagaucuaauaguaguuucuuuaguagauugaauugguugacccacuuaaacuucaaauacccagcauugaacgugacuaugccaaacaaugaacaauuugacaaauuguacauuugggggguucaccacccggguacggacaaggaccaaaucuuccuguaugcucaaucaucaggaagaaucacaguaucuaccaaaagaagccaacaagcuguaaucccgaauaucggaucuagacccagaauaagaaauaucccuagcagaauaagcaucuauuggacaauaguaaaaccgggagacauacuuuugauuaacagcacagggaaucuaauugcuccuagggguuacuucaaaauacgaagugggaaaagcucaauaaugagaucagaugcacccauuggcaaaugcaauucugaaugcaucacuccaaauggaagcauucccaaugacaaaccauuccaaaauguaaacaggaucacauacggggccugucccagauauguuaagcaaagcacucugaaauuggcaacaggaaugcgaaauguaccagagaaacaaacuagaggcauauuuggcgcaauagcggguuucauagaaaaugguugggagggaaugguggaugguugguacgguuucaggcaucaaaauucugagggaagaggacaagcagcagaucucaaaagcacucaagcagcaaucgaucaaaucaaugggaagcugaaucgauugaucgggaaaaccaacgagaaauuccaucagauugaaaaagaauucucagaagucgaagggagaauucaggaccuugagaaauauguugaggacacuaaaauagaucucuggucauacaacgcggagcuucuuguugcccuggagaaccaacauacaauugaucuaacugacucagaaaugaacaaacuguuugaaaaaacaaagaagcaacugagggaaaaugcugaggauaugggcaaugguuguuucaaaauauaccacaaaugugacaaugccugcauaggaucaaucagaaauggaacuuaugaccacgauguauacagagaugaagcauuaaacaaccgguuccagaucaagggaguugagcugaagucaggguacaaagauuggauccuauggauuuccuuugccauaucauguuuuuugcuuuguguugcuuuguugggguucaucaugugggccugccaaaagggcaacauuaggugcaacauuugcauuuga

SEQ ID NO: 41508 - RNA, 1701 nt, Artificial Sequence
  derived and/or modified CDS sequence (wt) from hemagglutinin__InfluenzaA__AFN19535
augaagacuaucauugcuuugagcuacauucuaugucugguuuucgcucaaaaaauuccuggaaaugacaacagcacggcaacgcugugccuugggcaccaugcaguaccaaacggaacgauagugaaaacaaucacgaaugaccaaauugaaguuacuaaugcuacugagcugguucagaguuccucaacaggugaaauaugcgacaguccucaucagauccuugauggagaaaacugcacacuaauagaugcucuauugggagacccucagugugauggcuuccaaaauaagaagugggaccuuuuuguugaacgaagcaaagccuacagcaacuguuacccuuaugaugugccggauuaugccucccuuaggucacuaguugccucauccggcacacuggaguuuaacaaugaaagcuucaauuggacuggagucacucaaaacggaacaagcucugcuugcauaaggagaucuaauaguaguuucuuuaguagauugaauugguugacccacuuaaacuucaaauacccagcauugaacgugacuaugccaaacaaugaacaauuugacaaauuguacauuugggggguucaccacccggguacggacaaggaccaaaucuuccuguaugcucaaucaucaggaagaaucacaguaucuaccaaaagaagccaacaagcuguaaucccgaauaucggaucuagacccagaauaaggaauaucccuagcagaauaagcaucuauuggacaauaguaaaaccgggagacauacuuuugaucaacagcacagggaaucuaauugcuccuagggguuacuucaaaauacgaagugggaaaagcucaauaaugagaucagaugcacccauuggcaaaugcaauucugaaugcaucacuccaaauggaagcauucccaaugacaaaccauuccaaaauguaaacaggaucacauacggggccugucccagauauguuaagcaaagcacucugaaauuggcaacaggaaugcgaaauguaccagagaaacaaacuagaggcauauuuggcgcaauagcggguuucauagaaaaugguugggagggaaugguggaugguugguacgguuucaggcaucaaaauucugagggaagaggacaagcagcagaucucaaaagcacucaagcagcaaucgaucaaaucaaugggaagcugaaucgauugaucgggaaaaccaacgagaaauuccaucagauugaaaaagaauucucagaagucgaagggagaauucaggaccuugagaaauauguugaggacacuaaaauagaucucuggucauacaacgcggagcuucuuguugcccuggagaaccaacauacaauugaucuaacugacucagaaaugaacaaacuguuugaaaaaacaaagaagcaacugagggaaaaugcugaggauaugggcaaugguuguuucaaaauauaccacaaaugugacaaugccugcauaggaucaaucagaaauggaacuuauaaccacgauguauacagagaugaagcauuaaacaaccgguuccagaucaagggaguugagcugaagucaggguacaaagauuggauccuauggauuuccuuugccauaucauguuuuuugcuuuguguugcuuuguugggguucaucaugugggcuugccaaaagggcaacauuaggugcaacauuugcauuuga

SEQ ID NO: 41509 - RNA, 1701 nt, Artificial Sequence
  derived and/or modified CDS sequence (wt) from hemagglutinin__InfluenzaA__AFN19537
augaagacuaucauugcuuugagcuacauucuaugucugguuuucgcucaaaaacuuccuggaaaugacaacagcacggcaacgcugugccuugggcaccaugcaguaccaaacggaacgauagugaaaacaaucacgaaugaccaaauugaaguuacuaaugcuacugagcugguucagaguuccucaacaggugaaauaugcgacaguccucaucagauccuugauggagaaaacugcacacuaauagaugcucuauugggagacccucagugugauggcuuccaaaauaagaagugggaccuuuuuguugaacgaagcaaagccuacagcaacuguuacccuuaugaugugccggauuaugccucccuuaggucacuaguugccucauccggcacacuggaguuuaacaaugaaagcuucaauuggacuggagucacucaaaacggaacaagcucugcuugcauaaggagaucuaauaguaguuucuuuaguagauugaauugguugacccacuuaaacuucaaauacccagcauugaacgugacuaugccaaacaaugaacaauuugacaaauuguacauuugggggguucaccacccggguacggacaaggaccaaaucuuccuguaugcucaaucaucaggaagaaucacaguaucuaccaaaagaagccaacaagcuguaaucccgaauaucggaucuagacccagaauaaggaauaucccuagcagaauaagcaucuauuggacaauaguaaaaccgggagacauacuuuugauuaacagcacagggaaucuaauugcuccuagggguuacuucaaaauacgaagugggaaaagcucaauaaugagaucagaugcacccauuggcaaaugcaauucugaaugcaucacuccaaauggaagcauucccaaugacaaaccauuccaaaauguaaacaggaucacauacggggccugucccagauauguuaagcaaagcacucugaaauuggcaacaggaaugcgaaauguaccagagaaacaaacuagaggcauauuuggcgcaauagcggguuucauagaaaaugguugggagggaaugguggaugguugguacgguuucaggcaucaaaauucugagggaagaggacaagcagcagaucucaaaagcacucaagcagcaaucgaucaaaucaaugggaagcugaaucgauugaucgggaaaaccaacgagaaauuccaucagauugaaaaagaauucucagaagucgaagggagaauucaggaccuugagaaauauguugaggacacuaaaauagaucucuggucauacaacgcggagcuucuuguugcccuggagaaccaacauacaauugaucuaacugacucagaaaugaacaaacuguuugaaaaaacaaagaagcaacugagggaaaaugcugaggauaugggcaaugguuguuucaaaauauaccacaaaugugacaaugccugcauaggaucaaucagaaauggaacuuauaaccacgauguauacagagaugaagcauuaaacaaccgguuccagaucaagggaguugagcugaagucaggguacaaagauuggauccuguggauuuccuuugccauaucauguuuuuugcuuuguguugcuuuguugggguucaucaugugggccugccaaaagggcaacauuaggugcaacauuugcauuuga

SEQ ID NO: 41510 - RNA, 1701 nt, Artificial Sequence
  derived and/or modified CDS sequence (wt) from hemagglutinin__InfluenzaA__AFN19539
augaagacuaucauugcuuugagcuacauucuaugucugguuuucgcucaaaaacuuccuggaaaugacaacagcacggcaacgcugugccuugggcaccaugcaguaccaaacggaacgauagugaaaacaaucacgaaugaccaaauugaaguuacuaaugcuacugagcugguucagaguuccucaacaggugaaauaugcgacaguccucaucagauccuugauggagaaaacugcacacuaauagaugcucuauugggagacccucagugugauggcuuccaaaauaagaagugggaccuuuuuguugaacgaagcaaagccuacagcaacuguuacccuuaugaugugccggauuaugccucccuuaggucacuaguugccucauccggcacacuggaguuuaacaaugaaagcuucaauuggacuggagucacucaaaacggaacaagcucugcuugcauaaggagaucuaauaguaguuucuuuaguagauugaauugguugacccacuuaaacuucaaauacccagcauugaacgugacuaugccaaacaaugaacaauuugacaaauuguacauuugggggguucaccacccggguacggacaaggaccaaaucuuccuguaugcucaaucaucuggaagaaucacaguaucuaccaaaagaagccaacaagcuguaaucccgaauaucggaucuagacccagaauaaggaauaucccuagcagaauaagcaucuauuggacaauaguaaaaccgggagacauacuuuugauaaacagcacagggaaucuaauugcuccuagggguuacuucaaaauacgaagugggaaaagcucaauaaugagaucagaugcacccauuggcaaaugcaauucugaaugcaucacuccaaauggaagcauucccaaugacaaaccauuccaaaauguaaacaggaucacauacggggccugucccagauauguuaagcaaagcacucugaaauuggcaacaggaaugcgaaauguaccagagaaacaaacuagaggcauauuuggcgcaauagcggguuucauagaaaaugguugggagggaaugguggacgguugguacgguuucaggcaucaaaauucugagggaagaggacaagcagcagaucucaaaagcacucaagcagcaaucgaucaaaucaaugggaagcugaaucgauugaucgggaaaaccaacgagaaauuccaucagauugaaaaagaauucucagaagucgaagggagaauucaggaccuugagaaauauguugaggacacuaaaauagaucucuggucauacaacgcggagcuucuuguugcccuggagaaccaacauacaauugaucuaacugacucagaaaugaacaaacuguuugaaaaaacaaagaagcaacugagggaaaaugcugaggauaugggcaaugguuguuucaaaauauaccacaaaugugacaaugccugcauaggaucaaucagaaauggaacuuauaaccacgauguauacagagaugaagcauuaaacaaccgguuccagaucaagggaguugagcugaagucaggguacaaagauuggauccuauggauuuccuuugccauaucauguuuuuugcuuuguguugcuuuguugggguucaucaugugggcuugccaaaagggcaacauuaggugcaacauuugcauuuga

SEQ ID NO: 41511 - RNA, 1701 nt, Artificial Sequence; identical to SEQ ID NO: 41436
  derived and/or modified CDS sequence (wt) from hemagglutinin__InfluenzaA__AFN19543

SEQ ID NO: 41512 - RNA, 1701 nt, Artificial Sequence
  derived and/or modified CDS sequence (wt) from hemagglutinin__InfluenzaA__AFN19545
augaagacuaucauugcuuugagcuacauucuaugucugguuuucgcucaaaaacuuccuggaagugacaauagcacggcaacgcugugccuugggcaccaugcaguaccaaacggaacgauagugaaaacaaucacgaaugaccgaauugaaguuacuaaugcuacugagcugguucagaauuccucaauaggugaaauaugcgacaguccucaucagauccuugauggagaaaacugcacacuaauagaugcucuauugggagacccucagugugauggcuucaaaaauaagaaaugggaccuuuuuguugaacgaagcaaagccuacagcaacuguuauccuuaugaugugccggauuaugccucccuuaggucacuaguugccucauccggcacacuggaguuuaacaaugaaagcuucaauuggacuggagucacucaaaacggaacaaguucugcuugcauaaggagaucuaauaauaguuucuuuaguagauuaaauugguugacccacuuaaacuucaaauacccagcauugaacgugacuaugccaaacaaugaacaauuugacaaauuguacauuugggggguucaccacccggguacggacaaggaccaaaucuuccuguaugcucaaucaucaggaagaaucacaguaucuaccaaaagaagccaacaagcuguaaucccgaauaucggaucuagacccagaauaaggaauaucccuagcagaauaagcaucuauuggacaauaguaaaaccgggagacauacuuuugauuaacagcacagggaaucuaauugcuccuagggguuacuucaaaauacaaagugggaaaagcucaauaaugagaucagaugcacccauuggcaaaugcaagucugaaugcaucacuccaaauggaagcauucccaaugacaaaccauuccaaaauguaaacaggaucacauacggggccugucccagauauguuaagcaaagcacucugaaauuggcaacaggaaugcgaaauguaccagagaaacaaacuagaggcauauuuggcgcaauagcggguuucauagaaaaugguugggagggaaugguggaugguugguacgguuucaggcaucaaaauucugagggaagaggacaagcagcagaucucaaaagcacucaagcagcaaucgaucaaaucaaugggaagcugaaucgauugaucgggaaaaccaacgagaaauuccaucagauugaaaaagaauucucagaaguagaagggagaauucaggaccuugagaaauauguugaggacacuaaaauagaucucuggucauacaacgcggagcuucuuguugcccuggagaaccagcauacaauugaucuaacugacucagaaaugaacaaacuguuugaaaaaacaaagaagcaacugagggaaaaugcugaggauaugggcaaugguuguuucaaaauauaccacaaaugugacaaugccugcauaggaucaaucagaaauggaacuuaugaccacgauguauacagagaugaagcauuaaacaaccgguuccagaucaagggaguugagcugaagucaggauacaaagauuggauccuauggauuuccuuugccauaucauguuuuuugcuuuguguugcuuuguugggguucaucaugugggccugccaaaagggcaacauuaggugcaacauuugcauuuga

SEQ ID NO: 41513 - RNA, 1701 nt, Artificial Sequence; identical to SEQ ID NO: 41436
  derived and/or modified CDS sequence (wt) from hemagglutinin__InfluenzaA__AFN19547

SEQ ID NO: 41514 - RNA, 1701 nt, Artificial Sequence
  derived and/or modified CDS sequence (wt) from hemagglutinin__InfluenzaA__AFN19549
augaagacuaucauugcuuugagcuacauucuaugucugguuuucgcucaaaaacuuccuggaaaugacaacagcacggcaacgcugugccuugggcaccaugcagugccaaacggaacgauagugaaaacaaucacgaaugaccaaauugaaguuacuaaugcuacugaacugguucagaguuccucaaaaggugaaauaugcaacaguccucaucagauccuugauggaggaaacugcacacuaauagaugcucuauugggagacccucagugugauggcuuccaaaacaagaaaugggaccuuuuuguugaacgaagcaaagcccacagcaacuguuacccuuaugaugugccggauuaugccucccuuaggucacuaguugccucauccggcacacuggaguuuaacaaugaaagcuucaauuggacuggagucacucaaaacggaacaagcucugcuugcaugaggagaucuaauaauaguuucuuuaguagauugaauugguugacccacuuaaacuucaaauacccagcauugaacgugacuaugccaaacaaugaacaauuugacaaauuguacauuugggggguucaccacccggguacggacaaggaccaaaucuuccuguaugcucaagcaucaggaagaaucacaguaucuaccaaaagaagccaacaagcuguaauuccgaauaucggaucuagacccagaguaaggaauaucccuagcagaguaagcaucuauuggacaauaguaaaaccgggagacauacuuuugauuaacagcacagggaaucuaauugcuccuagggguuacuucaaaauacgaagugggaaaagcucaauaaugagaucagaugcacccauuggcaaaugcaauucugcaugcaucacuccaaauggaagcauucccaaugacaaaccauuccaaaauguaaacaggaucacauacggggccugucccagauauguuaagcaaaacacucugaaauuggcaacaggaaugagaaauguaccagagaaacaaacuagaggcauauuuggcgcaauagcggguuucauagaaaaugguugggagggaaugguggaugguugguacgguuucaggcaucaaaauucugagggaaggggacaggcagcagaucucaaaagcacucaagcagcaaucgaucaaaucaaugggaagcugaauagauugaucgggaaaaccaacgagaaauuccaucagauugaaaaagaauucucagaagucgaagggaggauucaggacauugagaaauauguugaggacacuaagauagaucucuggucauacaacgcggagcuucuuguugcccuggagaaccaacacacaauugaucuaacugacucagaaaugaacaaacuguuugaaaaaacaaagaagcaacugagggaaaaugcugaggauaugggcaaugguuguuucaaaauauaucacaaaugugacaaugccugcauaggaucaaucagaaauggaacuuaugaccacgauguguacagagaugaagcauuaaacaaccgauuccagaucaagggaguugagcugaagucaggguacaaagauuggauccuauggauuuccuuugccauaucauguuuuuugcuuuguguugcuuuguugggguucaucaugugggccugccaaaaaggcaacauuaggugcaacauuugcauuuga

SEQ ID NO: 41515 - RNA, 1701 nt, Artificial Sequence
  derived and/or modified CDS sequence (wt) from hemagglutinin__InfluenzaA__AFN19551
augaagacuaucauugcuuugagcuacauucuaugucugguuuucgcucaaaaaauuccuggaaaugacaacagcacggcaacgcugugccuugggcaccaugcaguaccaaacggaacgauagugaaaacaaucacgaaugaccaaauugaaguuacuaaugcuacugagcugguucagaguuccucaacaggugaaauaugcgacaguccucaucagauccuugauggagaaaacugcacacuaauagaugcucuauugggagacccucauugugauggcuuccaaaauaagaagugggaccuuuuuguugaacgaagcaaagccuacagcaacuguuacccuuaugaugugccggauuaugccucccuuaggucacuaguugccucauccggcacacuggaguuuaacaaugaaagcuucaauuggacuggagucacucaaaacggaacaagcucugcuugcauaaggagaucuaauaguaguuucuuuaguagauugaauugguugacccacuuaaacuucaaauacccagcauugaacgugacuaugccaaacaaugaacaauuugacaaauuguacauuugggggguucaccacccggguacggacaaggaccaaaucuuccuguaugcucaaucaucaggaagaaucacaguaucuaccaaaagaagccaacaagcuguaaucccgaauaucggaucuagacccagaauaaggaauaucccuagcagaauaagcaucuauuggacaauaguaaaaccgggagacauacuuuugaucaacagcacagggaaucuaauugcuccuagggguuacuucaaaauacgaagugggaaaagcucaauaaugagaucagaugcacccauuggcaaaugcaauucugaaugcaucacuccaaauggaagcauucccaaugacaaaccauuccaaaauguaaacaggaucacauacggggccugucccagauauguuaagcaaagcacucugaaauuggcaacaggaaugcgaaauguaccagagaaacaaacuagaggcauauuuggcgcaauagcggguuucauagaaaaugguugggagggaaugguggaugguugguacgguuucaggcaucaaaauucugagggaagaggacaagcagcagaucucaaaagcacucaagcagcaaucgaucaaaucaaugggaagcugaaucgauugaucgggaaaacaaacgagaaauuccaucagauugaaaaagaauucucagaagucgaagggagaauucaggaccuugagaaauauguugaggacacuaaaauagaucucuggucauacaacgcggagcuucuuguugcccuggagaaccaacauacaauugaucuaacugacucagaaaugaacaaacuguuugaaaaaacaaagaagcaacugagggaaaaugcugaggauaugggcaaugguuguuucaaaauauaccacaaaugugacaaugccugcauaggaucaaucagaaauggaacuuauaaccacgauguauacagagaugaagcauuaaacaaccgguuccagaucaagggaguugagcugaagucaggguacaaagauuggauccuauggauuuccuuugccauaucauguuuuuugcuuuguguugcuuuguugggguucaucaugugggcuugccaaaagggcaacauuaggugcaacauuugcauuuga

SEQ ID NO: 41516 - RNA, 1701 nt, Artificial Sequence; identical to SEQ ID NO: 41471
  derived and/or modified CDS sequence (wt) from hemagglutinin__InfluenzaA__AFN19553

SEQ ID NO: 41517 - RNA, 1701 nt, Artificial Sequence; identical to SEQ ID NO: 41479
  derived and/or modified CDS sequence (wt) from hemagglutinin__InfluenzaA__AFN19555

SEQ ID NO: 41518 - RNA, 1701 nt, Artificial Sequence
  derived and/or modified CDS sequence (wt) from hemagglutinin__InfluenzaA__AFN19557
augaagacuaucauugcuuugagcuacauucuaugucugguuuucgcucaaaaacuuccuggaaaugacaacagcacggcaacgcugugccuugggcaccaugcaguaccaaacggaacgauagugaaaacaaucacgaaugaccaaauugaaguuacuaaugcuacugagcugguucagaguuccucaacaggugaaauaugcgacaguccucaucagauccuugauggagaaaacugcacacuaauagaugcucuauugggagacccucagugugauggcuuccaaaauaagaagugggaccuuuuuguugaacgaagcaaagccuacagcaacuguuacccuuaugaugugccggauuaugccucccuuaggucacuaguugccucauccggcacacuggaguuuaacaaugaaagcuucaauuggacuggagucacucaaaacggaacaagcucugcuugcauaaggagaucuaauaguaguuucuuuaguagauugaauugguugacccacuuaaacuucaaauacccagcauugaacgugacuaugccaaacaaugaacaauuugacaaauuguacauuugggggguucaccacccggguacggacaaggaccaaaucuuccuguaugcucaaucaucaggaagaaucacaguaucuaccaaaagaagccaacaagcuguaaucccgaauaucggaucuagacccagaauaaggaauaucccuagcagaauaagcaucuauuggacaaucguaaaaccgggagacauacuuuugauuaacagcacagggaaucuaauugcuccuagggguuacuucaaaauacgaagugggaaaagcucaauaaugagaucagaugcacccauuggcaaaugcaauucugaaugcaucacuccaaauggaagcauucccaaugauaaaccauuccaaaauguaaacaggaucacauacggggccugucccagauauguuaagcaaagcacucugaaauuggcaacaggaaugcgaaauguaccagagaaacaaacuagaggcauauuuggcgcaauagcggguuucauagaaaaugguugggagggaaugguggaugguugguacgguuucaggcaucaaaauucugagggaagaggacaagcagcagaucucaaaagcacucaagcagcaaucgaucaaaucaaugggaagcugaaucgauugaucgggaaaaccaacgagaaauuccaucagauugaaaaagaauucucagaagucgaagggagaauucaggaccuugagaaauauguugaggacacuaaaauagaucucuggucauacaacgcagagcuucuuguugcccuggagaaccaacauacaauugaucuaacugacucagaaaugaacaaacuguuugaaaaaacaaagaagcaacugagggaaaaugcugaggauaugggcaaugguuguuucaaaauauaccacaaaugugacaaugccugcauaggaucaaucagaaauggaacuuauaaccacgauguauacagagaugaagcauuaaacaaccgguuccagaucaagggaguugagcugaagucaggguacaaagauuggauccuauggauuuccuuugccauaucauguuuuuugcuuuguguugcuuuguugggguucaucaugugggccugccaaaagggcaacauuaggugcaacauuugcauuuga

SEQ ID NO: 41519 - RNA, 1701 nt, Artificial Sequence
  derived and/or modified CDS sequence (wt) from hemagglutinin__InfluenzaA__AFN19559
augaagacuaucauugcuuugagcuacauucuaugucugguuuucgcucaaaaacuuccuggaaaugacaauagcacggcaacgcugugccuugggcaccaugcaguaccaaacggaacgauagugaaaacaaucacgaaugaccgaauugaaguuacuaaugcuacugagcugguucagaauuccucaauaggugaaauaugcgacaguccucaucagauccuugauggagaaaacugcacacuaauagaugcucuauugggagacccucagugugauggcuuccaaaauaagaaaugggaccuuuuuguugaacgaagcaaagccuacagcaacuguuacccuuaugaugugccggauuaugccucccuuaggucacuaguugccucauccggcacacuggaguuuaacaaugaaagcuucaauuggacuggagucacucaaaacggaacaaguucugcuugcauaaggagaucuaauaauaguuucuuuaguagauuaaauugguugacccacuuaaacuucaaauacccagcauugaacgugacuaugccaaacaaugaacaauuugacaaauuguacauuugggggguucaccacccggguacggacaaggaccaaaucuuccuguaugcucaaucaucaggaagaaucacaguaucuaccaaaagaagccaacaagcuguaaucccuaauaucggaucuagacccagaauaaggaauaucccuagcagaauaagcaucuauuggacaauaguaaaaccgggagacauacuuuugauuaacagcacagggaaucuaauugcuccuagggguuacuucaaaauacgaagugggaaaagcucaauaaugagaucagaugcacccauuggcaaaugcaagucugaaugcaucacuccaaauggaagcauucccaaugacaaaccauuccaaaauguaaacaggaucacauacggggccugucccagauauguuaagcaaagcacucugaaauuggcaacaggaaugcgaaauguaccagagaaacaaacuagaggcauauuuggcgcaauagcggguuucauagaaaaugguugggagggaaugguggaugguugguacgguuucaggcaucaaaauucugagggaagaggacaagcagcagaucucaaaagcacucaagcagcaaucgaucaaaucaaugggaagcugaaucgauugaucgggaaaaccaacgagaaauuccaucagauugaaaaagaauucucagaaguagaagggagaauucaggaccuugagaaauauguugaggacacuaaaauagaucucuggucauacaacgcggagcuucuuguugcccuggagaaccaacauacaauugaucuaacugacucagaaaugaacaaacuguuugaaaaaacaaagaagcaacugagggaaaaugcugaggauaugggcaaugguuguuucaaaauauaccacaaaugugacaaugccugcauaggaucaaucagaaauggaacuuaugaccacgauguauacagagaugaagcauuaaacaaccgguuccagaucaagggaguugagcugaagucaggguacaaagauuggauccuauggauuuccuuugccauaucauguuuuuugcuuuguguugcuuuguugggguucaucaugugggccugccaaaagggcaacauuaggugcaacauuugcauuuga

SEQ ID NO: 41520 - RNA, 1701 nt, Artificial Sequence; identical to SEQ ID NO: 41473
  derived and/or modified CDS sequence (wt) from hemagglutinin__InfluenzaA__AFN19561

SEQ ID NO: 41521 - RNA, 1701 nt, Artificial Sequence
  derived and/or modified CDS sequence (wt) from hemagglutinin__InfluenzaA__AFN19563
augaagacuaucauugcuuugagcuacauucuaugucugguuuucgcucaaaaacuuccuggaaaugacaauagcacggcaacgcugugccuugggcaccaugcaguaccaaacggaacgauagugaaaacaaucacgaaugaccgaauugaaguuacuaaugcuacugagcugguucagaauuccucaauaggugaaauaugcgacaguccucaucagauccuugauggagaaaacugcacacuaauagaugcucuauugggagacccucagugugauggcuuccaaaauaagaaaugggaccuuuuuguugaacgaagcaaagccuacagcaacuguuacccuuacgaugugccggauuaugccucccuuaggucacuaguugccucauccggaacacuggaguuuaacaaugaaagcuucaauuggacuggagucacucaaaacggaacaaguucugcuugcauaaggagaucuaauaauaguuucuuuaguagauuaaauugguugacccacuuaaacuucaaauacccagcauugaacgugacuaugccaaacaaugaacaauuugacaaauuguacauuugggggguucaccacccggguacggacaaggaccaaaucuuccuguaugcucaaucaucaggaagaaucacaguaucuaccaaaagaagccaacaagcuguaaucccgaauaucggaucuagacccagaauaaggaauaucccuagcagaauaagcaucuauuggacaauaguaaaaccgggagacauacuuuugauuaacagcacagggaaucuaauugcuccuagggguuacuucaaaauacgaagugggaaaagcucaauaaugagaucagaugcacccauuggcaaaugcaagucugaaugcaucacuccaaauggaagcauucccaaugacaaaccauuccaaaauguaaacaggaucacauacggggccugucccagauauguuaagcaaagcacucugaaauuggcaacaggaaugcgaaauguaccagagaaacaaacuagaggcauauuuggcgcaauagcggguuucauagaaaaugguugggagggaaugguggaugguugguacgguuucaggcaucaaaauucugagggaagaggacaagcagcagaucucaaaagcacucaagcagcaaucgaucaaaucaaugggaagcugaaucgauugaucgggaaaaccaacgagaaauuccaucagauugaaaaagaauucucagaaguagaagggagaauucaggaccuugagaaauauguugaggacacuaaaauagaucucuggucauacaacgcggagcuucuuguugcccuggagaaccaacauacaauugaucuaacugacucagaaaugaacaaacuguuugaaaaaacaaagaagcaacugagggaaaaugcugaggauaugggcaaugguuguuucaaaauauaccacaaaugugacaaugccugcauaggaucaaucagaaauggaacuuaugaccacgauguauacagagaugaagcauuaaacaaccgguuccagaucaagggaguugagcugaagucaggguacaaagauuggauccuauggauuuccuuugccacaucauguuuuuugcuuuguguugcuuuguugggguucaucaugugggccugccaaaagggcaacauuaggugcaacauuugcauuuga

SEQ ID NO: 41522 - RNA, 1701 nt, Artificial Sequence
  derived and/or modified CDS sequence (wt) from hemagglutinin__InfluenzaA__AFN19565
augaagacuaucauugcuuugagcuacauucuaugucugguuuucgcucaaaaacuuccuggaaaugacaacagcacggcaacgcugugccuugggcaccaugcaguaccaaacggaacgauagugaaaacaaucacgaaugaccaaauugaaguuacuaaugcuacugagcugguucagaauuccucaauaggugaaauaugcgacaguccucaucagauccuugauggagaaaacugcacacuaauagaugcucuauugggagacccucagugugauggcuuccaaaauaagaaaugggaccuuuuuguugaacgaagcaaagccuacagcaacuguuacccuuaugaugugccggauuaugccucccuuaggucacuaguugccucauccggcacacuggaguuuaacaaugaaagcuucaauuggacuggagucacucaaaacggaacaaguucugcuugcauaaggagaucuaauaauagcuucuuuaguagauuaaauugguugacccacuuaaacuucaaauacccagcauugaacgugacuaugccaaacaaugaacaauuugacaaauuguacauuugggggguucaccacccggguacggacaaggaccaaaucuuccuguaugcucaaucaucaggaagaaucacaguaucuaccaaaagaagccaacaagcuguaaucccgaauaucggaucuagacccaggauaaggaauaucccuagcagaauaagcaucuauuggacaauaguaaaaccgggagacauacuuuugauuaacagcacagggaaucuaauugcuccuagggguuacuucaaaauacgaagugggaaaagcucaauaaugagaucagaugcacccauuggcaaaugcaauucugaaugcaucacuccaaauggaagcauucccaaugacaaaccauuccaaaauguaaacaggaucacauacggggccugucccagauauguuaagcaaagcacucugaaauuggcaacaggaaugcgaaauguaccagagaaacaaacuagaggcauauuuggugcaauagcggguuucauagaaaaugguugggagggaaugguggaugguugguacgguuucaggcaucaaaauucugagggaagaggacaagcagcagaucucaaaagcacucaagcagcaaucgaucaaaucaaugggaagcugaaucgauugaucgggaaaaccaacgagaaauuccaucagauugaaaaagaauucucagaagucgaagggagaauucaggaccuugagaaauauguugaggacacuaaaauagaccucuggucauacaacgcggagcuucuuguugcccuggagaaucaacauacaauugaccuaacugacucagaaaugaacaaacuguuugaaaaaacaaagaagcaacugagggaaaaugcugaggauaugggcaaugguuguuucaaaauauaccacaaaugugacaaugccugcauaggaucaaucagaaauggaacuuaugaccacgauguauacagagaugaagcauuaaacaaucgguuccagaucaagggaguugagcugaagucaggguacaaagauuggauccuauggaucuccuuugccauaucauguuuuuugcuuuguguugcuuuguugggguucaucaugugggccugccaaaagggcaacauuaggugcaacauuugcauuuga

SEQ ID NO: 41523 - RNA, 1701 nt, Artificial Sequence
  derived and/or modified CDS sequence (wt) from hemagglutinin__InfluenzaA__AFN19567
augaagacuaucauugcuuugagcuacauucuaugucugguuuucgcucaaaaaauuccuggaaaugacaauagcacggcaacgcugugccuugggcaccaugcaguaccaaacggaacgauagugaaaacaaucacgaaugaccgaauugaaguuacuaaugcuacugagcugguucagaauuccucaauaggugaaauaugcgacaguccucaucagauccuugauggagaaaacugcacacuaauagaugcucuauugggagacccucagugugauggcuuccaaaauaagaaaugggaccuuuuuguugaacgaagcaaagccuacagcaacuguuacccuuaugaugugccggauuaugccucccuuaggucacuaguugccucauccggcacacuggaguuuaacaaugaaagcuucaauuggacuggagucacucaaaacggaacaaguucugcuugcauaaggagaucuaauaauaguuucuuuaguagauuaaauugguugacccacuuaaacuucaaauacccagcauugaacgugacuaugccaaacaaugaacaauuugacaaauuguacauuugggggguucaccacccggguacggacaaggaccaaaucuuccuguaugcucaaucaucaggaagaaucacaguaucuaccaaaagaagccaacaagcuguaaucccgaauaucggaucuagacccagaauaaggaauaucccuagcagaauaagcaucuauuggacaauaguaaaaccgggagacauacuuuugauuaacagcacugggaaucuaauugcuccuagggguuacuucaaaauacgaagugggaaaagcucaauaaugagaucagaugcacccauuggcaaaugcaagucugaaugcaucacuccaaauggaagcauucccaaugacaaaccauuccaaaauguaaacaggaucacauacggggccugucccagauauguuaagcaaagcacucugaaauuggcaacaggaaugcgaaauguaccagagaaacaaacuagaggcauauuuggcgcaauagcggguuucauagaaaaugguugggagggaaugguggaugguugguacgguuucaggcaucaaaauucugagggaagaggacaagcagcagaucucaaaagcacucaagcagcaaucgaucaaaucaaugggaagcugaaucgauugaucgggaaaaccaacgagaaauuccaucagauugaaaaagaauucucagaaguagaagggagaauucaggaccuugagaaauauguugaggacacuaaaauagaucucuggucauacaacgcggagcuucuuguugcccuggagaaccaacauacaauugaucuaacugacucagaaaugaacaaacuguuugaaaaaacaaagaagcaacugagagaaaaugcugaggauaugggcaaugguuguuucaaaauauaccauaaaugugacaaugccugcauaggaucaaucagaaauggaacuuaugaccacgauguauacagagaugaagcauuaaacaaccgguuccagaucaagggaguugagcugaagucaggguacaaagauuggauccuauggauuuccuuugccauaucauguuuuuugcuuuguguugcuuuguugggguucaucaugugggccugccaaaagggcaacauuaggugcaacauuugcauuuga

SEQ ID NO: 41524 - RNA, 1701 nt, Artificial Sequence; identical to SEQ ID NO: 41436
  derived and/or modified CDS sequence (wt) from hemagglutinin__InfluenzaA__AFN19569

SEQ ID NO: 41525 - RNA, 1701 nt, Artificial Sequence
  derived and/or modified CDS sequence (wt) from hemagglutinin__InfluenzaA__AFN19571
augaagacuaucauugcuuugagcuacauucuaugucugguuuucgcucaaaaacuuccuggaaaugacaacagcacggcaacgcugugccuugggcaccaugcaguaccaaacggaacgauagugaaaacaaucacgaaugaccaaauugaaguuacuaaugcuacugagcugguucagaguuccucaacaggugaaauaugcgacaguccucaucagauccuugauggagaaaacugcacacuaauagaugcucuauugggagacccucagugugauggcuuccaaaauaagaagugggaccuuuuuguugaacgaagcaaagccuacagcaacuguuacccuuaugaugugccggauuaugccucccuuaggucacuaguugccucauccggcacacuggaguuuaacaaugaaagcuucaauuggacuggagucacacaaaacggaacaagcucugcuugcauaaggagauccaauaguaguuucuuuaguagauugaauugguugacccacuuaaacuucaaauacccagcauugaacgugacuaugccaaacaaugaacaauuugacaaauuguacauuugggggguucaccacccggguacggacaaggaccaaaucuuccuguauucucaaucaucaggaagaaucacaguaucuaccaaaagaagccaacaagcuguaaucccgaauaucggaucuagacccagaauaaggaauaucccuagcagaauaagcaucuauuggacaauaguaaaaccgggagacauacuuuuaauuaacagcacagggaaucuaauugcuccuagggguuacuucagaauacgaagugggaaaagcucaauaaugagaucagaugcacccauuggcaaaugcaauucugaaugcaucacuccaaauggaagcauucccaaugacaaaccauuucaaaauguaaacaggaucacauacgggcccugucccagauauguuaagcaaagcacucugaaauuggcaacaggaaugcgaaauguaccagagaaacaaacuagaggcauauuuggcgcaauagcggguuucauagaaaaugguugggagggaaugguggaugguugguacgguuacaggcaucaaaauucugagggaagaggacaagcagcagaucucaaaagcacucaagcagcaaucgaucaaaucaaugggaagcugaaucgauugaucgggaaaaccaacgagaaauuccaucagauugaaaaagaauucucagaagucgaagggagaauucaggaccuugagaaauauguugaggacacuaaaauagaucucuggacauacaacgcggagcuucuuguugcccuggagaaccaacauacaauugaucuaacugacucagaaaugaacaaacuguuugaaaaaacaaagaagcaacugagggaaaaugcugaggauaugggcaaugguuguuucaaaauauaccacaaaugugacaaugccugcauaggaucaaucagaaauggaacuuauaaccacgauguauacagagaugaagcauuaaacaaccgguuccagaucaagggaguugagcugaagucaggguacaaagauuggauccuauggauuuccuuugccauaucauguuuuuugcuuuguguugcuuuguugggguucaucaugugggccugccaaaagggcaacauuaggugcaacauuugcauuuga

SEQ ID NO: 41526 - RNA, 1701 nt, Artificial Sequence
  derived and/or modified CDS sequence (wt) from hemagglutinin__InfluenzaA__AFN19573
augaagacuaucauugcuuugagcuacauucuaugucugguuuucgcucaaaaacuuccuggaaaugacaacagcacggcaacgcugugccuugggcaccaugcaguaccaaacggaacgauagugaaaacaaucacgaaugaccaaauugaaguuacuaaugcuacugagcugguucagaguucuucaacagguaaaauaugcgacaguccucaucagauccuugauggaaaaaacugcacacuaauagaugcucuauugggagacccucagugugauggcuuccaaaauaagaaaugggaccuuuuuguugaacgcagcaaagccuacagcaacuguuacccuuaugaugugccagauuaugccucccuuaggucacuaguugccucauccggcacacuggaguuuaacaaugaaagcuucaauuggacuggagucacucaaaacggaacaagcucugcuugcauaaggagaucuaaaaacaguuucuuuaguagauugaauugguugacccacuuaaacuucaaauacucagcauugaacgugacuaugccgaacaaggaacaauuugacaaauuguacauuugggggguucaccacccggguacggacaaagaccaaaucucccuguaugcucaagcaucaggaagaaucacagucucuaccaaaaggagccaacaaacuguaaucccgaauaucggaucuagaccccgaguaaggaauaucccuagcagaauaagcaucuauuggacaauaguaaaaccgggagacauacuuuugauuaauagcacagggaaucuaauugcuccuagggguuacuucaaaaugcaaagugggaaaagcucaauaaugagaucagaugcacccauuggcaaaugcaauucugaaugcaucacuccaaauggaagcauucccaaugacaaaccauuccaaaaugugaacagaaucacauacggggccugucccagauauguuaagcaaaacacucugaaauuggcaacagggaugcgaaauguaccagagaaacaaacuagaggcauauuuggcgcaaucgcggguuucauagaaaaugguugggagggaaugguggaugguugguacgguuucaggcaucaaaauucugagggaagaggacaagcagcagaucucaaaagcacucaagcagcaaucgaucaaaucaaugggaagcugaauagauugaucgggaaaaccaacgagaaguuccaucagauugaaaaagaauucucagaagucgaagggagaauucaggaccuugagaaauauguugaggacacuaaaauagaucucuggucauacaacgcggagcuucuuguugcccuggagaaccaacauacaauugaucuaacugacucagaaaugaacaaacuguuugaaaaaacaaagaagcaacugagggaaaaugcugaggauaugggcaaugguuguuucaaaauauaccacaaaugugacaaugccugcauaggaucaaucagaaauggaacuuaugaccacgauguauacagagaugaagcauuaaacaaccgguuucagaucaagggaguugagcugaagucaggguacaaagauuggauccuauggauuuccuuugccauaucauguuuuuugcuuuguguugcuuuguugggguucaucaugugggccugccaaaaaggcaacauuaggugcaacauuugcauuuga

SEQ ID NO: 41527 - RNA, 1701 nt, Artificial Sequence
  derived and/or modified CDS sequence (wt) from hemagglutinin__InfluenzaA__AFN19575
augaagaccaucauugcuuugagcuacauucuaugucugguuuucgcucaaaaacuuccuggaaaugacaacagcacggcaacgcugugccuugggcaccaugcaguaccaaacggaacgauagugaaaacaaucacgaaugaccaaauugaaguuacuaaugcuacugagcugguucagaguuccucaacaggugaaauaugcgacaauccucaucagauccuugauggagaaaacugcacacuaauagaugcucuauugggagacccucagugugauggcuuccaaaauaagaaaugggaccuuuuuguugaacgaagcaaagccuacagcaacuguuacccuuaugaugugccggauuaugccucccuuaggucacuaguugccucauccggcacacuggaguuuaacaaugaaagcuucaauuggacuggagucacucaaaacggaacaagcucugcuugcauaaggagaucuaauaauaguuucuuuaguagauugaauugguugacccacuuaaacuucaaauacccagcauugaacgugacuaugccaaacaaugaacaauuugacaaauuguacauuugggggguucaccacccggguacggacaaggaccaaaucuuccuguaugcucaaucaucaggaagaaucacaguaucuaccaaaagaagccaacaagcuguaaucccgaauaucgggucuagacccagaguaaggaauaucccuagcagaauaagcaucuauuggacaauaguaaagccgggagacauacuuuugauuaacagcacagggaaucuaauugcuccuagggguuacuucaaaauacgaagugggaaaagcucaauaaugagaucagaugcacccauuggcaaaugcaauucugaaugcaucacuccaaauggaagcauucccaaugacaaaccauuccaaaauguaaacaggaucacauacggggccugucccagauauguuaagcaaagcacucugaaauuggcaacaggaaugcgaaauguaccagagaaacaaacuagaggcauauuuggcgcaauagcggguuucauagaaaaugguugggagggaaugguggaugguugguacgguuucaggcaucaaaauucugagggaagaggacaagcagcagaucucaaaagcacucaagcagcaaucgaucaaaucaaugggaagcugaauagauugaucgggaaaaccaacgagaaauuccaucagauugaaaaagaauucucagaagucgaagggagaauucaggaccuugagaaauauguugaggacacuaaaauagaucucuggucauacaacgcggagcuucuuguugcccuggagaaccaacauacaauugaucuaacugacucagaaaugaacaaacuguuugaaaaaacaaagaagcaacugagggaaaaugcugaggauaugggcaaugguuguuucaaaauauaccacaaaugugacaaugccugcauaggaucaaucagaaauggaacuuaugaccacgauguauacagagaugaagcauuaaacaaccgguuccagaucaaaggaguugagcuuaagucaggguacaaagauuggauccuauggauuuccuuugccauaucauguuuuuugcuuuguguugcuuuguugggguucaucaugugggccugccaaaaaggcaacauuaggugcaacauuugcauuuga

SEQ ID NO: 41528 - RNA, 1701 nt, Artificial Sequence; identical to SEQ ID NO: 41450
  derived and/or modified CDS sequence (wt) from hemagglutinin__InfluenzaA__AFN19577

SEQ ID NO: 41529 - RNA, 1701 nt, Artificial Sequence
  derived and/or modified CDS sequence (wt) from hemagglutinin__InfluenzaA__AFN19579
augaagacuaucauugcuuugagcuacauucuaugucugguuuucgcucaaaaacuuccugaaaaugacaacagcacggcaacgcugugccuugggcaccaugcaguaccaaacggaacgauagugaaaacaaucacgaaugaccaaauugaaguuacuaaugcuacugagcugguucagaguuccucaacaggugaaauaugcgacaguccucaucagauccuugauggaguaaacugcacacuaauagaugcucuauugggagacccucagugugauggcuuccaaaauaagaagugggaccuuuuuguugaacgaagcaaagccuacagcaacuguuacccuuaugaugugccggauuaugccucccuuaggucacuaguugccucauccggcacacuggaguuuaacaaugaaagcuucaauuggacuggagucacucaaaacggaacaagcucugcuugcauaaggagaucuaauaguaguuucuuuaguagauugaauugguugacccacuuaaacuucaaauacccagcauugaacgugacuaugccaaacaaugaacaauuugacaaauuguacauuugggggguucaccacccggguacggacaaggaccaaaucuuccuguaugcucaaucaucaggaagaaucacaguaucuaccaaaagaagccaacaagcuguaaucccgaauaucggaucuagacccagaauaaggaauaucccuagcagaauaagcaucuauuggacaauaguaaaaccgggagacauacuuuugauuaacagcacagggaaucuaauugcuccuagggguuacuucaaaauacgaagugggaaaagcucaauaaugagaucagaugcacccauuggcaaaugcaauucugaaugcaucacuccaaauggaagcauucccaaugacaaaccauuccaaaauguaaacaggaucacauacggggccugucccagauauguuaagcaaagcacucugaaauuggcaacaggaaugcgaaauguaccagagaaacaaacuagaggcauauuuggcgcaauagcggguuucauagaaaaugguugggagggaaugguggaugguugguacgguuucaggcaucaaaauucugagggaagaggacaagcagcagaucucaaaagcacucaagcagcaaucgaucaaaucaaugggaagcugaaucgauugaucgggaaaaccaacgagaaauuccaucagauugaaaaagaauucucagaagucgaagggagaauucaggaccuugagaaauaugucgaggacacuaaaauagaucucuggucauacaacgcggagcuucuuguugcccuggagaaccaacauacaauugaucuaacugacucagaaaugaacaaacuguuugaaaaaacaaagaagcaacugagggaaaaugcugaggauaugggcaaugguuguuucaaaauauaccacaaaugugacaaugccugcauaggaucaaucagaaauggaacuuauaaccacgauguauacagagaugaagcauuaaacaaccgguuccagaucaagggaguugagcugaagucaggguacaaagauuggauccuauggauuuccuuugccauaucauguuuuuugcuuuguguugcuuuguugggguucaucaugugggccugccaaaaaggcaacauuaggugcaacauuugcauuuga

SEQ ID NO: 41530 - RNA, 1701 nt, Artificial Sequence; identical to SEQ ID NO: 41450
  derived and/or modified CDS sequence (wt) from hemagglutinin__InfluenzaA__AFN19581

SEQ ID NO: 41531 - RNA, 1701 nt, Artificial Sequence; identical to SEQ ID NO: 41450
  derived and/or modified CDS sequence (wt) from hemagglutinin__InfluenzaA__AFN19583

SEQ ID NO: 41532 - RNA, 1701 nt, Artificial Sequence
  derived and/or modified CDS sequence (wt) from hemagglutinin__InfluenzaA__AFN19587
augaagacuaucauugcuuugagcuacauucuaugucugguuuucgcucaaaaacuuccugaaaaugacaacagcacggcaacgcugugccuugggcaccaugcaguaccaaacggaacgauagugaaaacaaucacgaaugaccaaauugaaguuacuaaugcuacugagcugguucagaguuccucaacaggugaaauaugcgacaguccucaucagauccuugauggaguaaacugcacacuaauagaugcucuauugggagacccucagugugauggcuuccaaaauaagaagugggaccuuuuuguugaacgaagcaaagccuacagcaacuguuacccuuaugaugugccggauuaugccucccuuaggucacuaguugccucauccggcacacuggaguuuaacaaugaaagcuucaauuggacuggagucacucaaaacggaacaagcucugcuugcauaaggagaucuaauaguaguuucuuuaguagauugaauugguugacccacuuaaacuucaaauacccagcauugaacgugacuaugccaaacaaugaacaauuugacaaauuguacauuugggggguucaccacccggguacggacaaggaccaaaucuuccuguaugcucaaucaucaggaagaaucacaguaucuaccaaaagaagccaacaagcuguaaucccgaauaucggaucuagacccagaauaaggaauaucccuagcagaauaagcaucuauuggacaauaguaaaaccgggagacauacuuuugauuaacagcacagggaaucuaauugcuccuagggguuacuucaaaauacgaagugggaaaagcucaauaaugagaucagaugcacccauuggcaaaugcaauucugaaugcaucacuccaaauggaagcauucccaaugacaaaccauuccaaaauguaaacaggaucacauacggggccugucccagauauguuaagcaaagcacucugaaauuggcaacaggaaugcgaaauguaccagagaaacaaacuagaggcauauuuggcgcaauagcggguuucauagaaaaugguugggagggaaugguggaugguugguacgguuucaggcaucaaaauucugagggaagaggacaagcagcagaucucaaaagcacucaagcagcaaucgaucaaaucaaugggaagcugaaucgauugaucgggaaaaccaacgagaaauuccaucagauugaaaaagaauucucagaagucgaagggagaauucaggaccuugagaaauaugucgaggacacuaaaauagaucucuggucauacaacgcggagcuucuuguugcccuggagaaccaacauacaauugaucuaacugacucagaaaugaacaaacuguuugaaaaaacaaagaagcaacugagggaaaaugcugaggauaugggcaaugguuguuucaaaauauaccacgaaugugacaaugccugcauaggaucaaucagaaauggaacuuauaaccacgauguauacagagaugaagcauuaaacaaccgguuccagaucaagggaguugaacugaagucaggguacaaagauuggauccuauggauuuccuuugccauaucauguuuuuugcuuuguguugcuuuguugggguucaucaugugggccugccaaaagggcaacauuaggugcaacauuugcauuuga

SEQ ID NO: 41533 - RNA, 1701 nt, Artificial Sequence; identical to SEQ ID NO: 41442
  derived and/or modified CDS sequence (wt) from hemagglutinin__InfluenzaA__AFN19589

SEQ ID NO: 41534 - RNA, 1701 nt, Artificial Sequence
  derived and/or modified CDS sequence (wt) from hemagglutinin__InfluenzaA__AFN19591
augaagacuaucauugcccuaagcuacauucuaugucugguuuucgcucaaaaacuuccuggaaaugacaacagcacggcaacgcugugccuugggcaccaugcaguaccaaacggaacgauagugaaaacaaucacgaaugaccaaauugaaguuacuaaugcuacugagcugguucagaauuccucaauaggugaaauaugcgacaguccucaucagauccuugauggagaaaacugcacacuaauagaugcucuauugggagacccucagugugauggcuuccaaaauaagaaaugggaccuuuuuguugaacgaagcaaagccuacagcaacuguuacccuuaugaugugccggauuaugccucccuuaggucacuaguugccucauccggcacacuggaguuuaacaaugaaagcuucaauuggacuggagucacucaaaacggaacaaguucugcuugcaugaggagaucuaauaguaguuucuuuaguagauugaauugguugacccacuuaaacuucaaauacccagcauugaacgugacuaugccaaacaaugaacaauuugacaaauuguacauuugggggguucaccacccggguacggacaaggaccaaaucuuccuguaugcucaaucaucaggaagaaucacaguaucuaccaaaagaagccaacaagcuguaaucccgaauaucgggucuagacccagaauaagaaauaucccuagcagaauaagcaucuauuggacaauaguaaaaccgggagacauacuuuugauuaacagcacagggaaucuaauugcuccuagggguuacuucaaaauacgaagugggaaaagcucaauaaugagaucagaugcacccauuggcaaaugcaauucugaaugcaucacuccaaauggaagcauucccaaugacaaaccauuccaaaauguaaacaggaucacauacggggccugucccagauauguuaagcaaagcacucugaaauuggcaacaggaaugcgaaauguaccagagaaacaaacuagaggcauauuuggcgcaauagcggguuucauagaaaaugguugggagggaaugguggaugguugguacgguuucaggcaucaaaauucugagggaagaggacaagcagcagaucucaaaagcacucaagcagcaaucgaucaaaucaaugggaagcugaaucgauugaucgggaaaaccaacgagaaauuccaucagauugaaaaagaauucucagaagucgaagggagaauucaggaccuugagaaauauguugaggacacuaaaauagaucucuggucauacaacgcggagcuucuuguugcccuggagaaccaacauacaauugaucuaacugacucagaaaugaacaaacuguuugaaaaaacaaagaagcaacugagggaaaaugcugaggauaugggcaaugguuguuucaaaauauaccacaaaugugacaaugccugcauaggaucaaucagaaauggaacuuaugaccacgauguauacagagaugaagcauuaaacaaccgguuccagaucaagggaguugagcugaagucaggguacaaagauuggauccuauggauuuccuuugccauaucauguuuuuugcuuuguguugcuuuguugggguucaucaugugggccugccaaaauggcaacauuaggugcaacauuugcauuuga

SEQ ID NO: 41535 - RNA, 1701 nt, Artificial Sequence
  derived and/or modified CDS sequence (wt) from hemagglutinin__InfluenzaA__AFN19593
augaagacuaucauugcuuugagcuacauucuaugucugguuuucgcucaaaaacuuccugaaaaugacaacagcacggcaacgcugugccuugggcaccaugcaguaccaaacggaacgauagugaaaacaaucacgaaugaccaaauugaaguuacuaaugcuacugagcugguucagaguuccucaacaggugaaauaugcgacaguccucaucagauccuugauggaguaaacugcacacuaauagaugcucuauugggagacccucagugugauggcuuccaaaauaagaagugggaccuuuuuguugaacgaagcaaagccuacagcaacuguuacccuuaugaugugccggauuaugccucccuuaggucacuaguugccucauccggcacacuggaguuuaacaaugaaagcuucaauuggacuggagucacucaaaacggaacaagcucugcuugcauaaggagaucuaauaguaguuucuuuaguagauugaauugguugacccacuuaaacuucaaauacccagcauugaacgugacuaugccaaacaaugaacaauuugacaaauuguacauuugggggguucaccacccggguacggacaaggaccaaaucuuccuguaugcucaaucaucaggaagaaucacaguaucuaccaaaagaagccaacaagcuguaaucccgaauaucggaucuagacccagaauaaggaauaucccuagcagaauaagcaucuauuggacaauaguaaaaccgggagacauacuuuugauuaacagcacagggaaucuaauugcuccuagggguuacuucaaaauacgaagugggaaaagcucaauaaugagaucagaugcacccauuggcaaaugcaauucugaaugcaucacuccaaauggaagcauucccaaugacaaaccauuccaaaauguaaacagaaucacauacggggccugucccagauauguuaagcaaagcacucugaaauuggcaacaggaaugcgaaauguaccagagaaacaaacuagaggcauauuuggcgcaauagcggguuucauagaaaaugguugggagggaaugguggaugguugguacgguuucaggcaucaaaauucugagggaagaggacaagcagcagaucucaaaagcacucaagcagcaaucgaucaaaucaaugggaagcugaaucgauugaucgggaaaaccaacgagaaauuccaucagauugaaaaagaauucucagaagucgaagggagaauucaggaccuugagaaauauguugaggacacuaaaauagaucucuggucauacaacgcggagcuucuuguugcccuggagaaccaacauacaauugaucuaacugacucagaaaugaacaaacuguuugaaaaaacaaagaagcaacugagggaaaaugcugaggauaugggcaaugguuguuucaaaauauaccacaaaugugacaaugccugcauaggaucaaucagaaauggaacuuauaaccacgauguauacagagaugaagcauuaaacaaccgguuccagaucaagggaguugagcugaagucaggguacaaagauuggauccuauggauuuccuuugccauaucauguuuuuugcuuuguguugcuuuguugggguucaucaugugggccugccaaaagggcaacauuaggugcaacauuugcauuuga

SEQ ID NO: 41536 - RNA, 1701 nt, Artificial Sequence; identical to SEQ ID NO: 41443
  derived and/or modified CDS sequence (wt) from hemagglutinin__InfluenzaA__AFN19595

SEQ ID NO: 41537 - RNA, 1701 nt, Artificial Sequence
  derived and/or modified CDS sequence (wt) from hemagglutinin__InfluenzaA__AFN19599
augaagacuaucauugcuuugagcuacauucuaugucugguuuucgcucaaaaacuuccuggaaaugacaacagcacggcaacgcugugccuuggccaccaugcaguaccaaacggaacgauagugaaaacaaucacgaaugaccaaauugaaguuacuaaugcuacugagcugguucagaauuccucaauaggugaaauaugcgacaguccucaucagauccuugauggagaaaacugcacacuaauagaugcucuauugggagacccucagugugauggcuuccaaaauaagaaaugggaccuuuuuguugaacgaagcaaagccuacagcaacuguuacccuuaugaugugccggauuaugccucccuuaggucacuaguugccucauccggcacacuggaguuuaacaaugaaagcuucaauuggacuggagucacucaaaacggaacaaguucugcuugcauaaggagaucuaauaauaguuucuuuaguagauuaaauugguugacccacuuaaacuucaaauacccagcauugaacgugacuaugccaaacaaugaacaauuugacaaauuguacauuugggggguucaccacccggguacggacaaggaccaaaucuuccuguaugcucaaucaucaggaagaaucacaguaucuaccaaaagaagccaacaagcuguaaucccgaauaucggaucuagacccagaauaaggaauaucccuagcagaauaagcaucuauuggacaauaguaaaaccgggggacauacuuuugauuaacagcacagggaaucuaauugcuccuagggguuacuucaaaauacgaagugggaaaagcucaauaaugagaucagaugcacccauuggcaaaugcaauucugaaugcaucacuccaaauggaagcauucccaaugacaaaccauuccaaaauguaaacaggaucacauacggggccugucccagauauguuaagcaaagcacucugaaauuggcaacaggaaugcgaaauguaccagagaaacaaacuagaggcauauuuggcgcaauagcggguuucauagaaaaugguugggagggaaugguggaugguugguacgguuucaggcaucaaaauucugagggaagaggacaagcagcagaucucaaaagcacucaagcagcaaucgaucaaaucaaugggaagcugaaucgauugaucgggaaaaccaacgagaaauuccaucagauugaaaaagaauucucagaagucgaagggagaauucaggaccuugagaaauauguugaggacacuaaaauagaucucuggucauacaacgcggagcuucuuguugcccuggagaaccaacauacaauugaucuaacugacucagaaaugaacaaacuguuugaaaaaacaaagaagcaacugagggaaaaugcugaggauaugggcaaugguuguuucaaaauauaccacaaaugugacaaugccugcauaggaucaaucagaaauggaacuuaugaccacgauguauacagagaugaagcauuaaacaaccgguuccagaucaagggaguugagcugaagucaggguacaaagauuggauccuauggauuuccuuugccauaucauguuuuuugcuuuguguugcuuuguugggguucaucaugugggccugccaaaagggcaacauuaggugcaacauuugcauuuga

SEQ ID NO: 41538 - RNA, 1701 nt, Artificial Sequence
  derived and/or modified CDS sequence (wt) from hemagglutinin__InfluenzaA__AFN19601
augaagacuaucauugcuuugagcuacauucuaugucugguuuucgcucaaaaacuuccuggaaaugacaacagcacggcaacgcugugccuugggcaccaugcaguaccaaacggaacgauagugaaaacaaucacgaaugaccaaauugaaguuacuaaugcuacugagcugguucagaauuccucaauaggugaaauaugcgacaguccucaucagauccuugauggagaaaacugcacacuaauagaugcucuauugggagacccucagugugauggcuuccaaaauaagaaaugggaccuuuuuguugaacgaagcaaagccuacagcaacuguuacccuuaugaugugccggauuaugccucccuuaggucacuaguugccucauccggcacacuggaguuuaacaaugaaagcuucaauuggacuggagucacucaaaacggaacaaguucugcuugcauaaggagaucuaauaguaguuucuuuaguagauugaauugguugacccacuuaaacuucaaauacccagcauugaacgugacuaugccaaacaaugaacaauuugacaaauuguacauuugggggguucaccacccggguacggacaaggaccaaaucuuccuguaugcucaaucaucaggaagaaucacaguaucuaccaaaagaagccaacaagcuguaaucccgaauaucggaucuagacccagaauaagaaauaucccuagcagaauaagcaucuauuggacaauaguaaaaccgggagacauacuuuugauuaacagcacagggaaucuaauugcuccuagggguuacuucaaaauacgaagugggaaaagcucaauaaugagaucagaugcacccauuggcaaaugcaauucugaaugcaucacuccaaauggaagcauucccaaugacaaaccauuccaaaauguaaacaggaucacauacggggccugucccagauauguuaagcaaagcacucugaaauuggcaacaggaaugcgaaauguaccagagaaacaaacuagaggcauauuuggcgcaauagcggguuucauagaaaaugguugggagggaaugguggaugguugguacgguuucaggcaucaaaauucugagggaagaggacaagcagcagaucucaaaagcacucaagcagcaaucgaucaaaucaaugggaagcugaaucgauugaucgggaaaaccaacgagaaauuccaucagauugaaaaagaauucucagaagucgaagggagaauucaggaccuugagaaauauguugaggacacuaaaauagaucucuggucauacaacgcggagcuucuuguugcccuggagaaccaacauacaauugaucuaacugacucagaaaugaacaaacuguuugaaaaaacaaagaagcaacugagggaaaaugcugaggauaugggcaaugguuguuucaaaauauaccacaaaugugacaaugccugcauaggaucaaucagaaauggaacuuaugaccacgauguauacagagaugaagcauuaaacaaccgguuccagaucaagggaguugagcugaagucaggguacaaagauuggauccuauggauuuccuuugccauaucauguuuuuugcuuuguguugcuuuguugggguucaucaugugggccugccaaaagggcaacauuaggugcaacauuugcauuuga

SEQ ID NO: 41539 - RNA, 1701 nt, Artificial Sequence; identical to SEQ ID NO: 41436
  derived and/or modified CDS sequence (wt) from hemagglutinin__InfluenzaA__AFN19607

SEQ ID NO: 41540 - RNA, 1701 nt, Artificial Sequence; identical to SEQ ID NO: 41450
  derived and/or modified CDS sequence (wt) from hemagglutinin__InfluenzaA__AFN19609

SEQ ID NO: 41541 - RNA, 1701 nt, Artificial Sequence
  derived and/or modified CDS sequence (wt) from hemagglutinin__InfluenzaA__AFN19611
augaagacuaucauugcuuugagcuacauucuaugucugguuuucgcucaaaaacuuccuggaaaugacaacagcacggcaacgcugugccuugggcaccaugcaguaccaaacggaacgauagugaaaacaaucacgaaugaccaaauugaaguuacuaaugcuacugagcugguucagaauuccucaauaggugaaauaugcgacaguccucaucagauccuugauggagaaaacugcacacuaauagaugcucuauugggagacccucagugugauggcuuccaaaauaagaaaugggaccuuuuuguugaacgaagcaaagccuacagcaacuguuacccuuaugaugugccggauuaugccucccuuaggucacuaguugccucauccggcacacuggaguuuaacaaugaaagcuucaauuggacuggagucacucaaaacggaacaaguucugcuugcauaaggagaucuaauaauaguuucuuuaguagauuaaauugguugacccacuuaaacuucaaauacccagcauugaacgugacuaugccaaacaaugaacaauuugacaaauuguacauuugggggguucaccacccggguacggacaaggaccaaaucuuccuguaugcucaaucaucaggaagaaucacaguaucuaccaaaagaagccaacaagcuguaaucccgaauaucggaucuagacccagaauaaggaauaucccuagcagaauaagcaucuauuggacaauaguagaaccgggagacauacuuuugauuaacagcacagggaaucuaauugcuccuagggguuacuucaaaauacgaagugggaaaagcucaauaaugagaucagaugcacccauuggcaaaugcaauucugaaugcaucacuccaaauggaagcauucccaaugacaaaccauuccaaaauguaaacaggaucacauacggggccugucccagauauguuaagcaaagcacucugaaauuggcaacaggaaugcgaaauguaccagagaaacaaacuagaggcauauuuggcgcaauagcggguuucauagaaaaugguugggagggaaugguggaugguugguacgguuucaggcaucaaaauucugagggaagaggacaagcagcagaucucaaaagcacucaagcagcaaucgaucaaaucaaugggaagcugaaucgauugaucgggaaaaccaacgagaaauuccaucagauugaaaaagaauucucagaagucgaagggagaauucaggaccuugagaaauauguugaggacacuaaaauagaucucuggucauacaacgcggagcuucuuguugcccuggagaaccaacauacaauugaucuaacugacucagaaaugaacaaacuguuugaaaaaacaaagaagcaacugagggaaaaugcugaggauaugggcaaugguuguuucaaaauauaccacaaaugugacaaugccugcauaggaucaaucagaaauggaacuuaugaccacgauguauacagagaugaagcauuaaacaaccgguuccagaucaagggaguugagcugaagucaggguacaaagauuggauccuauggauuuccuuugccauaucauguuuuuugcuuuguguugcuuuguugggguucaucaugugggccugccaaaagggcaacauuaggugcaacauuugcauuuga

SEQ ID NO: 41542 - RNA, 1701 nt, Artificial Sequence; identical to SEQ ID NO: 41471
  derived and/or modified CDS sequence (wt) from hemagglutinin__InfluenzaA__AFN19613

SEQ ID NO: 41543 - RNA, 1701 nt, Artificial Sequence
  derived and/or modified CDS sequence (wt) from hemagglutinin__InfluenzaA__AFN19617
augaagacuaucauugcuuugagcuacauucuaugucugguuuucgcucaaaaacuuccuggaaaugacaacagcacggcaacgcugugccuugggcaccaugcaguaccaaacggaacgauagugaaaacaaucacgaaugaccaaauugaaguuacuaaugcuacugagcugguucagaauuccucaauaggugaaauaugcgacaguccucaucagauccuugauggagaaaacugcacacuaauagaugcucuauugggagacccucagugugauggcuuccaaaauaagaaaugggaccuuuuuguugaacgaagcaaagccuacagcaacuguuacccuuaugaugugccggauuaugccucccuuaggucacuaguugccucauccggcacacuggaguuuaacaaugaaagcuucaauuggacuggagucacucaaaacggaacaaguucugcuugcauaaggagaucuaauaauagcuucuuuaguagauuaaauugguugacccacuuaaacuucaaauacccagcauugaacgugacuaugccaaacaaugaacaauuugacaaauuguacauuugggggguucaccacccggguacggacaaggaccaaaucuuccuauaugcucaaucaucaggaagaaucacaguaucuaccaaaagaagccaacaagcuguaaucccgaauaucggaucuagacccagaauaaggaauaucccuagcagaauaagcaucuauuggacaauaguaaaaccgggagacauacuuuugauuaacagcacagggaaucuaauugcuccuagggguuacuucaaaauacgaagugggaaaagcucaauaaugagaucagaugcacccauuggcaaaugcaauucugaaugcaucacuccaaauggaagcauucccaaugacaaaccauuccaaaauguaaacaggaucacauacggggccugucccagauauguuaagcaaagcacucugaaauuggcaacaggaaugcgaaauguaccagagaaacaaacuagaggcauauuuggugcaauagcggguuucauagaaaaugguugggagggaaugguggaugguugguacgguuucaggcaucaaaauucugagggaagaggacaagcagcagaucucaaaagcacucaagcagcaaucgaucaaaucaaugggaagcugaaucgauugaucgggaaaaccaacgagaaauuccaucagauugaaaaagaauucucagaagucgaagggagaauucaggaccuugagaaauauguugaggacacuaaaauagaucucuggucauacaacgcggagcuucuuguugcccuggagaaccaacauacaauugaucuaacugacucagaaaugaacaaacuguuugaaaaaacaaagaagcaacugagggaaaaugcugaggauaugggcaaugguuguuucaaaauauaccacaaaugugacaaugccugcauaggaucaaucagaaauggaacuuaugaccacgauguauacagagaugaagcauuaaacaaccgguuccagaucaagggaguugagcugaagucaggguacaaagauuggauccuauggauuuccuuugccauaucauguuuuuugcuuuguguugcuuuguugggguucaucaugugggccugccaaaagggcaacauuaggugcaacauuugcauuuga

SEQ ID NO: 41544 - RNA, 1701 nt, Artificial Sequence
  derived and/or modified CDS sequence (wt) from hemagglutinin__InfluenzaA__AFN19619
augaagacuaucauugcuuugagccacauucuaugucugguuuucgcucaaaaacuuccuggaaaugacaacagcacggcaacgcugugccuugggcaccaugcaguaccaaacggaacgauagugaaaacaaucacgaaugaccaaauugaaguuacuaaugcuacugagcugguucagaguuccucaacaggugaaauaugcgacaguccucaucagauccuugauggagaaaacugcacacuaauagaugcucuauugggagacccucagugugauggcuuccaaaauaagaagugggaccuuuuuguugaacgaagcaaagccuacagcaacuguuacccuuaugaugugccggauuaugccucccuuaggucacuaguugccucauccggcacacuggaguuuaacaaugaaagcuucaauuggacuggagucacucaaaacggaacaagcucugcuugcauaaggagaucuaauaguaguuucuuuaguagauugaauugguugacccacuuaaacuucaaauacccagcauugaacgugacuaugccaaacaaugaacaauuugacaaauuguacauuugggggguucaccacccggguacggacaaggaccaaaucuuccuguaugcucaaucaucaggaagaaucacaguaucuaccaaaagaagccaacaagcuguaaucccgaauaucggaucuaaacccagaauaaggaauaucccuagcagaauaagcaucuauuggacaauaguaaaaccgggagacauacuuuugauuaacagcacagggaaucuaauugcuccuagggguuacuucaaaauacgaagugggaaaagcucaauaaugagaucagaugcacccauuggcaaaugcaauucugaaugcaucacuccaaauggaagcauucccaaugacaaaccauuccaaaauguaaacaggaucacauacggggccugucccagauauguuaagcaaagcacucugaaauuggcaacaggaaugcgaaauguaccagagaaacaaacuagaggcauauuuggcgcaauagcggguuucauagaaaaugguugggagggaaugguggaugguugguacgguuucaggcaucaaaauucugagggaagaggacaagcagcagaucucaaaagcacucaagcagcaaucgaucaaaucaaugggaagcugaaucgauugaucgggaaaaccaacgagaaauuccaucagauugaaaaagaauucucagaagucgaagggagaauucaggaccuugagaaauauguugaggacacuaaaauagaucucuggucauacaacgcggagcuucuuguugcccuggagaaccaacauacaauugaucuaacugacucagaaaugaacaaacuguuugaaaaaacaaagaagcaacugagggaaaaugcugaggauaugggcaaugguuguuucaaaauauaccacaaaugugacaaugccugcauaggaucaaucagaaauggaacuuauaaccacgauguauacagagaugaagcauuaaacaaccgguuccagaucaagggaguugagcugaagucaggguacaaagauuggauccuauggauuuccuuugccauaucauguuuuuugcuuuguguuguuuuguugggguucaucaugugggccugccaaaagggcaacauuaggugcaacauuugcauuuga

SEQ ID NO: 41545 - RNA, 1701 nt, Artificial Sequence; identical to SEQ ID NO: 41505
  derived and/or modified CDS sequence (wt) from hemagglutinin__InfluenzaA__AFN19623

SEQ ID NO: 41546 - RNA, 1701 nt, Artificial Sequence; identical to SEQ ID NO: 41450
  derived and/or modified CDS sequence (wt) from hemagglutinin__InfluenzaA__AFN19629

SEQ ID NO: 41547 - RNA, 1701 nt, Artificial Sequence
  derived and/or modified CDS sequence (wt) from hemagglutinin__InfluenzaA__AFN19631
augaagacuaucauugcuuugagcuacauucuaugucugguuuucgcucaaaaacuuccugaaaaugacuacagcacggcaacgcugugucuugggcaucaugcaguaccaaacggaacgauagugaaaacaaucacgaaugaccaaauugaaguuacuaaugcuacugagcugguucagaguuccucaacaggugaaauaugcgacaguccucaucagauccuugauggaauaaacugcacacuaauagaugcucuauugggagacccucagugugauggcuuccaaaauaagaagugggaccuuuuuguugaacgaagcaaagccuacagcaacuguuacccuuaugauguuccggauuaugccucccuuaggucacuaguugccucauccggcacacuggaguuuaacaaugaaagcuucaauuggacuggagucacucaaaacggaacaagcucugcuugcauaaggagaucuacuaguaguuucuuuaguagauugaauugguugacccacuuaaacuucaaauacccagcauugaacgugacuaugccaaacaaugaacaauuugacaaauuguacauuugggggguucaccacccggguacggacaaggaccaaaucuuccuguaugcucaaccaucaggaagaaucacaguaucuacaaaaagaagccaacaagcuguaaucccgaauaucggaucuagacccagaauaaggaauaucccuagcagaauaagcaucuauuggacaauaguaaaaccgggagacauacuuuugauuaacagcacagggaaucuaauugcuccuagggguuacuucaaaauacgaagugggaaaagcucaauaaugagaucagaugcacccauuggcaaaugcaauucugaaugcaucacuccaaauggaagcauucccaaugacaaaccauuccaaaauguaaacaggaucacauacggggccugucccagauauguuaagcaaagcacucugaaauuggcaacaggaaugcgaaauguaccagagaaacaaacuagaggcauauuuggcgcaauagcugguuucauagaaaaugguugggagggaaugguggaugguugguacgguuucaggcaucaaaauucugagggaagaggacaagcagcagaucucaaaagcacucaagcagcaaucgaucaaaucaaugggaagcugaaucgauugaucgggaaaaccaacgagaaauuccaucagauugaaaaagaauucucagaagucgaagggagaauucaggaccuugagaaauauguugaggacacuaaaauagaucucuggucauacaacgcggagcuucuuguugcccuggagaaccaacauacaauugaucuaacugacucagaaaugaacaaacuuuuugaaaaaacaaagaagcaacugagggaaaaugcugaggauaugggcaaugguuguuucaaaauauaccacaaaugugacaaugccugcauaggaucaaucagaaauggaacuuauaaccacgauguauacagagaugaagcauuaaacaaccgguuccagaucaagggaguugagcugaagucaggguacaaagauuggauccuauggauuuccuuugccauaucauguuuuuugcuuuguguugcuuuguugggguucaucaugugggccugccaaaagggcaacauuaggugcaacauuugcauuuga

SEQ ID NO: 41548 - RNA, 1701 nt, Artificial Sequence
  derived and/or modified CDS sequence (wt) from hemagglutinin__InfluenzaA__AFN19633
augaagacuaucauugcuuugagcuacauucuaugucugguuuucgcucaaaaacuuccuggaaaugacaacagcacggcaacgcugugccuugggcaccaugcaguaccaaacggaacgauagugaaaacaaucacgaaugaccaaauugaaguuacuaaugcuacugagcugguucagaguuccucaacaggugaaauaugcgacaguccucaucagauccuugauggagaaaacugcacacuaauagaugcucuauugggagacccucagugugauggcuuccaaaauaagaagugggaccuuuuuguugaacgaagcaaagccuacagcaacuguuacccuuaugaugugccggauuaugccucccuuaggucacuaguugccucauccggcacacuggaguuuaacaaugaaagcuucaauuggacuggagucacucaaaacggaacaagcucugcuugcauaaggagaucuaauaguaguuucuuuaguagauugaauugguugacccacuuaaacuucaaauacccagcauugaacgugacuaugccaaacaaugaacaauuugacaaauuguacauuugggggguucaccacccggguacggacaaggaccaaaucuuccuguaugcucaaucaucaggaagaaucacaauaucuaccaaaagaagccaacaagcuguaaucccgaauaucggaucuagacccagaauaaggaauaucccuagcagaauaagcaucuauuggacaauaguaaaaccgggagacauacuuuugauuaacagcacagggaaucuaauugcuccuagggguuacuucaaaauacgaagugggaaaagcucaauaaugagaucagaugcacccauuggcaaaugcaauucugaaugcaucacuccaaauggaagcauucccaaugacaaaccauuccaaaauguaaacaggaucacauacggggccugucccagauauguuaagcaaagcacucugaaauuggcaacaggaaugcgaaauguaccagagaaacaaacuagaggcauauuuggcgcaauagcggguuucauagaaaaugguugggagggaaugguggaugguugguacgguuucaggcaucaaaauucugagggaagaggacaagcagcagaucucaaaagcacucaagcagcaaucgaucaaaucaaugggaagcugaaucgauugaucgggaaaaccaacgagaaauuccaucagauugaaaaagaauucucagaagucgaagggagaauucaggaccuugagaaauauguugaggacacuaaaauagaucucuggucauacaacgcggagcuucuuguugcccuggagaaccaacauacaauugaucuaacugacucagaaaugaacaaacuguuugaaaaaacaaagaagcaacugagggaaaaugcugaggauaugggcaaugguuguuucaaaauauaccacaaaugugacaaugccugcauaggaucaaucagaaauggaacuuauaaccacgauguauacagagaugaagcauuaaacaaccgguuccagaucaagggaguugagcugaagucaggguacaaagauuggauccuauggauuuccuuugccauaucauguuuuuugcuuuguguugcuuuguugggguucaucaugugggccugccaaaagggcaacauuaggugcaacauuugcauuuga

SEQ ID NO: 41549 - RNA, 1701 nt, Artificial Sequence
  derived and/or modified CDS sequence (wt) from hemagglutinin__InfluenzaA__AFN19635
augaagacuaucauugcuuugagcuacauucuaugucugguuuucgcucaaaaacuuccugaaaaugacaacagcacggcaacgcugugucuugggcaccaugcaguaccaaacggaacgauagugaaaacaaucacgaaugaccaaauugaaguuacuaaugcuacugagcugguucagaguuccucaacaggugaaauaugcgacaguccucaucagauccuugauggaauaaacugcacacuaauagaugcucuauugggagacccucagugugauggcuuccaaaauaagaagugggaccuuuuuguugaacgaagcaaagccuacagcaacuguuacccuuaugaugugccggauuaugccucccuuaggucacuaguugccucauccggcacacuggaguuuaacaaugaaagcuucaauuggacuggagucacucaaaacggaacaagcucugcuugcauaaggagaucuaauaguaguuucuuuaguagauugaauugguugacccacuuaaacuucaaauacccagcauugaacgugacuaugccaaacaaugaacaauuugacaaauuguacauuugggggguucaccacccggguacggacaaggaccaaaucuuccuguaugcucaaccaucaggaagaaucacaguaucuacaaaaagaagccaacaagcuguaaucccgaauaucggaucuagacccagaauaaggaauaucccuagcagaauaagcaucuauuggacaauaguaaaaccgggagacauacuuuugauuaacagcacagggaaucuaauugcuccuagggguuacuucaaaauacgaagugggaaaagcucaauaaugagaucagaugcacccauuggcaaaugcaauucugaaugcaucacuccaaauggaagcauucccaaugacaaaccauuccaaaauguaaacaggaucacauacggggccugucccagauauguuaagcaaagcacucugaaauuggcaacaggaaugcgaaauguaccagagaaacaaacuagaggcauauuuggcgcaauagcggguuucauagaaaaugguugggagggaaugguggaugguugguacgguuucaggcaucaaaauucugagggaagaggacaagcagcagaucucaaaagcacucaagcagcaaucgaucaaaucaaugggaagcugaaucgauugaucgggaaaaccaacgagaaauuccaucagauugaaaaagaauucucagaagucgaagggagaauucaggaccuugagaaauauguugaggacacuaaaauagaucucuggucauacaacgcggagcuucuuguugcccuggagaaccaacauacaauugaucuaacugacucagaaaugaacaaacuguuugaaaaaacaaagaagcaacugagggaaaaugcugaggauaugggcaaugguuguuucaaaauauaccacaaaugugacaaugccugcauaggaucaaucagaaauggaacuuauaaccacgauguauacagagaugaagcauuaaacaaccgguuccagaucaagggaguugagcugaagucaggguacaaagauuggauccuauggauuuccuuugccauaucauguuuuuugcuuuguguugcuuuguugggguucaucaugugggccugccaaaagggcaacauuaggugcaacauuugcauuuga

SEQ ID NO: 41550 - RNA, 1701 nt, Artificial Sequence; identical to SEQ ID NO: 41549
  derived and/or modified CDS sequence (wt) from hemagglutinin__InfluenzaA__AFN19637

SEQ ID NO: 41551 - RNA, 1701 nt, Artificial Sequence; identical to SEQ ID NO: 41436
  derived and/or modified CDS sequence (wt) from hemagglutinin__InfluenzaA__AFN19639

SEQ ID NO: 41552 - RNA, 1701 nt, Artificial Sequence
  derived and/or modified CDS sequence (wt) from hemagglutinin__InfluenzaA__AFN19641
augaagacuaucauugcuuugagcuacauucuaugucugguuuucgcucaaaaacuuccuggaaaugacaacagcacggcaacgcugugccuugggcaccaugcaguaccaaacggaacgauagugaaaacaaucacgaaugaccaaauugaaguuacuaaugcuacugagcugguucagaauuccucaauaggugaaauaugcgacaguccucaucagauccuugauggagaaaacugcacacuaauagaugcucuauugggagacccucagugugauggcuuccaaaauaagaaaugggaccuuuuuguugaacgaagcaaagccuacagcaacuguuacccuuaugaugugccggauuaugccucccuuaggucacuaguugccucauccggcacacuggaguuuaacaaugaaagcuucaauuggacuggagucacucaaaacggaacaaguucugcuugcauaaggagaucuaauaguaguuucuuuaguagauugaauugguugacccacuuaaacuucaaauacccagcauugaacgugacuaugccaaacaaugaacaauuugacaaauuguacauuugggggguucaccacccggguacggacaaggaccaaaucuuccuguaugcucaaucaucaggaagaaucacaguaucuaccaaaagaagccaacaagcuguaaucccgaauaucggaucuagacccagaauaagaaauaucccuagcagaauaagcaucuauuggacaauaguaaaaccgggagacauacuuuugauuaacagcacagggaaucuaauugcuccuagggguuacuucaaaauacgaagugggaaaagcucaauaaugagaucagaugcacccauuggcaaaugcaauucugaaugcaucacuccaaauggaagcauucccaaugacaaaccauuccaaaauguaaacaggaucacauacggggccugucccagauauguuaagcaaagcacucugaaauuggcaacagggaugcgaaauguaccagagaaacaaacuagaggcauauuuggcgcaauagcggguuucauagaaaaugguugggagggaaugguggaugguugguacgguuucaggcaucaaaauucugaggggagaggacaagcagcagaucucaaaagcacucaagcagcaaucgaucaaaucaaugggaagcugaaucgauugaucgggaaaaccaacgagaaauuccaucagauugaaaaagaauucucagaagucgaagggagaauucaggaccuugagaaauauguugaggacacuaaaauagaucucuggucauacaacgcggagcuucuuguugcccuggagaaccaacauacaauugaucuaacugacucagaaaugaacaaacuguuugaaaaaacaaagaagcaacugagggaaaaugcugaggauaugggcaaugguuguuucaaaauauaccacaaaugugacaaugccugcauaggaucaaucagaaauggaacuuaugaccacgauguauacagagaugaagcauuaaacaaccgguuccagaucaagggaguugagcugaagucaggguacaaagauuggauccuauggauuucauuugccauaucauguuuuuugcuuuguguugcuuuguugggguucaucaugugggccugccaaaagggcaacauuaggugcaacauuugcauuuga

SEQ ID NO: 41553 - RNA, 1701 nt, Artificial Sequence; identical to SEQ ID NO: 41549
  derived and/or modified CDS sequence (wt) from hemagglutinin__InfluenzaA__AFN19643

SEQ ID NO: 41554 - RNA, 1701 nt, Artificial Sequence; identical to SEQ ID NO: 41436
  derived and/or modified CDS sequence (wt) from hemagglutinin__InfluenzaA__AFN19645

SEQ ID NO: 41555 - RNA, 1701 nt, Artificial Sequence
  derived and/or modified CDS sequence (wt) from hemagglutinin__InfluenzaA__AFN19647
augaagacuaucauugcuuugagcuacauucuaugucugguuuucgcucaaaaacuuccugaaaaugacaacagcacggcaacgcugugccuugggcaccaugcaguaccaaacggaacgauagugaaaacaaucacgaaugaccaaauugaaguuacuaaugcuacugagcugguucagaguuccucaacaggugaaauaugcgacaguccucaucagauccuugauggaguaaacugcacacuaauagaugcucuauugggagacccucagugugauggcuuccaaaauaagaagugggaccuuuuuguugaacgaagcaaagccuacagcaacuguuacccuuaugaugugccggauuaugccucccuuaagucacuaguugccucauccggcacacuggaguuuaacaaugaaagcuucaauuggacuggagucacucaaaacggaacaagcucugcuugcauaaggagaucuaauaguaguuucuuuaguagauugaauugguugacccacuuaaacuucaaauacccagcacugaacgugacuaugccaaacaaugaacaauuugacaaauuguacauuugggggguucaccacccggguacggacaaggaccaaaucuuccuguaugcucaaucaucaggaagaaucacaguaucuaccaaaagaagccaacaagcuguaaucccgaauaucggaucuagacccagaauaaggaauaucccuagcagaauaagcaucuauuggacaauaguaaaaccgggagacauacuuuugauuaacagcacagggaaucuaauugcuccuagggguuacuucaaaauacaaagugggaaaagcucaauaaugagaucagaugcacccauuggcaaaugcaauucugaaugcaucacuccaaauggaagcauucccaaugacaaaccauuccaaaauguaaacaggaucacauacggggccugucccagauauguuaagcaaagcacucugaaauuggcaacaggaaugcgaaauguaccagagaaacaaacuagaggcauauuuggcgcaauagcggguuucauagaaaaugguugggagggaaugguggaugguugguacgguuucaggcaucaaaauucugagggaagaggacaagcagcagaucucaaaagcacucaagcagcaaucgaucaaaucaaugggaagcugaaucgauugaucgggaaaaccaacgagaaauuccaucagauugaaaaagaauucucagaagucgaagggagaauucaggaccuugagaaauauguugaggacacuaaaauagaucucuggucauacaacgcggagcuucuuguugcccuggagaaccaacauacaauugaucuaacugacucagaaaugaacaaacuguuugaaaaaacaaagaagcaacugagggaaaaugcugaggauaugggcaaugguuguuucaaaauauaccacaaaugugacaaugccugcauaggaucaaucagaaauggaacuuauaaccacgauguauacagagaugaagcauuaaacaaccgguuccagaucaagggaguugagcugaagucaggguacaaagauuggauccuauggauuuccuuugccauaucauguuuuuugcuuuguguugcuuuguugggguucaucaugugggccugccaaaagggcaacauuaggugcaacauuugcauuuga

SEQ ID NO: 41556 - RNA, 1701 nt, Artificial Sequence
  derived and/or modified CDS sequence (wt) from hemagglutinin__InfluenzaA__AFN19649
augaagacuaucauugcuuugagcuacauucuaugucugguuuucgcucaaaaacuuccuggaaaugacaacagcacggcaacgcugugccuugggcaccaugcaguaccaaacggaacgauagugaaaacaaucacgaaugaccaaauugaaguuacuaaugcuacugagcugguucagaauuccucaauaagugaaauaugcgacaguccucaucagauccuugauggagaaaacugcacacuaauagaugcucuauugggagacccucagugugauggcuuccaaaauaagaaaugggaccuuuuuguugaacgaagcaaagccuacagcaacuguuacccuuaugaugugccggauuaugccucccuuaggucacuaguugccucauccggcacacuggaguuuaacaaugaaagcuucaauuggacuggagucacucaaaacggaacaaguucugcuugcauaaggagaucuaauaguaguuucuuuaguagauugaauugguugacccacuuaaacuucaaauacccagcauugaacgugacuaugccaaacaaugaacaauuugacaaauuguacauuugggggguucaccacccggguacggacaaggaccaaaucuuccuguaugcucaaucaucaggaagaaucacaguaucuaccaaaagaagccaacaagcuguaaucccgaauaucggaucuagacccagaauaagaaauaucccuagcagaauaagcaucuauuggacaauaguaaaaccgggagacauacuuuugauuaacagcacagggaaucuaauugcuccuagggguuacuucaaaauacgaagugggaaaagcucaauaaugagaucagaugcacccauuggcaaaugcaauucugaaugcaucacuccaaauggaagcauucccaaugacaaaccauuccaaaauguaaacaggaucacauacggggccugucccagauauguuaagcaaagcacucugaaauuggcaacaggaaugcgaaauguaccagagaaacaaacuagaggcauauuuggcgcaauagcggguuucauagaaaaugguugggagggaaugauggaugguugguacgguuucaggcaucaaaauucugagggaagaggacaagcagcagaucucaaaagcacucaagcagcaaucgaucaaaucaaugggaagcugaaucgauugaucgggaaaaccaacgagaaauuccaucagauugaaaaagaauucucagaagucgaagggagaauucaggaccuugagaaauauguugaggacacuaaaauagaucucuggucauacaacgcggagcuucuuguugcccuggagaaccaacauacaauugaucuaacugacucagaaaugaacaaacuguuugaaaaaacaaagaagcaacugagggaaaaugcugaggauaugggcaaugguuguuucaaaauauaccacaaaugugacaaugccugcauaggaucaaucagaaauggaacuuaugaccacgauguauacagagaugaagcauuaaacaaccgguuccagaucaagggaguugagcugaagucaggguacaaagauuggauccuauggauuuccuuugccauaucauguuuuuugcuuuguguugcuuuguugggguucaucaugugggccugccaaaagggcaacauuaggugcaacauuugcauuuga

SEQ ID NO: 41557 - RNA, 1701 nt, Artificial Sequence
  derived and/or modified CDS sequence (wt) from hemagglutinin__InfluenzaA__AFN19653
augaagacuaucauugcuuugagcuacauucuaugucugguuuucgcucaaaaacuuccugaaaaugacaacagcacggcaacgcugugucuugggcaccaugcaguaccaaacggaacgauagugaaaacaaucacgaaugaccaaauugaaguuacuaaugcuacugagcugguucagaguuccucaacaggugaaauaugcgacaguccucaucagauccuugauggaauaaacugcacacuaauagaugcucuauugggagacccucagugugauggcuuccaaaauaagaagugggaccuuuuuguugaacgaagcaaagccuacagcaacuguuacccuuaugaugugccggauuaugccucccuuaggucacuaguugccucauccggcacacuggaguuuaacaaugaaagcuucaauuggacuggagucacucaaaacggaacaagcucugcuugcauaaggagaucuaauaguaguuucuuuaguagauugaauugguugacccacuuaaacuucaaauacccagcauugaacgugacuaugccaaacaaugaacaauuugacaaauuguacauuugggggguucaccacccggguacggacaaagaccaaaucuuccuguaugcucaaccaucaggaagaaucacaguaucuacaaaaagaagccaacaagcuguaaucccgaauaucggaucuagacccagaauaaggaauaucccuagcagaauaagcaucuauuggacaauaguaaaaccgggagacauacuuuugauuaacagcacagggaaucuaauugcuccuagggguuacuucaaaauacgaagugggaaaagcucaauaaugagaucagaugcacccauuggcaaaugcaauucugaaugcaucacuccaaauggaagcauucccaaugacaaaccauuccaaaauguaaacaggaucacauacggggccugucccagauauguuaagcaaagcacucugaaauuggcaacaggaaugcgaaauguaccagagaaacaaacuagaggcauauuuggcgcaauagcggguuucauagaaaaugguugggagggaaugguggaugguugguacgguuucaggcaucaaaauucugagggaagaggacaagcagcagaucucaaaagcacucaagcagcaaucgaucaaaucaaugggaaguugaaucgauugaucgggaaaaccaacgagaaauuccaucagauugaaaaagaauucucagaagucgaagggagaauucaggaccuugagaaauauguugaggacacuaaaauagaucucuggucauacaacgcggagcuucuuguugcccuggagaaccaacauacaauugaucuaacugacucagaaaugaacaaacuguuugaaaaaacaaagaagcaacugagggaaaaugcugaggauaugggcaaugguuguuucaaaauauaccacaaaugugacaaugccugcauaggaucaaucagaaauggaacuuauaaccacgauguauacagagaugaagcauuaaacaaccgguuccagaucaagggaguugagcugaagucaggguacaaagauuggauccuauggauuuccuuugccauaucauguuuuuugcuuuguguugcuuuguugggguucaucaugugggccugccaaaaaggcaacauuaggugcaacauuugcauuuga

SEQ ID NO: 41558 - RNA, 1701 nt, Artificial Sequence; identical to SEQ ID NO: 41471
  derived and/or modified CDS sequence (wt) from hemagglutinin__InfluenzaA__AFN19663

SEQ ID NO: 41559 - RNA, 1701 nt, Artificial Sequence
  derived and/or modified CDS sequence (wt) from hemagglutinin__InfluenzaA__AFN19665
augaagacuaucauugcuuugagcuacauucuaugucugguuuucgcucaaaaacuuccuggaaaugacaacagcacggcaacgcugugccuugggcaccaugcaguaccaaacggaacgauagugaaaacaaucacgaaugaccaaauugaaguuacuaaugcuacggagcugguucagaauuccucaauaggugaaauaugcgacaguccucaucagauccuugauggagaaaacugcacacuaauagaugcucuauugggagacccucagugugauggcuuccaaaauaagaaaugggaccuuuuuguugaacgaagcaaagccuacagcaacuguuacccuuaugaugugccggauuaugccucccuuaggucacuaguugccucauccggcacacuggaguuuaacaaugaaagcuucaauuggacuggagucacucaaaacggaacaaguucugcuugcauaaggagaucuaauaguaguuucuuuaguagauugaauugguugacccacuuaaacuucaaauacccagcauugaacgugacuaugccaaacaaugaacaauuugacaaauuguacauuugggggguucaccacccggguacggacaaggaccaaaucuuccuguaugcucaaucaucaggaagaaucacaguaucuaccaaaagaagccaacaagcuguaaucccgaauaucggaucuagacccagaauaagaaauaucccuagcagaauaagcaucuauuggacaauaguaaaaccgggagacauacuuuugauuaacagcacagggaaucuaauugcuccuagggguuacuucaaaauacgaagugggaaaagcucaauaaugagaucagaugcacccauuggcaaaugcaauucugaaugcaucacuccaaauggaagcauucccaaugacaaaccauuccaaaauguaaacaggaucacauacggggccugucccagauauguuaagcaaagcacucugaaauuggcaacaggaaugcgaaauguaccagagaaacaaacuagaggcauauuuggcgcaauagcggguuucauagaaaaugguugggagggaaugguggaugguugguacgguuucaggcaucaaaauucugagggaagaggacaagcagcagaucucaaaagcacucaagcagcaaucgaucaaaucaaugggaagcugaaucgauugaucgggaaaaccaacgagaaauuccaucagauugaaaaagaauucucagaagucgaagggagaauucaggaccuugagaaauauguugaggacacuaagauagaucucuggucauacaacgcggagcuucuuguugcccuggagaaccaacauacaauugaucuaacugacucagaaaugaacaaacuguuugaaaaaacaaagaagcaacugagggaaaaugcugaggauaugggcaaugguuguuucaaaauauaccacaaaugugacaaugccugcauaggaucaaucagaaauggaacuuaugaccacgauguauacagagaugaagcauuaaacaaccgguuccaggucaagggaguugagcugaagucaggguacaaagauuggauccuauggauuuccuuugccauaucauguuuuuugcuuuguguugcuuuguugggguucaucaugugggccugccaaaagggcaacauuaggugcaacauuugcauuuga

SEQ ID NO: 41560 - RNA, 1701 nt, Artificial Sequence
  derived and/or modified CDS sequence (wt) from hemagglutinin__InfluenzaA__AFN19667
augaagacuaucauugcuuugagcuacauucuaugucugguuuucgcucaaaaacuuccuggaaaugacaacagcacggcaacgcugugccuugggcaccaugcaguaccaaacggaacgauagugaaaacaaucacgaaugaccaaauugaaguuacuaaugcuacugagcugguucagaauuccucaauaggugaaauaugcgacaguccucaucagauccuugauggagaaaacugcacacuaauagaugcucuauugggagacccucagugugauggcuuccaaaauaagaaaugggaccuuuuuguugaacgaagcaaagccuacagcaacuguuacccuuaugaugugccggauuaugccucccuuaggucacuaguugccucauccggcacacuggaguuuaacaaugaaagcuucaauuggacuggagucacucaaaacggaacaaguucugcuugcaugaggagaucuaauaguaguuucuuuaguagauugaauugguugacccacuuaaacuucaaauacccagcauugaacgugacuaugccaaacaaugaacaauuugacaaauuguacauuugggggguucaccacccggguacggacaaggaccaaaucuuccuguaugcucaaucaucaggaagaaucacaguaucuaccaaaagaagccaacaagcuguaaucccgaauaucggaucuagacccagaauaagaaauaucccuagcagaauaagcaucuauuggacaauaguaaaaccgggagacauacuuuugauuaacagcacagggaaucuaauugcuccuagggguuacuucaaaauacgaagugggaaaagcucaauaaugagaucagaugcacccauuggcaaaugcaauucugaaugcaucacuccaaauggaagcauucccaaugacaaaccauuccaaaauguaaacaggaucacauacggggccugucccagauauguuaagcaaagcacucugaaauuggcaacaggaaugcgaaauguaccagagaaacaaacuagaggcauauuuggcgcaauagcggguuucauagaaaaugguugggagggaaugguggaugguugguacgguuucaggcaucaaaauucugagggaagaggacaagcagcagaucucaaaagcacucaagcagcaaucgaucaaaucaaugggaagcugaaucgauugaucgggaaaaccaacgagaaauuccaucagauugaaaaagaauucucagaagucgaagggagaauucaggaccuugagaaauauguugaggacacuaaaauagaucucuggucauacaacgcggagcuucuuguugcccuggagaaucaacauacaauugaucuaacugacucagaaaugaacaaacuguuugaaaaaacaaagaagcaacugagggaaaaugcugaggauaugggcaaugguuguuucaaaauauaccacaaaugugacaaugccugcauaggaucaaucagaaauggaacuuaugaccacgauguauacagagaugaagcauuaaacaaccgguuccagaucaagggaguugagcugaagucaggguacaaagauuggauccuauggauuuccuuugccauaucauguuuuuugcuuuguguugcuuuguugggguucaucaugugggccugccaaaagggcaacauuaggugcaacauuugcauuuga

SEQ ID NO: 41561 - RNA, 1701 nt, Artificial Sequence
  derived and/or modified CDS sequence (wt) from hemagglutinin__InfluenzaA__AFN19669
augaagacuaucauugcuuugagcuacauucuauguaugguuuucgcucaaaaacuuccuggaaaugacaacagcacggcaacgcugugccuugggcaccaugcaguaccaaacggaacgauagugaaaacaaucacgaaugaccaaauugaaguuacuaaugcuacugagcugguucagaauuccucaauaggugaaauaugcgacaguccucaucagauccuugauggagaaaacugcacacuaauagaugcucuauugggagacccucagugugauggcuuccaaaauaagaaaugggaccuuuuuguugaacgaagcaaagccuacagcaacuguuacccuuaugaugugccgaauuaugccucccuuaggucacuaguugccucauccggcacacuggaguuuaacaaugaaagcuucaauuggacuggagucacucaaaacggaacaaguucugcuugcaugaggagaucuaauaguaguuucuuuaguagauugaauugguugacccacuuaaacuucaaauauccagcauugaacgugacuaugccaaacaaugaacaauuugacaaauuguacauuugggggguucaccacccggguacggacaaggaccaaaucuuccuguaugcccaaucaucaggaagaaucacaguaucuaccaaaagaagccaacaagcuguaaucccgaauaucggaucuagacccagaauaagaaauaucccuagcagaauaagcaucuauuggacaauaguaaaaccgggagacauacuuuugauuaacagcacagggaaucuaauugcuccuagggguuacuucaaaauacgaagugggaaaagcucaauaaugagaucagaugcacccauuggcaaaugcaauucugaaugcaucacuccaaauggaagcauucccaaugacaaaccauuccaaaauguaaacaggaucacauacggggccugucccagauauguuaagcaaagcacucugaaauuggcaacaggaaugcgaaauguaccagagaaacaaacuagaggcauauuuggcgcaauagcggguuucauagaaaaugguugggagggaaugguggaugguugguacgguuucaggcaucaaaauucugagggaagaggacaagcagcagaucucaaaagcacucaagcagcaaucgaucaaaucaaugggaagcugaaucgauugaucgggaaaaccaacgagaaauuccaucagauugaaaaagaauucucagaagucgaagggagaauucaggaccuugagaaauauguugaggacacuaaaauagaucucuggucauacaacgcggagcuucuuguugcccuggagaaccaacauacaauugaucuaacugacucagaaaugaacaaacuguuugaaaaaacaaagaagcaacugagggaaaaugcugaggauaugggcaaugguuguuucaaaauauaccacaaaugugacaaugccugcauaggaucaaucagaaauggaacuuaugaucacgauguauacagagaugaagcauuaaacaaccgguuccagaucaagggaguugagcugaagucaggguacaaagauuggauccuauggauuuccuuugccauaucauguuuuuugcuuuguguugcuuuguugggguucaucaugugggccugccaaaagggcaacauuaggugcaacauuugcauuuga

SEQ ID NO: 41562 - RNA, 1701 nt, Artificial Sequence
  derived and/or modified CDS sequence (wt) from hemagglutinin__InfluenzaA__AFN19671
augaagacuaucauugcuuugagcuacauucuaugucugguuuucgcucaaaaacuuccuggaaaugacaauagcacggcaacgcugugccuugggcaccaugcaguaccaaacggaacgauagugaaaacaaucacgaaugaccgaauugaaguuacuaaugcuacugagcugguucagaauuccucaauaggugaaauaugcgacaguccucaucagauccuugauggagaaaacugcacacuaauagaugcucuauugggagacccucagugugauggcuuccaaaauaagaaaugggaccuuuuuguugaacgaagcaaagccuacagcaacuguuacccuuaugaugugccggauuaugccucccuuaggucacuaguugccucauccggcacacuggaguuuaacaaugaaagcuucaauuggacuggagucacucaaaacggaacaaguucugcuugcauaaggagaucuaauaauaguuucuuuaguagauuaaauugguugacccacuuaaacuucaaauacccagcauugaacgugacuaugccaaacaaugaacaauuugacaaauuguacauuugggggguucaccacccggguacggacaaggaccaaaucuuccuguaugcucaaucaucaggaagaaucacaguaucuaccaaaagaagccaacaagcuguaaucccgaauaucggaucuagacccagaauaaggaauaucccuagcagaauaagcaucuauuggacaauaguaaaaccgggagacauacuuuugauuaacagcacagggaaucuaauugcuccuagggguuacuucaaaauacgaagugggaaaagcucaauaaugagaucagaugcacccauuggcaaaugcaagucugaaugcaucacuccaaauggaagcauucccaaugacaaaccauuccaaaauguaaacaggaucacauacggggccugucccagauauguuaagcaaagcacucugaaauuggcaacaggaaugcgaaauguaccagagaaacaaacuagaggcauauuuggcgcaauagcggguuucauagaaaaugguugggagggaaugguggaugguugguacgguuucaggcaucaaaauucugagggaagaggacaagcagcagaucucaaaagcacucaagcagcaaucgaucaaaucaaugggaagcugaaucgauugaucgggaaaaccaacgagaaauuccaucagauugaaaaagaauucucagaaguagaagggagaauucaggaccuugagaaauauguugaggacacuaaaauagaucucuggucauacaacgcggagcuucuuguugcccuggagaaccaacauacaauugaucuaacugacucagaaaugaacaaacuguuugaaaaaacaaagaagcaacugagggaaaaugcugaggauaugggcaaugguuguuucaaaauauaccacaaaugugacaaugccugcauagaaucaaucagaaauggaacuuaugaccacgauguauacagagaugaagcauuaaacaaccgguuccagaucaagggaguugagcugaagucaggguacaaagauuggauccuauggauuuccuuugccauaucauguuuuuugcuuuguguugcuuuguugggguucaucaugugggccugccaaaagggcaacauuaggugcaacauuugcauuuga

SEQ ID NO: 41563 - RNA, 1701 nt, Artificial Sequence
  derived and/or modified CDS sequence (wt) from hemagglutinin__InfluenzaA__AFN19674
augaagacuaucauugcuuugagcuacauucuaugucugguuuucgcucaaaaacuuccuggaaaugacaacagcacggcaacgcugugccuugggcaccaugcaguaccaaacggaacgauagugaaaacaaucacgaaugaccaaauugaaguuacuaaugcuacugagcugguucagaguuccucaacaggugaaauaugcgacaguccucaucagauccuugauggagaaaacugcacacuaauagaugcucuauugggagacccucagugugauggcuuccaaaauaagaagugggaccuuuuuguugaacgaagcaaagccuacagcaacuguuacccuuaugaugugccggauuaugccucccuuaggucacuaguugccucauccggcacacuggaguuuaacaaugaaagcuucaauuggacuggagucacucaaaacggaacaagcucugcuugcauaaggagaucuaauaguaguuucuuuaguagauugaauugguugacccacuuaaacuucaaauacccagcauugaacgugacuaugccaaacaaugaacaauuugacaaauuguacauuugggggguucaccacccggguacggacaaggaccaaaucuuccuguaugcucaaucaucaggaagaaucacaguaucuaccaaaagaagccaacaagcuguaaucccgaauaucggaucuagacccagaauaaggaauaucccuagcagaauaagcaucuauuggacaauaguaaaaccgggagacauacuuuugauuaacagcacagggaaucuaauugcuccuagggguuacuucaaaauacgaagugggaaaagcucaauaaugagaucagaugcacccauuggcaaaugcaauucugaaugcaucacuccaaauggaagcauucccaaugacaaaccauuccaaaauguaaacaggaucacauacggggccugucccagauauguuaagcaaagcacucugaaauuggcaacaggaaugcgaaauguaccagagaaacaaacuagaggcauauuuggcgcaauagcggguuucauagaaaaugguugggagggaaugguggaugguugguacgguuucaggcaucaaaauucugagggaagaggacaagcagcagaucucaaaagcacucaagcagcaaucgaucaaaucaaugggaagcugaaucgauugaucgggaaaaccaacgagaaauuccaucagauugaaaaagaauucucagaagucgaagggagaauucaggaccuugagaaauauguugaggacacuaaaauagaucucuggucauacaacgcggagcuucuuguugcccuggagaaccaacauacaauugaucuaacugacucagaaaugaacaaacuguuugaaaaaacaaagaagcaacugagggaaaaugcugaggauaugggcaaugguuguuucaaaauauaccacaaaugugacaaugccugcauaggaucaaucagaaauggaacuuauaaccacgauguauacagagaugaagcauuaaacaaccgguuccagaucaagggaguugagcugaagucaggguacaaagauuggauccuauggauuuccuuugccauaucauguuuuuugcuuuguguugcuuuguugggguucaucaugugggcuugccaaaagggcaacauuaggugcaacauuugcauuuga

SEQ ID NO: 41564 - RNA, 1701 nt, Artificial Sequence
  derived and/or modified CDS sequence (wt) from hemagglutinin__InfluenzaA__AFN19676
augaagacuaucauugcuuugagcuacauucuaugucugguuuucgcucaaaaacuuccuggaaaugacaacagcacggcaacgcugugccuugggcaccaugcaguaccaaacggaacgauagugaaaacaaucacgaaugaccaaauugaaguuacuaaugcuacugagcugguucagaguuccucaacaggugaaauaugcgacaguccucaucagauccuugauggagaaaacugcacacuaauagaugcucuauugggagacccucagugugauggcuuccaaaauaagaagugggaccuuuuuguugaacgaagcaaagccuacagcaacuguuacccuuaugaugugccggauuaugccucccuuaggucacuaguugccucauccggcacacuggaguuuaacaaugaaagcuucaauuggacuggagucacucaaaacggaacaagcucugcuugcauaaggagaucuaauaguaguuucuuuaguagauugaauugguugacccacuuaaacuucaaauacccagcauugaacgugacuaugccaaacaaugaacaauuugacaaauuguacauuugggggguucaccacccggguacggacaaggaccaaaucuuccuguaugcucaaucaucaggaagaaucacaguaucuaccaaaagaagccaacaagcuguaaucccgaauaucggaucuagacccagaauaaggaauaucccuagcagaauaagcaucuauuggacaauagugaaaccgggagacauacuuuugauuaacagcacagggaaucuaauugcuccuagggguuacuucaaaauacgaagugggaaaagcucaauaaugagaucagaugcacccauuggcaaaugcaauucugaaugcaucacuccaaauggaagcauucccaaugacaaaccauuccaaaauguaaacaggaucacauacggggccugucccagauauguuaagcaaagcacucugaaauuggcaacaggaaugcgaaauguaccagagaaacaaacuagaggcauauuuggcgcaauagcggguuucauagaaaaugguugggagggaaugguggaugguugguacgguuucaggcaucaaaauucugagggaagaggacaagcagcagaucucaaaagcacucaagcagcaaucgaucaaaucaaugggaagcugaaucgauugaucgggaaaaccaacgagaaauuccaucagauugaaaaagaauucucagaagucgaagggagaauucaggaccuugagaaauauguugaggacacuaaaauagaucucuggucauacaacgcggagcuucuuguugcccuggagaaccaacauacaauugaucuaacugacucagaaaugaacaaacuguuugaaaaaacaaagaagcaacugagggaaaaugcugaggauaugggcaaugguuguuucaaaauauaccacaaaugugacaaugccugcauaggaucaaucagaaauggaacuuauaaccacgauguauacagagaugaagcauuaaacaaccgguuucagaucaagggaguugagcugaagucaggguacaaagauuggauccuauggauuuccuuugccauaucauguuuuuugcuuuguguugcuuuguugggguucaucaugugggccugccaaaagggcaacauuaggugcaacauuugcauuuga

SEQ ID NO: 41565 - RNA, 1701 nt, Artificial Sequence; identical to SEQ ID NO: 41473
  derived and/or modified CDS sequence (wt) from hemagglutinin__InfluenzaA__AFN19678

SEQ ID NO: 41566 - RNA, 1701 nt, Artificial Sequence
  derived and/or modified CDS sequence (wt) from hemagglutinin__InfluenzaA__AFN19682
augaagacuaucauugcuuugagcuacauucuaugucugguuuucgcucaaaaacuuccuggaaaugacaacagcacggcaacgcugugccuugggcaccaugcaguaccaaacggaacgauagugaaaacaaucacgaaugaccaaauugaaguuacuaaugcuacugagcugguucagaauuccucaauaggugaaauaugcgacaguccccaucagauccuugauggagaaaacugcacacuaauagaugcucuauugggagacccucagugugauggcuuccaaaauaagaaaugggaccuuuuuguugaacgaagcaaagccuacagcaacuguuacccuuaugaugugccgaauuaugccucccuuaggucacuaguugccucauccggcacacuggaguuuaacaaugaaagcuucaauuggacuggagucacucaaaacggaacaaguucugcuugcaugaggagaucuaauaguaguuucuuuaguagauugaauugguugacccacuuaaacuucaaauauccagcauugaacgugacuaugccaaacaaugaacaauuugacaaauuguacauuugggggguucaccacccggguacggacaaggaccaaaucuuccuguaugcccaaucaucaggaagaaucacaguaucuaccaaaagaagccaacaagcuguaaucccgaauaucggaucuagacccagaauaagaaauaucccuagcagaauaagcaucuauuggacaauaguaaaaccgggagacauacuuuugauuaacagcacagggaaucuaauugcuccuagggguuacuucaaaauacgaagugggaaaagcucaauaaugagaucagaugcacccauuggcaaaugcaauucugaaugcaucacuccaaauggaagcauucccaaugacaaaccauuccaaaauguaaacaggaucacauacggggccugucccagauauguuaagcaaagcacucugaaauuggcaacaggaaugcgaaauguaccagagaaacaaacuagaggcauauuuggcgcaauagcggguuucauagaaaaugguugggagggaaugguggaugguugguacgguuucaggcaucaaaauucugagggaagaggacaagcagcagaucucaaaagcacucaagcagcaaucgaucaaaucaaugggaagcugaaucgauugaucgggaaaaccaacgagaaauuccaucagauugaaaaagaauucucagaagucgaagggagaauucaggaccuugagaaauauguugaggacacuaaaauagaucucuggucauacaacgcggagcuucuuguugcccuggagaaccaacauacaauugaucuaacugacucagaaaugaacaaacuguuugaaaaaacaaagaagcaacugagggaaaaugcugaggauaugggcaaugguuguuucaaaauauaccacaaaugugacaaugccugcauaggaucaaucagaaauggaacuuaugaucacgauguauacagagaugaagcauuaaacaaccgguuccagaucaagggaguugagcugaagucaggguacaaagauuggauccuauggauuuccuuugccauaucauguuuuuugcuuuguguugcuuuguugggguucaucaugugggccugccaaaagggcaacauuaagugcaacauuugcauuuga

SEQ ID NO: 41567 - RNA, 1701 nt, Artificial Sequence
  derived and/or modified CDS sequence (wt) from hemagglutinin__InfluenzaA__AFN19684
augaagacuaucauugcuuugagcuacauucuaugucuggcuuucgcucaaaaacuuccuggaaaugacaacagcacggcaacgcugugccuugggcaccaugcaguaccaaacggaacgauagugaaaacaaucacgaaugaccaaauugaaguuacuaaugcuacugagcugguucagaguuccucaacaggugaaauaugcgacaguccucaucagauccuugauggagaaaacugcacacuaauagaugcucuauugggagacccucagugugauggcuuccaaaauaagaagugggaccuuuuuguugaacgaagcaaagccuacagcaacuguuacccuuaugaugugccggauuaugccucccuuaggucacuaguugccucauccggcacacuggaguuuaacaaugaaagcuucaauuggacuggagucacucaaaacggaacaagcucugcuugcauaaggggaucuaauaguaguuucuuuaguagauugaauugguugacccacuuaaacuucaaauacccagcauugaacgugacuaugccaaacaaugaacaauuugacaaauuguacauuugggggguucaccacccggguacggacaaggaccaaaucuuccuguaugcucaaucaucaggaagaaucacaguaucuaccaaaagaagccaacaagcuguaaucccgaauaucggaucuagacccagaauaaggaauaucccuagcagaauaagcaucuauuggacaauaguaaaaccgggagacauacuuuugauuaacagcacagggaaucuaauugcuccuagggguuacuucaaaauacgaagugggaaaagcucaauaaugagaucagaugcacccauuggcaaaugcaauucugaaugcaucacuccaaauggaagcauucccaaugacaaaccauuccaaaauguaaacaggaucacauacggggccugucccagauauguuaagcaaagcacucugaaauuggcaacaggaaugcgaaauguaccagagaaacaaacuagaggcauauuuggcgcaauagcggguuucauagaaaaugguugggagggaaugguggaugguugguacgguuucaggcaucaaaauucugagggaagaggacaagcagcagaucucaaaagcacucaagcagcaaucgaucaaaucaaugggaagcugaaucgauugaucgggaaaaccaacgagaaauuccaucagauugaaaaagaauucucagaagucgaagggagaauucaggaccuugagaaauauguugaggacacuaaaauagaucucuggucauacaacgcggagcuucuuguugcccuggagaaccaacauacaauugaucuaacugacucagaaaugaacaaacuguuugaaaaaacaaagaagcaacugagggaaaaugcugaggauaugggcaaugguuguuucaaaauauaccacaaaugugacaaugccugcauaggaucaaucagaaauggaacuuauaaccacaauguauacagagaugaagcauuaaacaaccgguuccagaucaagggaguugagcugaagucaggguacaaagauuggauccuauggauuuccuuugccauaucauguuuuuugcuuuguguugcuuuguugggguucaucaugugggccugccaaaagggcaacauuaggugcaacauuugcauuuga

SEQ ID NO: 41568 - RNA, 1701 nt, Artificial Sequence
  derived and/or modified CDS sequence (wt) from hemagglutinin__InfluenzaA__AFN19686
augaagacuaucauugcuuugagcuacauucuaugucuggcuuucgcucaaaaacuuccaggaaaugacaacagcacggcaacgcugugccuugggcaccaugcaguaccaaacggaacgauagugaaaacaaucacgaaugaccaaauugaaguuacuaaugcuacugagcugguucagaguuccucaacaggugaaauaugcgacaguccucaucagauccuugauggagaaaacugcacacuaauagaugcucuauugggagacccucagugugauggcuuccaaaauaagaagugggaccuuuuuguugaacgaagcaaagccuacagcaacuguuacccuuaugaugugccggauuaugccucccuuaggucacuaguugccucauccggcacacuggaguuuaacaaugaaagcuucaauuggacuggagucacucaaaacggaacaagcucugcuugcauaaggagaucuaauaguaguuucuuuaguagauugaauugguugacccacuuaaacuucaaauacccagcauugaacgugacuaugccaaacaaugaacaauuugacaaauuguacauuugggggguucaccacccggguacggacaaggaccaaaucuuccuguaugcucaaucaucaggaagaaucacaguaucuaccaaaagaagccaacaagcuguaaucccgaauaucggaucuagacccagaauaaggaauaucccuagcagaauaagcaucuauuggacaauaguaaaaccgggagacauacuuuugauuaacagcacagggaaucuaauugcuccuagggguuacuucaaaauacgaagugggaaaagcucaauaaugagaucagaugcacccauuggcaaaugcaauucugaaugcaucacuccaaauggaagcauucccaaugacaaaccauuccaaaauguaaacaggaucacauacggggccugucccagauauguuaagcaaagcacucugaaauuggcaacaggaaugcgaaauauaccagagaaacaaacuagaggcauauuuggcgcaauagcggguuucauagaaaaugguugggagggaaugguggaugguugguacgguuucaggcaucaaaauucugagggaagaggacaagcagcagaucucaaaaguacucaagcagcaaucgaucaaaucaaugggaagcugaaucgauugaucgggaaaaccaacgagaaauuccaucagauugaaaaagaauucucagaagucgaagggagaauucaggaccuugagaaauauguugaggacacuaaaauagaucucuggucauacaacgcggagcuucuuguugcccuggagaaccaacauacaauugaucuaacugacucagaaaugaacaaacuguuugaaaaaacaaagaagcaacugagggaaaaugcugaggauaugggcaaugguuguuucaaaauauaccacaaaugugacaaugccugcauaggaucaaucagaaauggaacuuauaaccacaauguauacagagaugaagcauuaaacaaccgguuccagaucaagggaguugagcugaagucaggguacaaagauuggauccuauggauuuccuuugccauaucauguuuuuugcuuuguguugcuuuguugggguucaucaugugggccugccaaaagggcaacauuaggugcaacauuugcauuuga

SEQ ID NO: 41569 - RNA, 1701 nt, Artificial Sequence
  derived and/or modified CDS sequence (wt) from hemagglutinin__InfluenzaA__AFN19688
augaagacuaucauugcuuugagcuacauucuaugucugguuuucgcucaagaacuuccuggaaaugacaacagcacggcaacgcugugccuugggcaccaugcaguaccaaacggaacgauagugaaaacaaucacgaaugaccaaauugaaguuacuaaugcuacugagcugguucagaguuccucaacaggugaaauaugcgacaguccucaucagauccuugauggagaaaacugcacacuaauagaugcucuauugggagacccucagugugauggcuuccaaaauaagaagugggaccuuuuuguugaacgaagcaaagccuacagcaacuguuacccuuaugaugugccggauuaugccucccuuaggucacuaguugccucauccggcacacuggaguuuaacaaugaaagcuucaauuggacuggagucacucaaaacggaacaagcucugcuugcauaaggagaucuaauaguaguuucuuuaguagauugaauugguugacccacuuaaacuucaaauacccagcauugaacgugacuaugccaaacaaugaacaauuugacaaauuguacauuugggggguucaccacccggguacggacaaggaccaaaucuuccuguaugcucaaucaucaggaagaaucacaguaucuaccaaaagaagccaacaagcuguaaucccgaauaucggaucuagacccagaauaaggaauaucccuagcagaauaagcaucuauuggacaauaguaaaaccgggagacauacuuuugauuaacagcacagggaaucuaauugcuccuagggguuacuucaaaauacgaagugggaaaagcucaauaaugagaucagaugcacccauuggcaaaugcaauucugaaugcaucacuccaaauggaagcauucccaaugacaaaccauuccaaaauguaaacaggaucacauacggggccugucccagauauguuaagcaaagcacucugaaauuggcaacaggaaugcgaaauguaccagagaaacaaacuagaggcauauuuggcgcaauagcggguuucauagaaaaugguugggagggaaugguggaugguugguacgguuucaggcaucaaaauucugagggaagaggacaagcagcagaucucaaaagcacucaagcagcaaucgaucaaaucaaugggaagcugaaucgauugaucgggaaaaccaacgagaaauuccaucagauugaaaaagaauucucagaagucgaagggagaauucaggaccuugagaaauauguugaggacacuaaaauagaucucuggucauacaacgcggagcuucuuguugcccuggagaaccaacauacaauugaucuaacugacucagaaaugaacaaacuguuugaaaaaacaaagaagcaacugagggaaaaugcugaggauaugggcaaugguuguuucaaaauauaccacaaaugugacaaugccugcauaggaucaaucagaaauggaacuuauaaccacgauguauacagagaugaagcauuaaacaaucgguuccagaucaagggaguugagcugaagucaggguacaaagauuggauccuauggauuuccuuugccauaucauguuuuuugcuuuguguugcuuuguugggguucaucaugugggccugccaaaagggcaacauuaggugcaacauuugcauuuga

SEQ ID NO: 41570 - RNA, 1701 nt, Artificial Sequence
  derived and/or modified CDS sequence (wt) from hemagglutinin__InfluenzaA__AFN19690
augaagacuaccauugcuuugagcuacauucuaugucugguuuucgcucaaaaacuuccuggaaaugacaauagcacggcaacgcugugccuugggcaccaugcaguaccaaacggaacgauagugaaaacaaucacgaaugaccgaauugaaguuacuaaugcuacugagcugguucagaauuccucaauaggugaaauaugcgacaguccucaucagauccuugauggagaaaacugcacacuaauagaugcucuauugggagacccucagugugauggcuuccaaaauaagaaaugggaccuuuuuguugaacgaagcaaagccuacagcaacuguuacccuuaugaugugccggauuaugccucccuuaggucacuaguugcaucauccggcacacuggaguuuaacaaugaaagcuucaauuggacuggagucacucaaaacggaacaaguucugcuugcauaaggagaucuaauaauaguuucuuuaguagauuaaauugguugacccacuuaaacuucaaauacccagcauugaacgugacuaugccaaacaaugaacaauuugacaaauuguacauuugggggguucaccacccggguacggacaaggaccaaaucuuccuguaugcucaaucaucaggaagaaucacaguaucuaccaaaagaagccaacaagcuguaaucccgaauaucggaucuagacccagaauaaggaauaucccuagcagaauaagcaucuauuggacaauaguaaaaccgggagacauacuuuugauuaacagcacagggaaucuaauugcuccuagggguuacuucaaaauacgaagugggaaaagcucaauaaugagaucagaugcacccauuggcaaaugcaagucugaaugcaucacuccaaauggaagcauucccaaugacaaaccauuccaaaauguaaacaggaucacauacggggccugucccagauauguuaagcaaagcacucugaaauuggcaacaggaaugcgaaauguaccagagaaacaaacuagaggcauauuuggcgcaauagcggguuucauagaaaaugguugggagggaaugguggaugguugguacgguuucaggcaucaaaauucugagggaagaggacaagcagcagaucucaaaagcacucaagcagcaaucgaucaaaucaaugggaagcugaaucgauugaucgggaaaaccaacgagaaauuccaucagauugaaaaagaauucucagaaguagaagggagaauucaggaccuugagaaauauguugaggacacuaaaauagaucucuggucauacaacgcggagcuucuuguugcccuggagaaccaacauacaauugaucuaacugacucagaaaugaacaaacuguuugaaaaaacaaagaagcagcugagggaaaaugcugaggauaugggcaaugguuguuucaaaauauaccacaaaugugacaaugccugcauaggaucaaucagaaauggaacuuaugaccacgauguauacagagaugaagcauuaaacaaccgguuccagaucaagggaguugaucugaagucaggguacaaagauuggauccuauggauuuccuuugccauaucauguuuuuugcuuuguguugcuuuguugggguucaucaugugggccugccaaaagggcaacauuaggugcaacauuugcauuuga

SEQ ID NO: 41571 - RNA, 1701 nt, Artificial Sequence
  derived and/or modified CDS sequence (wt) from hemagglutinin__InfluenzaA__AFN19692
augaagacuaucauugcuuugagcuacauucuaugucugguuuucgcucaaaaaauuccuggaaaugacaacagcacggcaacgcugugccuugggcaccaugcaguaccaaacggaacgauagugaaaacaaucacgaaugaccaaauugaaguuacuaaugcuacugagcugguucagaguuccucaacaggugaaauaugcgacaguccucaucagauccuugauggagaaaacugcacacuaauagaugcucuauugggagacccucagugugauggcuuccaaaauaagaaaugggaccuuuuuguugaacgaagcaaagccuacagcaacuguuacccuuaugaugugccggauuaugccucccuuaggucacuaguugccucaucaggcacacuggaguuuaacaaugaaagcuucaauuggacuggagucacucaaaacggaacaagcucugcuugcauaaggagaucugauaguaguuucuuuaguagauugaauugguugacccacuuaaacuucaaauacccagcauuaaacgugacuaugccaaacaaugaacaauuugacaaauuguacauuugggggguucaccacccggguacggacaaggaccaaaucuuccuguaugcucaagcaucaggaagaaucacaguaucuaccaaaagaagccaacaagcugugaucccgaauaucggaucuagacccagaauaaggaauaucccuagcagaauaagcaucuauuggacaauaguaaaaccgggagacauacuuuugauuaacagcacagggaaucuaauugcuccuagggguuacuucaaaauacgaagugggaaaagcucaauaaugagaucagaugcacccauuggaaaaugcaauucugaaugcaucacuccaaauggaagcauucccaaugacaaaccauuccaaaauguaaacaggaucacauacggggccugucccagauauguuaagcaaaacacucugaaauuggcaacaggaaugcgaaauguaccagagaaacaaacuagaggcauauuuggcgcaauagcggguuucauagaaaaugguugggagggaaugguggaugguugguacgguuucaggcaucaaaauucugagggaagaggacaagcagcagaucucaaaagcacucaagcagcaaucgaucaaaucaaugggaagcugaauagauugaucgggaaaaccaacgagaaauuccaucagauugaaaaagaauucucagaagucgaagggagaauucaggaccuugagaaauauguugaggacacuaaaauagaucucuggucauacaacgcggagcuucuuguugcccuggaaaaccaacauacaauugaucuaacugacucagaaaugaacaaacuguuugaaaaaacaaagaagcaacugagggaaaaugcugaggauaugggcaauggcuguuucaaaauauaccacaaaugugacaaugccugcauaggaucaaucagaaauggaacuuauaaccacgauguauacagagaugaagcauuaaacaaccgguuccagaucaagggaguugagcugaagucgggguacaaagauuggauccuauggauuuccuuugccauaucauguuuuuugcuuuguguugcuuuguugggguucaucaugugggccugccaaaaaggcaacauuaggugcaacauuugcauuuga

SEQ ID NO: 41572 - RNA, 1701 nt, Artificial Sequence
  derived and/or modified CDS sequence (wt) from hemagglutinin__InfluenzaA__AFN19694
augaagacuaucauugcuuugagcuacauucuaugucugguuuucgcucaaaaacuuccuggaaaugacaauagcacggcaacgcugugccuugggcaccaugcaguaccaaacggaacgauagugaaaacaaucacgaaugaccgaauugaaguuacuaaugcuacugagcugguucagaauuccccaauaggugaaauaugcgacaguccucaucagauccuugauggagaaaacugcacacuaauagaugcucuauugggagacccucagugugauggcuuccaaaauaagaaaugggaccuuuuuguugaacgaagcaaagccuacagcaacuguuacccuuaugaugugccggauuaugccucccuuaggucacuaguugcaucauccggcacacuggaguuuaacaaugaaagcuucaauuggacuggagucacucaaaacggaacaaguucugcuugcauaaggagaucuaauaauaguuucuuuaguagauuaaauugguugacccacuuaaacuucaaauacccagcauugaacgugacuaugccaaacaaugaacaauuugacaaauuguacauuugggggguucaccacccggguacggacaaggaccaaaucuuccuguaugcucaaucaucaggaagaaucacaguaucuaccaaaagaagccaacaagcuguaaucccgaauaucggaucuagacccagaauaaggaauaucccuagcagaauaagcaucuauuggacaauaguaaaaccgggagacauacuuuugauuaacagcacagggaaucuaauugcuccuagggguuacuucaaaauacgaagugggaaaagcucaauaaugagaucagaugcacccauuggcaaaugcaagucugaaugcaucacuccaaauggaagcauucccaaugacaaaccauuccaaaauguaaacaggaucacauacggggccugucccagauauguuaagcaaagcacucugaaauuggcaacaggaaugcgaaauguaccagagaaacaaacuagaggcauauuuggcgcaauagcggguuucauagaaaaugguugggagggaaugguggaugguugguacgguuucaggcaucaaaauucugagggaagaggacaagcagcagaucucaaaagcacucaagcagcaaucgaucaaaucaaugggaagcugaaucgauugaucgggaaaaccaacgagaaauuccaucagauugaaaaagaauucucagaaguggaagggagaauucaggaccuugagaaauauguugaggacacuaaaauagaucucuggucauacaacgcggagcuucuuguugcccuggagaaccaacauacaauugaucuaacugacucagaaaugaacaaacuguuugaaaaaacaaagaagcaacugagggaaaaugcugaggauaugggcaaugguuguuucaaaauauaccacaaaugugacaaugccugcauaggaucaaucagaaauggaacuuaugaccacgauguauacagagaugaagcauuaaacaaccgauuccagaucaagggaguugagcugaagucaggguacaaagauuggauccuauggauuuccuuugccauaucauguuuuuugcuuuguguugcuuuguugggguucaucaugugggccugccaaaagggcaacauuaggugcaacauuugcauuuga

SEQ ID NO: 41573 - RNA, 1701 nt, Artificial Sequence
  derived and/or modified CDS sequence (wt) from hemagglutinin__InfluenzaA__AFN19700
augaagacuaucauugcuuugagcuacauucuaugucugguuuucgcucaaaaacuuccuggaaaugacaacagcacggcaacgcugugccuugggcaccaugcaguaccaaacggaacgauagugaaaacaaucacgaaugaccaaauugaaguuacuaaugcuacugagcugguucagaauuccucaauaggugaaauaugcgacaguccucaucagauccuugauggagaaaacugcacacuaauagaugcucuauugggagacccucagugugauggcuuccaaaauaagaaaugggaccuuuuuguugaacgaagcaaagccuacagcaacuguuaccccuaugaugugccggauuaugccucccuuaggucacuaguugccucauccggcacacuggaguuuaacaaugaaagauucaauuggucuggagucacucaaaacggaacaaguucugcuugcaugaggagaucuaauaguaguuucuuuaguagauugaauugguugacccacuuaaacuucaaauacccagcauugaacgugacuaugccaaacaaugaacaguuugacaaauuguacauuugggggguucaccacccggguacggacaaggaccaaaucuuccuguaugcucaaucaucaggaagaaucacaguaucuaccaaaagaagccaacaagccguaaucccgaauaucggaucuagacccagaauaagaaauaucccuagcagaauaagcaucuauuggacaauaguaaaaccgggagacauacuuuugauuaacagcacagggaaccuaauugcuccuagggguuacuucaaaauacgaagugggaaaagcucaauaaugagaucagaugcacccauuggcaaaugcaauucugaaugcaucacuccaaauggaagcauucccaacgacaaaccauuccaaaauguaaacaggaucacauacggggccugucccagauauguuaagcaaagcacucugaaauuggcaacaggaaugcgaaauguaccagagaaacaaacuagaggcauauuuggcgcaauagcggguuucauagaaaaugguugggagggaaugguggaugguugguacgguuucaggcaucaaaauucugagggaagaggacaagcagcagaucucaaaagcacucaagcagcaaucgaucaaaucaaugggaagcugaaucgauugaucgggaaaaccaacgagaaauuccaucagauugaaaaagaauucucagaagucgaagggagaauucaggaccuugagaaauauguugaggacacuaaaauagaucucuggucauacaacgcggagcuucuuguugcccuggagaaccaacauacaauugaucuaacugacucagaaaugaacaaacuguuugaaaaaacaaaaaagcaacugagggaaaaugcugaggauaugggcaaugguuguuucaaaauauaccacaaaugugacaaugccugcauaggaucaaucagaaauggaacuuaugaccacgauguauacagagaugaagcauuaaacaaccgguuccagaucaagggaguugagcugaagucaggguacaaagauuggauccuauggauuuccuuugccauaucauguuuuuugcuuuguguugcuuuguugggguucaucaugugggccugccaaaagggcaacauuaggugcaacauuugcauuuga

SEQ ID NO: 41574 - RNA, 1701 nt, Artificial Sequence
  derived and/or modified CDS sequence (wt) from hemagglutinin__InfluenzaA__AFN19702
augaagacuaucauugcuuugagcuacauucuaugucugguuuucgcucaaaaacuuccuggaaaugacaauagcacggcaacgcugugccuugggcaccaugcaguaccaaacggaacgauagugaaaacaaucacgaaugaccgaauugaaguuacuaaugcuacugagcugguucagaauuccucaauaggugaaauaugcgacaguccucaucagauccuugauggagaaaacugcacacuaauagaugcucuauugggagacccucagugugauggcuuccaaaauaagaaaugggaccuuuuuguugaacgaggcaaagccuacagcaacuguuacccuuaugaugugccggauuaugccucccuuaggucacuaguugccucauccggcacacuggaguuuaacaaugaaagcuucaauuggacuggagucacucaaaacggaacaaguucugcuugcauaaggagaucuaauaauaguuucuuuaguagauuaaauugguugacccacuuaaacuucaaauacccagcauugaacgugacuaugccaaacaaugaacaauuugacaaauuguacauuugggggguucaccacccggguacggacaaggaccaaaucuuccuguaugcucaaucaucaggaagaaucacaguaucuaccaaaagaagccaacaagcuguaaucccgaauaucggaucuagacccagaauaaggaauaucccuagcagaauaagcaucuauuggacaauaguaaaaccgggagacauacuuuugauuaacagcacagggaaucuaauugcuccuagggguuacuucaaaauacgaagugggaaaagcucaauaaugagaucagaugcacccauuggcaaaugcaagucugaaugcaucacuccaaauggaagcauucccaaugacaaaccauuccaaaauguaaacaggaucacauacggggccugucccagauauguuaagcaaagcacucugaaauuggcaacaggaaugcgaaauguaccagagaaacaaacuagaggcauauuuggcgcaauagcggguuucauagaaaaugguugggagggaaugguggaugguugguacgguuucaggcaucaaaauucugagggaagaggacaagcagcagaucucaaaagcacucaagcagcaaucgaucaaaucaaugggaagcugaaucgauugaucgggaaaaccaacgagaaauuccaucagauugaaaaagaauucucagaaguagaagggagaauucaggaccuugagaaauauguugaggacacuaaaauagaucucuggucauacaacgcggagcuucuuguugcccuggagaaccaacauacaauugaucuaacugacucagaaaugaacaaacuguuugaaaaaacaaagaagcaacugagggaaaaugcugaggauaugggcaaugguuguuucaaaauauaccacaaaugugacaaugccugcauaggaucaaucagaaauggaacuuaugaccacgauguauacagagaugaagcauuaaacaaccgguuccagaucaagggaguugagcugaagucaggguacaaagauuggauccuauggauuuccuuugccauaucauguuuuuugcuuuguguugcuuuguugggguucaucaugugggccugccaaaagggcaacauuaggugcaacauuugcauuuga

SEQ ID NO: 41575 - RNA, 1701 nt, Artificial Sequence
  derived and/or modified CDS sequence (wt) from hemagglutinin__InfluenzaA__AFN19709
augaaggcaauacuaguaguucugcuauauacauuugcaaccgcaaaugcagacacauuauguauagguuaucaugcgaacaauucaacagacacuguagacacaguacuagaaaagaauguaacaguaacacacucuguuaaucuucuagaagacaagcauaacgggaaacuaugcaaacuaagagggguagccccauugcauuuggguaaauguaacauugcuggcuggauccugggaaauccagagugugaaucacucuccacagcaagcucaugguccuacauuguggaaacaucuaguucagacaauggaacguguuacccaggagauuucaucgauuaugaggagcuaagggagcaauugagcucagugucaucauuugaaagguuugagauauuccccaagacaaguucauggcccaaucaugacucgaacaaagguguaacggcagcauguccucaugcuggagcaaaaagcuucuacaaaaauuuaauauggcuaguuaaaaaaggaaauucauacccaaagcucagcaaauccuacauuaaugauaaagggaaagaaguccucgugcuauggggcauucaccauccaucuacuacugcugaccaacaaagucucuaucagaaugcagauacauauguuuuuguggggacaucaagauacagcaagaaguucaagccggaaauagcaauaagacccaaagugagggaucaagaagggagaaugaacuauuacuggacacuaguagagccgggagacaaaauaacauucgaagcaacuggaaaucuagugguaccgagauaugcauucgcaauggaaagaaaugcuggaucugguauuaucauuucagauacaccaguccacgauugcaauacaacuugucagacacccaagggugcuauaaacaccagccucccauuucagaauauacauccgaucacaauuggaaaauguccaaaauauguaaaaagcacaaaauugagacuggccacaggauugaggaaugucccgucuauucaaucuagaggccuauuuggggccauugccggcuucauugaagggggguggacagggaugguagauggaugguacgguuaucaccaccaaaaugagcaggggucaggauaugcagccgaccugaagagcacacagaaugccauugacaagauuacuaacaaaguaaauucuguuauugaaaagaugaauacacaguucacagcaguagguaaagaguucaaccaccuggaaaaaagaauagagaauuuaaauaaaaaaguugaugaugguuuccuggacauuuggacuuacaaugccgaacuguugguucuauuggaaaaugaaagaacuuuggacuaccacgauucaaaugugaagaacuuauaugaaaagguaagaaaccaguuaaaaaacaaugccaaggaaacuggaaauggcugcuuugaauuuuaccacaaaugcgauaacacgugcauggaaagugucaaaaaugggacuuaugacuacccaaaauacucagaggaagcaaaauuaaacagagaagaaauagaugggguaaagcuggaaucaacaaggauuuaccagauuuuggcgaucuauucaacugucgccaguucauugguacugguagucucccugggggcaaucaguuuuuggaugugcucuaaugggucucuacaguguagaauauguauuuaa

SEQ ID NO: 41576 - RNA, 1701 nt, Artificial Sequence
  derived and/or modified CDS sequence (wt) from hemagglutinin__InfluenzaA__AFN19719
augaaggcaauacuaguaguucugcuauauacauuugcaaccgcaaaugcagacacauuauguauagguuaucaugcgaacaauucaacagacacuguagacacaguacuagaaaagaauguaacaguaacacacucuguuaaucuucuagaagacaagcauaaugggaaacuaugcaaacuaagagggguagccccauugcauuuggguaaauguaacauugcuggcuggauccugggaaauccagagugugaaucacucuccacagcaagcucaugguccuacauuguggaaacaucuaguucagacaauggaacguguuacccaggagauuucaucgauuaugaggagcuaagagagcaauugagcucagugucaucauuugaaagguuugagauauuccccaagacaaguucauggcccaaucaugacucgaacaaagguguaacggcagcauguccucaugcuggagcaaaaagcuucuacaaaaauuuaauauggcuaguuaaaaaaggaaauucauacccaaagcucagcaaauccuacauuaaugauaaagggaaagaaguccucgugcuauggggcauucaccauccaucuacuacugcugaccaacaaagucucuaucagaaugcagauacauauguuuuuguggggacaucaagauacagcaagaaguucaagccggaaauagcaauaagacccaaagugagggaucaagaagggagaaugaacuauuacuggacacuaguagaaccgggagacaaaauaacauucgaagcaacuggaaaucuagugguaccgagauaugcauucgcaauggaaagaaaugcuggaucugguauuaucauuucagauacaccaguccacgauugcaauacaacuugucagacacccaagggugcuauaaacaccagccucccauuucagaauauacauccgaucacaauuggaaaauguccaaaauauguaaaaagcacaaaauugagacuggccacaggauugaggaaugucccgucuauucaaucuagaggccuauuuggggccauugccggcuucauugaagggggguggacagggaugguagauggaugguacgguuaucaccaucaaaaugagcaggggucaggauaugcagccgaccugaagagcacacagaaugccauugacaagauuacuaacaaaguaaauucuguuauugaaaagaugaauacacaguucacagcaguagguaaagaguucaaccaccuggaaaaaagaauagagaauuuaaauaaaaaaguugaugaugguuuccuggacauuuggacuuacaaugccgaacuguugguucuauuggaaaaugaaagaacuuuggacuaccacgauucaaaugugaagaacuuauaugaaaagguaagaacccaguuaaaaaacaaugccaaggaaauuggaaauggcugcuuugaauuuuaccacaaaugcgauaacacgugcauggaaagugucaaaaaugggacuuaugacuacccaaaauacucagaggaagcaaaauuaaacagagaagaaauagaugggguaaagcuggaaucaacaaggguuuaccagauuuuggcgaucuauucaacugucgccaguucauugguacugguagucucccugggggcaaucaguuuuuggaugugcucuaaugggucucuacaguguagaauauguauuuaa

SEQ ID NO: 41577 - RNA, 1701 nt, Artificial Sequence
  derived and/or modified CDS sequence (wt) from hemagglutinin__InfluenzaA__AFN19730
augaaggcaauacuaguaguucugcuauauacauuugcaaccgcaaaugcagacacauuauguauagguuaucaugcgaacaauucaacagacacuguagacacaguacuagaaaagaauguaacaguaacacacucuguuaaucuucuagaagacaagcauaacggaaaacuaugcaaacuaagagggguagccccauugcauuuggguaaauguaacauugcuggcuggauccugggaaauccagagugugaaucacucuccacagcaagcucaugguccuacauuguggaaacaucuaguucagacaauggaacguguuacccaggagauuucaucgauuaugaggagcuaagagagcaauugagcucagugucaucauuugaaagguuugagauauuccccaagacaaguucauggcccaaucaugacucgaacaaagguguaacggcagcauguccucaugcuggagcaaaaagcuucuacaaaaauuuaauauggcuaguuaaaaaaggaaauucauacccaaagcucagcaaauccuacauuaaugauaaagggaaagaaguccucgugcuauggggcauucaccauccaucuacuacugcugaccaacaaagucucuaucagaaugcagauacauauguuuuuguggggacaucaagauacagcaagaaguucaagccggaaauagcaauaagacccaaagugagggaucaagaagggagaaugaacuauuacuggacacuaguagagccgggagacaaaauaacauucgaagcaacuggaaaucuagugguaccgagauaugcauucgcaauggaaagaaaugcuggaucugguauuaucauuucagauacaccaguccacgauugcaauacaacuugucagacacccaagggugcuauaaacaccagucucccauuucaaaauauacauccgaucacaauuggaaaauguccaaaauauguaaaaagcacaaaauugagacuggccacaggauugaggaaugucccgucuauucaaucuagaggccuauuuggggccauugccggcuucauugaagggggguggacagggaugguagauggaugguacgguuaucaccaucaaaaugagcaggggucaggauaugcagccgaccugaagagcacacagaaugccauugacaagauuacuaacaaaguaaauucuguuauugaaaagaugaauacacaguucacagcaguagguaaagaguucaaccaccuggaaaaaagaauagagaauuuaaauaaaaaaguugaugaugguuuccuggacauuuggacuuacaaugccgaacuguugguucuauuggaaaaugaaagaacuuuggacuaccacgauucaaaugugaagaacuuauaugaaaaaguaagaaaccaguuaaaaaacaaugccaaggaaauuggaaauggcugcuuugaauuuuaccacaaaugcgauaacacgugcauggaaagugucaaaaaugggacuuaugacuacccaaaauacucagaggaagcaaaauuaaacagagaagaaauagaugggguaaagcuggaaucaacaaggauuuaccagauuuuggcgaucuauucaacugucgccaguucauugguacugguagucucccugggggcaaucaguuuuuggaugugcucuaaugggucucuacaguguagaauauguauuuaa

SEQ ID NO: 41578 - RNA, 1701 nt, Artificial Sequence
  derived and/or modified CDS sequence (wt) from hemagglutinin__InfluenzaA__AFN19736
augaaggcaauacuaguagugcugcuauauacauuugcaaccgcaaaugcagacacauuauguauagguuaucaugcgaacaauucaacagacacuguagacacaguacuagaaaagaauguaacaguaacacacucuguuaaucuucuagaagacaagcauaacgggaaacuaugcaaacuaagagggguagccccauugcauuuggguaaauguaacauugcuggcuggauccugggaaauccagagugugaaucacucuccacagcaagcucaugguccuacauuguggaaacaucuaguucagacaauggaacguguuacccaggagauuucaucgauuaugaggagcuaagggagcaauugagcucagugucaucauuugaaagguuugagauauuccccaagacaaguucauggcccaaucaugacucgaacaaagguguaacggcagcauguccucaugcuggagcaaaaagcuucuacaaaaauuuaauauggcuaguuaaaaaaggaaauucauacccaaagcucagcaaauccuacauuaaugauaaagggaaagaaguccucgugcuauggggcauucaccauccaucuacuacugcugaccaacaaagucucuaucagaaugcagauacauauguuuuuguggggacaucaagauacagcaagaaguucaagccggaaauagcaauaagacccaaagugagggaucaagaagggagaaugaacuauuacuggacacuaguagagccgggagacaaaauaacauucgaagcaacuggaaaucuagugguaccgagauaugcauucgcaauggaaagaaaugcuggaucugguauuaucauuucagauacaccaguccacgauugcaauacaacuugucagacacccaagggugcuauaaacaccagccucccauuucagaauauacauccgaucacaauuggaaaauguccaaaauauguaaaaagcacaaaauugagacuggccacaggauugaggaaugucccgucuauucaaucuagaggccuauuuggggccauugccggcuucauugaagggggguggacagggaugguagauggaugguacgguuaucaccaccaaaaugagcaggggucaggauaugcagccgaccugaagagcacacagaaugccauugacaagauuacuaacaaaguaaauucuguuauugaaaagaugaauacacaguucacagcaguagguaaagaguucaaccaccuggaaaaaagaauagagaauuuaaauaaaaaaguugaugaugguuuccuggacauuuggacuuacaaugccgaacuguugguucuauuggaaaaugaaagaacuuuggacuaccacgauucaaaugugaagaacuuauaugaaaagguaagaaaccaguuaaaaaacaaugccaaggaaacuggaaauggcugcuuugaauuuuaccacaaaugcgauaacacgugcauggaaagugucaaaaaugggacuuaugacuacccaaaauacucagaggaagcaaaauuaaacagagaagaaauagaugggguaaagcuggaaucaacaaggauuuaccagauuuuggcgaucuauucaacugucgccaguucauugguacugguagucucccugggggcaaucaguuuuuggaugugcucuaaugggucucuacaguguagaauauguauuuaa

SEQ ID NO: 41579 - RNA, 1701 nt, Artificial Sequence
  derived and/or modified CDS sequence (wt) from hemagglutinin__InfluenzaA__AFN19748
augaaggcaauacuaguaguucugcuauauacauuugcaaccgcaaaugcagacacauuauguauagguuaucaugcgaacaauucaacagacacuguagacacaguacuagaaaagaauguaacaguaacacacucuguuaaucuucuagaagacaagcauaacgggaaacuaugcaaacuaagagggguagccccauugcauuuggguaaauguaacauugcuggcuggauccugggaaauccagagugugaaucacucuccacagcaagcucaugguccuacauuguggaaacaucuaguucagacaauggaacguguuacccaggagauuucaucgauuaugaggagcuaagggagcaauugagcucagugucaucauuugaaagguuugagauauuccccaagacaaguucauggcccaaucaugacucgaacaaagguguaacggcagcauguccucaugcuggagcaaaaagcuucuacaaaaauuuaauauggcuaguuaaaacaggaaauucauacccaaagcucagcaaauccuacauuaaugauaaagggaaagaaguccucgugcuauggggcauucaccauccaucuacuacugcugaccaacaaagucucuaucagaaugcagauacauauguuuuuguggggacaucaagauacagcaagaaguucaagccggaaauagcaauaagacccaaagugagggaucaagaagggagaaugaacuauuacuggacacuaguagagccgggagacaaaauaacauucgaagcaacuggaaaucuagugguaccgagauaugcauucgcaauggaaagaaaugcuggaucugguauuaucauuucagauacgccaguccacgauugcaauacaacuugucagacacccaagggugcuauaaacaccagccucccauuucagaauauacauccgaucacaauuggaaaauguccaaaauauguaaaaagcacaaaauugagacuggccacaggauugaggaaugucccgucuauucaaucuagaggccuauuuggggccauugccggcuucauugaagggggguggacagggaugguagauggaugguacgguuaucaccaucaaaaugagcaggggucaggauaugcagccgaccugaagagcacacagaaugccauugacaagauuacuaacaaaguaaauucuguuauugaaaagaugaauacacaguucacagcaguagguaaagaguucaaccaccuggaaaaaagaauagagaauuuaaauaaaaaaguugaugaugguuuccuggacauuuggacuuacaaugccgaacuguugguucuauuggaaaaugaaagaacuuuggacuaccacgauucaaaugugaagaacuuauaugaaaagguaagaaaccaguuaaaaaacaaugccaaggaaacuggaaauggcugcuuugaauuuuaccacaaaugcgauaacacgugcauggaaagugucaaaaaugggacuuaugacuacccaaaauacucagaggaagcaaaauuaaacagagaagaaauagaugggguaaagcuggaaucaacaaggauuuaccagauuuuggcgaucuauucaacugucgccaguucauugguacugguagucucccugggggcaaucaguuuuuggaugugcucuaaugggucucuacaguguagaauauguauuuaa

SEQ ID NO: 41580 - RNA, 1701 nt, Artificial Sequence; identical to SEQ ID NO: 38923
  derived and/or modified CDS sequence (wt) from hemagglutinin__InfluenzaA__AFN19757

SEQ ID NO: 41581 - RNA, 1701 nt, Artificial Sequence
  derived and/or modified CDS sequence (wt) from hemagglutinin__InfluenzaA__AFN19768
augaaggcaauacuaguaguucugcuauauacauuugcaaccgcaaaugcagacacauuauguauagguuaucaugcgaacaauucaacagacacuguagacacaguacuagaaaagaauguaacaguaacacacucuguuaaucuucuagaagacaagcauaacgggaaacuaugcaaacuaagagggguagccccauugcauuuggguaaauguaacauugcuggcuggauccugggaaauccagagugugaaucacucuccacagcaagcucaugguccuacauuguggaaacaucuaguucagacaauggaacguguuacccaggagauuucaucgauuaugaggagcuaagggagcaauugagcucagugucaucauuugaaagguuugagauauuccccaagacaaguucauggcccaaucaugacucgaacaaagguguaacggcagcauguccucaugcuggggcaaaaagcuucuacaaaaauuuaauauggcuaguuaaaaaaggaaauucauacccaaagcucagcaaauccuacauuaaugauaaagggaaagaaguccucgugcuauggggcauucaccauccaucuacuacugcugaccaacaaagucucuaucagaaugcagauacauauguuuuuguggggacaucaagauacagcaagaaguucaagccggaaauagcaauaagacccaaagugagggaucaagaagggagaaugaacuauuacuggacacuaguagagccgggagacaaaauaacauucgaagcaacuggaaaucuagugguaccgagauaugcauucgcaauggaaagaaaugcuggaucugguauuaucauuucagauacaccaguccacgauugcaauacaacuugucagacacccaagggugcuauaaacaccagccucccauuucagaauauacauccgaucacaauuggaaaauguccaaaauauguaaaaagcacaaaauugagacuggccacaggauugaggaaugucccgucuauucaaucuagaggccuauuuggggccauugccggcuucauugaagggggguggacagggaugguagauggaugguacgguuaucaccaucaaaaugagcaggggucaggauaugcagccgaccugaagagcacacagaaugccauugacaagauuacuaacaaagugaauucuguuauugaaaagaugaauacacaguucacagcaguagguaaagaguucaaccaccuggaaaaaagaauagagaauuuaaauaaaaaaguugaugaugguuuccuggacauuuggacuuacaaugccgaacuguugguucuauuggaaaaugaaagaacuuuggacuaccacgauucaaaugugaagaacuuauaugaaaagguaagaaaccaguuaaaaaacaaugccaaggaaacuggaaauggcugcuuugaauuuuaccacaaaugcgauaacacgugcauggaaagugucaaaaaugggacuuaugacuacccaaaauacucagaggaagcaaaauuaaacagagaagaaauagaugggguaaagcuggaaucaacaaggauuuaccagauuuuggcgaucuauucaacugucgccaguucauugguacugguagucucccugggggcaaucaguuuuuggaugugcucuaaugggucucuacaguguagaauauguauuuaa

SEQ ID NO: 41582 - RNA, 1701 nt, Artificial Sequence
  derived and/or modified CDS sequence (wt) from hemagglutinin__InfluenzaA__AFN19781
augaaggcaauacuaguaguucugcuauauacauuugcaaccgcaaaugcagacacauuauguauagguuaucaugcgaacaauucaacagacacuguagacacaguacuagaaaagaauguaacagucacacacucuguuaaucuucuagaagacaagcauaacgggaaacuaugcaaacuaagagggguagccccauugcauuuggguaaauguaacauugcuggcuggauccugggaaauccagagugugaaucacucuccacagcaagcucaugguccuacauuguggaaacaucuaguucagacaauggaacguguuacccaggagauuucaucgauuaugaggagcuaagggagcaauugagcucagugucaucauuugaaagguuugagauauuccccaagacaaguucauggcccaaucaugacucgaacaaagguguaacggcagcauguccucaugcuggagcaaaaagcuucuacaaaaauuuaauauggcuaguuaaaaaaggaaauucauacccaaagcucagcaaauccuacauuaaugauaaagggaaagaaguccucgugcuauggggcauucaccauccaucuacuacugcugaccaacaaagucucuaucagaaugcagauacauauguuuuuguggggacaucaagauacagcaagaaguucaagccggaaauagcaauaagacccaaagugagggaucaagaagggagaaugaacuauuacuggacacuaguagagccgggagacaaaauaacauucgaagcaacuggaaaucuagugguaccgagauaugcauucgcaguggaaagaaaugcuggaucugguauuaucauuucagauacaccaguccacgauugcaauacaacuugucagacacccaagggugcuauaaacaccagccucccauuucagaauauacauccgaucacaauuggaaaauguccaaaauauguaaaaagcacaaaauugagacuggccacaggauugaggaaugucccgucuauucaaucuagaggccuauuuggggccauugccggcuucauugaagggggguggacagggaugguagauggaugguacgguuaucaccaucaaaaugagcaggggucaggauaugcagccgaccugaagagcacacagaaugccauugacaagauuacuaacaaaguaaauucuguuauugaaaagaugaauacacaguucacagcaguagguaaagaguucaaccaccuggaaaaaagaauagagaauuuaaauaaaaaaguugaugaugguuuccuggacauuuggacuuacaaugccgaacuguugguucuauuggaaaaugaaagaacuuuggacuaccacgauucaaaugugaagaacuuauaugaaaagguaagaaaccaguuaaaaaacaaugccaaggaaauuggaaauggcugcuuugaauuuuaccacaaaugcgauaacacgugcauggaaagugucaaaaaugggacuuaugacuacccaaaauacucagaggaagcaaaauuaaacagagaagaaauagaugggguaaagcuggaaucaacaaggauuuaccagauuuuggcgaucuauucaacugucgccaguucauugguacugguagucucccugggggcaaucaguuuuuggaugugcucuaaugggucucuacaguguagaauauguauuuaa

SEQ ID NO: 41583 - RNA, 1701 nt, Artificial Sequence
  derived and/or modified CDS sequence (wt) from hemagglutinin__InfluenzaA__AFN19791
augaaggcaauacuaguaguucugcuauauacauuugcaaucgcaaaugcagacacauuauguauagguuaucaugcgaacaauucaacagacacuguagacacaguacuagaaaagaauguaacaguaacacacucuguuaaccuccuagaagacaagcauaacgggaaacuaugcaaacugagagggguagccccauugcauuuggguaaauguaacauugcuggcuggauccugggaaauccagagugugaaucacucuccacagcaagcucaugguccuacauuguggaaacaucuaguucagacaauggaacguguuacccaggagauuucaucaauuaugaggagcuaagagagcaauugagcucagugucaucauuugaaagguuugagauauuccccaagacaaguucauggcccaaucaugacucgaacaaagguguaacggcagcauguccucaugcuggagcaaaaagcuucuacaaaaauuuaauauggcuaguuaaaaaaggaaauucauacccaaagcucagcaaauccuacauuaacgauaaagggaaagaaguccucgugcuguggggaauucaccauccaucuacuagugcugaccaacaaagucucuaucagaaugcagaugcauauguuuuuguggggacaucaaaauacagcaagaaauucaagccggaaauagcaguaagacccaaagugagggaucaagaagggagaaugaacuauuacuggacacuaguagagccgggagacaaaauaacauucgaagcaacuggaaaucuauugguaccgagauaugcauucgcaauggaaagaaaugcuggaucugguauuaucauuucagauacaccaguccacgauugcaauacaacuugucagacacccgagggugcuauaaacaccagccucccauuucagaauauacauccgaucacaauuggaaaauguccaaaauauguaaaaagcacaaaauugagacuggccacaggauugaggaaugucccgucuauucaaucuagaggccuauuuggggccauugccgguuucauugaagggggguggacagggaugguagauggaugguacgguuaucaccaucaaaaugagcaagggucaggauaugcagccgaccugaagagcacacagaaugccauugacaagauuacuaacaaaguaaauucuguuauugaaaagaugaauacacaguucacagcaguagguaaagaguucaaccaccuggaaaaaagaauagagaauuuaaauaaaaagguugaugaugguuuccuggacauuuggacuuacaaugccgaacuguugguucuauuggaaaaugaaagaacuuuggacuaccacgauucaaaugugaaaaacuuauaugaaaagguaagaagccaguuaaaaaacaaugccaaggaaauuggaaacggcugcuuugaauuuuaccacaaaugcgauaacacgugcauggaaagugucaaaaaugggacuuaugacuacccaaaauacucagaggaagcaaaauuaaacagagaagaaauagaugggguaaagcuggaaucaacaaggauuuaccagauuuuggcgauuuauucaacugucgccaguucauugguacugauagucucccugggggcaaucaguuucuggaugugcucuaaugggucucuacaguguagaauauguauuuaa

SEQ ID NO: 41584 - RNA, 1701 nt, Artificial Sequence
  derived and/or modified CDS sequence (wt) from hemagglutinin__InfluenzaA__AFN19806
augaaggcaauacuaguaguucugcuauauacauuugcaaccgcaaaugcagacacauuauguauagguuaucaugcgaacaauucaacagauacuguagacacaguacuagaaaagaauguaacaguaacacacucuguuaaucuucuagaagacaagcauaacgggaaacuaugcaaacuaagagggguagccccauugcauuuggguaaauguaacauugcuggcuggauccugggaaauccagagugugaaucacucuccacagcaagcucaugguccuacauuguggaaacaucuaguucagacaauggaacguguuacccaggagauuucaucgauuaugaggagcuaagggagcaauugagcucagugucaucauuugaaagguuugagauauuccccaagacaaguucauggcccaaucaugacucgaacaaagguguaacggcagcauguccucaugcuggagcaaaaagcuucuacaaaaauuuaauauggcuaguuaaaaaaggaaauucauacccaaagcucagcaaauccuacauuaaugauaaagggaaagaaguccucgugcuauggggcauucaccauccaucuacuacugcugaccaacaaagucucuaucagaaugcagauacauauguuuuuguggggacaucaagauacagcaagaaguucaagccggaaauagcaauaagacccaaagugagggaucaagaagggagaaugaacuauuacuggacacuaguagagccgggagacaaaauaacauuugaagcaacuggaaaucuagugguaccgagauaugcauucgcaauggaaagaaaugcuggaucugguauuaucauuucagauacaccaguccacgauugcaauacaacuugucagacacccaagggugcuauaaacaccagccucccauuucagaauauacauccgaucacaauuggaaaauguccaaaauauguaaaaagcacaaaauugagacuggccacaggauugaggaaugucccgucuauucaaucuagaggccuauuuggggccauugccggcuucauugaagggggguggacagggaugguagauggaugguacgguuaucaccaccaaaaugagcaggggucaggauaugcagccgaccugaagagcacacagaaugccauugacaagauuacuaacaaaguaaauucuguuauugaaaagaugaauacacaguucacagcaguagguaaagaguucaaccaccuggaaaaaagaauagagaauuuaaauaaaaaaguugaugaugguuuccuggacauuuggacuuacaaugcagaacuguugguucuauuggaaaaugaaagaacuuuggacuaccacgauucaaaugugaagaacuuauaugaaaagguaagaaaccaguuaaaaaacaaugccaaggaaacuggaaauggcugcuuugaauuuuaccacaaaugcgauaacacgugcauggaaagugucaaaaaugggacuuaugacuacccaaaauacucagaggaagcaaaauuaaacagagaagaaauagaugggguaaagcuggaaucaacaaggauuuaccagauuuuggcgaucuauucaacugucgccaguucauugguacugguagucucccugggggcaaucaguuuuuggaugugcucuaaugggucucuacaguguagaauauguauuuaa

SEQ ID NO: 41585 - RNA, 1701 nt, Artificial Sequence
  derived and/or modified CDS sequence (wt) from hemagglutinin__InfluenzaA__AFN19808
augaaggcaauacuaguaguucugcuauauacauuugcaacugcaaaugcagacacauuaugcauagguuaucaugcgaacaauucaacagacacuguagacacaguacuagaaaagaauguaacaguaacacacucuguuaaccuucuagaagacaagcauaacgggaaacuaugcaaacuaagagggguagccccauugcauuuggguaaauguaacauugcuggcuggaucuugggaaauccagagugugaaucacucuccacagcaaacucaugguccuacauuguggaaacauccaguucagacaauggaacguguuacccaggagauuucaucgauuaugaggagcuaagagaacaauugagcucagugucaucauucgaaagguuugagauauuccccaagacaaauucauggcccaaucaugacucgaacaaagguguaacggcagcauguccucaugcuggagcaaaaagcuucuacaaaaauuuaauauggcuaguuaaaaaaggaaauucauacccaaagcucagcaaauccuacauuaaugauaaagggaaagaaguccuugugcuauggggcauucaccauccaucuacuagugcugaccaacaaagucucuaucagaaugcagaugcauauguuuuuguggggacaucaagauacagcaagaaguucaagccggaaauagcaauaagacccaaagugagggaucaagaagggagaaugaacuauuacuggacacuaguagagccgggagacaaaauaacauucgaagcaacuggaaaucuagugguaccgagauaugcauucgcaauggaaagaaaugcuggaucugguauuaucauuucagauacaccagcccacgauugcaauacaaccugucagacacccaagggugcuauaaacaccagccucccauuucagaauauacauccgaucacaauuggaaaauguccaaaauauguaaacagcaccaaauugagacuggccacaggauugaggaaugucccguccauucaaucuagaggccuauuuggggccauugccgguuucauugaagggggguggacagggaugguagauggaugguacgguuaccaccaucaaaaugagcaggggucaggauaugcagccgaccugaagagcacacagaaugccauugacaagauuacuaacaaaguaaauucuguuauugaaaagaugaauacacaguucacagcaguagguaaagaguucaaccaccuggaaaaaagaauagagaaucuaaauaaaaaaguugaugaugguuuccuggacauuuggacuuacaaugccgaacuguugguucuauuggaaaaugaaagaacuuuggacuaccacgauucaaaugugaagaacuuauaugaaaaggugagaagccaguuaaaaaacaaugccaaggaaauuggaaauggcugcuuugaauuuuaccacaaaugcgauaacacgugcauggaaagugucaaaaaugggacuuaugacuacccaaaauacucagaggaagcaaaauuaaacagagaagaaauagaugggguaaagcuggaaucaacaaggauuuaccagauuuuggcgaucuauucaacugucgccaguucauugguacugguagucucccugggggcaaucaguuucuggaugugcucuaaugggucucuacaguguagaauauguauuuaa

SEQ ID NO: 41586 - RNA, 1701 nt, Artificial Sequence
  derived and/or modified CDS sequence (wt) from hemagglutinin__InfluenzaA__AFN19814
augaaggcaauacuaguaguuaugcuauauacauuugcaaccgcaaaugcagacacauuauguauagguuaucaugcgaacaauucaacagacacuguagacacaguacuagaaaagaauguaacaguaacacacucuguuaaucuucuagaagacaagcauaacgggaaacuaugcaaacuaagagggguagccccauugcauuuggguaaauguaacauugcuggcuggauccugggaaauccagagugugaaucacucuccacagcaagcucaugguccuacauuguggaaacaucuaguucagacaauggaacguguuacccaggagauuucaucgauuaugaggagcuaagagagcaauugagcucagugucaucauuugaaagguuugagauauuccccaaaacaaguucauggcccaaucaugacucgaacaaagguguaacggcagcauguccucaugcuggagcaaaaggcuucuacaaaaauuuaauauggcuaguuaaaaaaggaaauucauacccaaagcucagcaaauccuacauuaaugauaaagggaaagaaguccuugugcuauggggcauucaccauccgucuacuacugcugaccaacaaagucucuaucagaaugcagauacauauguuuuuguggggacaucaagauacagcaagaaguucaagccggaaauagcaauaagacccaaaguaagggaucaagaagggagaaugaacuauuacuggacacuaguagagccgggagacaaaauaacauucgaagcaacuggaaaucuagugguaccgagauaugcauucgcaauggaaagaaaugcuggaucugguauuaucauuucagauacaccaguccacgauugcaauacaacuugucagacacccaagggugcuauaaacaccagccucccauuucagaauauacauccgaucacaauuggaaaauguccaaaauauguaaaaagcacaaaauugagacuggccacaggauugaggaaugucccgucuauucaaucuagaggccuauuuggggccauugccggcuucauugaagggggguggacagggaugguagauggaugguacgguuaucaccaucaaaaugagcaggggucaggauaugcagccgaccugaagagcacacagaaugccauugacaagauuacuaacaaaguaaauucuguuauugaaaagaugaauacacaguucacagcaguagguaaagaguucaaccaccuggaaaaaagaauagagaauuuaaauaaaaaaguugaugaugguuuccuggacauuuggacuuacaaugccgaacuguugguucuauuggaaaaugaaagaacuuuggacuaccacgauucaaaugugaagaacuuauaugaaaagguaagaaaccaguuaaaaaacaaugccaaggaaauuggaaauggcugcuucgaauuuuaccacaaaugcgauaacacgugcauggaaagugucaaaaaugggacuuaugacuacccaaaauacucagaggaagcaaaauuaaacagagaggaaauagaugggguaaagcuggaaucaacaaggauuuaccagauuuuggcgaucuauucaacugucgccaguucauugguacugguagucucccugggggcaaucaguuuuuggaugugcucuaaugggucucuacaguguagaauauguauuuaa

SEQ ID NO: 41587 - RNA, 1701 nt, Artificial Sequence
  derived and/or modified CDS sequence (wt) from hemagglutinin__InfluenzaA__AFN19816
augaaggcaauacuaguaguucugcuauauacauuugcaaccgcaaaugcagacacauuauguauagguuaccaugcgaacaauucaacagacacuguagacacaguacuagaaaagaauguaacaguaacacacucuguuaaucuucuagaagacaagcauaacgggaaacuaugcaaacuaagagggguagccccauugcauuuggguaaauguaacauugcuggcuggauccugggaaauccagagugugaaucacucuccacagcaagcucaugguccuacauuguggaaacaucuaguucagacaauggaacguguuacccaggagauuucaucgauuaugaggagcuaagagagcaauugagcucagugucaucauuugaaagguuugagauauuccccaagacaaguucauggcccaaucaugacucgaacaaagguguaacggcagcauguccucaugcuggagcaaaaggcuucuacaaaaauuuaauauggcuaguuaaaaaaggaaauucauacccaaagcucagcaaauccuacauuaaugauaaagggaaagaaguccucgugcuauggggcauucaccauccaucuacuacugcugaccaacaaagucucuaucagaaugcagauacauauguuuuuguggggacaucaagauacagcaagaaguucaagccggaaauagcaauaagacccaaagugagggaucaagaagggagaaugaacuauuacuggacacuaguagagccgggagacaaaauaacauucgaagcaacuggaaaucuagugguaccgagauaugcauucgcaauggaaagagaugcuggaucugguauuaucauuucagauacaccaguccacgauugcaauacaacuugucagacacccaagggugcuauaaacaccagccucccauuucagaauauacauccgaucacaauuggaaaauguccaaaauauguaaaaagcacaaaauugagacuggccacaggauugaggaaugucccgucuauucaaucuagaggccuauuuggggccauugccggcuucauugaagggggguggacagggaugguagauggaugguacgguuaucaccaucaaaaugagcaggggucaggauaugcagccgaccugaagagcacacagaaugccauugacaagauuacuaacaaaguaaauucuguuauugaaaagaugaauacacaguucacagcaguagguaaagaguucaaccaccuggaaaaaagaauagagaauuuaaauaaaaaaguugaugauggguuccuggacauuuggacuuacaaugccgaacuguugguucuauuggaaaaugaaagaacuuuggacuaccacgauucaaaugugaagaacuuauaugaaaagguaagaaaccaguuaaaaaacaaugccaaggaaauuggaaauggcugcuuugaauuuuaccacaaaugcgauaacacguguauggaaagugucaaaaaugggacuuaugacuacccaaaauacucagaggaagcaaaauuaaacagagaagaaauagaugggguaaagcuggaaucaacaaggauuuaccagauuuuggcgaucuauucaacugucgccaguucauugguacugguagucucccugggggcaaucaguuuuuggaugugcucuaaugggucucuacaguguagaauauguauuuaa

SEQ ID NO: 41588 - RNA, 1701 nt, Artificial Sequence
  derived and/or modified CDS sequence (wt) from hemagglutinin__InfluenzaA__AFN19821
augaaggcaauacuaguaguucugcuauauacauuugcaaccgcaaaugcagacacauuauguauagguuaucaugcgaacaauucaacagacacuguagacacaguacuagaaaagaauguaacagugacacacucuguuaaucuucuagaagacaagcauaacgggaaacuaugcaaacuaagagggguagccccauugcauuuggguaaauguaacauugcuggcuggauccugggaaauccagagugugaaucacucuccacagcaagcucaugguccuacauuguggaaacaucuaguucagacaauggaacguguuacccaggagauuucaucgauuaugaggagcuaagagagcaauugagcucagugucaucauuugaaagguuugagauauuccccaagacaaguucauggcccaaucaugacucgaacaaagguguaacggcagcauguccucaugcuggagcaaaaagcuucuacaaaaauuuaauauggcuaguuaaaaaaggaaauucauacccaaagcucagcaaauccuacauuaaugauaaagggaaagaaguccuagugcuauggggcauucaccauccaucuacuacugcugaccaacaaagucucuaucagaaugcagauacauauguuuuuguggggacaucaagauacagcaagaaguuaaagccggaaauagcaauaagacccaaagugagggaucaagaagggagaaugaacuauuacuggacacuaguagagccgggaggcaaaauaacauucgaagcaacuggaaaucuagugguaccgagauaugcauucgcaauggaaagaaaugcuggaucugguauuaucauuucagauacaccaguccacgauugcaauacaacuugucagacacccaagggugcuauaaacaccagccucccauuucagaauauacauccgaucacaauuggaaaauguccaaaauauguaaaaagcacaaaauugagacuggccacaggauugaggaaugucccgucuauucaaucuagaggccuauuuggggccauugccggcuucauugaagggggguggacagggaugguagauggaugguacgguuaucaccaucaaaaugagcaggggucaggauaugcagccgaccugaagagcacacagaaugccauugacaagauuacuaacaaaguaaauucuguuauugaaaagaugaauacacaguucacagcaguagguaaagaguucaaccaccuggaaaaaagaauagagaauuuaaauaaaaaaguugaugaugguuuccuggacauuuggacuuacaaugccgaacuguugguucuauuggaaaaugaaagaacuuuggacuaccacgauucaaaugugaagaacuuauaugaaaagguaagaaaccaguuaaaaaacaaugccaaggaaauuggaaauggcugcuuugaauuuuaccacaaaugcgauaacacgugcauggaaagugucaaaaaugggacuuaugacuacccaaaauacucagaggaagcaaaauugaacagagaagaaauagaugggguaaagcuggaaucaacaaggauuuaccagauuuuggcgaucuauucaacugucgccaguucauugguacugguagucucccugggggcaaucaguuuuuggaugugcucuaaugggucucuacaguguagaauauguauuuaa

SEQ ID NO: 41589 - RNA, 1701 nt, Artificial Sequence
  derived and/or modified CDS sequence (wt) from hemagglutinin__InfluenzaA__AFN19831
augaaggcaauacuaguaguucugcuauauacauuugcaaccgcaaaugcagacacauuauguauagguuaucaugcgaacaauucaacagacacuguagacacaguacuagaaaagaauguaacagugacacacucuguuaaucuucuagaagacaagcauaacgggaaacuaugcaaacuaagagggguagccccauugcauuuggguaaauguaacauugcuggcuggauccugggaaauccagagugugaaucacucuccacagcaagcucaugguccuacauuguggaaacaucuaguucagacaauggaacguguuacccaggagauuucaucgauuaugaggagcuaagagagcaauugagcucagugucaucauuugaaagguuugagauauuccccaagacaaguucauggcccaaucaugacucgaacaaagguguaacggcagcauguccucaugcuggagcaaaaagcuucuacaaaaauuuaauauggcuaguuaaaaaaggaaauucauacccaaagcucagcaaauccuacauuaaugauaaagggaaagaaguccucgugcuauggggcauucaccauccaucuacuacugcugaccaacaaagucucuaucagaaugcagauacauauguuuuuguggggacaucaagauacagcaagaaguucaagccggaaauagcaauaagacccaaagugagggaucaagaagggagaaugaacuauuacuggacacuaguagagccgggagacaaaauaacauucgaagcaacuggaaaucuagugguaccgagauaugcauucgcaauggaaagaaaugcuggaucugguauuaucauuucagauacaccaguccacgauugcaauacaacuugucagacacccaagggugcuauaaacaccagccucccauuucagaauauacauccgaucacaauuggaaaauguccaaaauauguaaaaagcacaaaauugagacuggccacaggauugaggaaugucccgucuauucaaucuagaggccuauuuggggccauugccggcuucauugaagggggguggacagggaugguagauggaugguacgguuaucaccaucaaaaugagcaggggucaggauaugcagccgaccugaagagcacacagaaugccauugacaagauuacuaacaaaguaaauucuguuauugaaaagaugaauacacaguucacagcaguagguaaagaguucaaccaccuggaaaaaaggauagagaauuuaaauaaaaaaguugaugaugguuuccuggacauuuggacuuacaaugccgaacuguugguucuauuggaaaaugaaagaacuuuggacuaccacgauucaaaugugaagaacuuauaugaaaagguaagaaaccaguuaaaaaacaaugccaaggaaauuggaaauggcugcuuugaauuuuaccacaaaugcgauaacacgugcauggaaagugucaaaaaugggacuuaugacuacccaaaauacucagaggaagcaaaauugaacagagaagaaauagaugggguaaagcuggaaucaacaaggauuuaccagauuuuggcgaucuauucaacugucgccaguucauugguacugguagucucccugggggcaaucaguuuuuggaugugcucuaaugggucucuacaguguagaauauguauuuaa

SEQ ID NO: 41590 - RNA, 1701 nt, Artificial Sequence
  derived and/or modified CDS sequence (wt) from hemagglutinin__InfluenzaA__AFN19849
augaaggcaauacuaguaguucugcuauauacauuugcaaccgcaaaugcagacacauuauguauagguuaucaugcgaacaauucaacagacacuguagacacaguacuagaaaagaauguaacaguaacacacucuguuaaccuucuagaagacaagcauaacgggaaacuaugcaaacugagagggguagccccauugcauuuggguaaaugugacauugcuggcuggauccugggaaauccagaaugugaaucacucuccacagcaagcucaugguccuacaucguggaaacaucuaguucagacaauggaacgugcuacccaggagauuucaucaauuaugaggagcuaagagagcaauugagcucagugucaucauuugaaagguuugagauauuccccaagacaaguucauggcccaaucaugacucgaacaaagguguaacggcagcauguccucaagcuggagcaaaaagcuucuacaaaaauuuaauauggcuaguuaaaaaaggaaauucauacccaaagcucagcaaauccuacauuaacgauaaagggaaagaaguccucgugcuauggggcauucaccauccaucuacuagugcugaccaacaaagucucuaucagaaugcagaugcauauguuuuuguggggacaucaaaauacagcaagaaguucaagccggaaauagcaguaagacccaaagugagggaucaagaagggagaaugaacuauuacuggacacuaguagagccgggagacaaaauaacauucgaagcaacuggaaaucuauugguaccgagauaugcauucgcaauggaaagaaaugcuggaucugguauuaucauuucagauacaccaguccacgauugcaauacaacuugucagacacccaagggugcuauaaacaccagccucccauuucagaauauacauccgaucacaauuggaaaaugucccaaauauguaaaaagcacaaaauugagacuggccacaggauugaggaaugucccgucuauucaaucuagaggccuauuuggggccauugccgguuucauugaagggggguggacagggaugguagauggaugguacgguuaucaccaucaaaaugcgcaggggucaggauaugcagccgaccugaagagcacacagaaugccauugacaagauuacuaacaaaguaaauucuguuauugaaaagaugaauacacaguucacagcaguagguaaagaguucaaccaccuggaaaaaagaauagagaauuuaaauaaaaaaguugaugaugguuuccuggacauuuggacuuacaaugccgaacuguugguucuauuggaaaaugaaagaacuuuggacuaccacgauucaaaugugaaaaacuuauaugaaaagguaagaagccaguuaaaaaacaaugccaaggaaauuggagacggcugcuuugaauuuuaccacaaaugcgacaacacgugcauggaaagugucaaaaaugggacuuaugacuacccaaaauacucagaggaagcaaaauuaaacagagaagaaauagaugggguaaagcuggaaucaacaaggauuuaccagauuuuggcgauauauucaacugucgccaguucauugguacugguagucucccugggggcaaucaguuucuggaugugcucuaaugggucucuacaguguagaauauguauuuaa

SEQ ID NO: 41591 - RNA, 1701 nt, Artificial Sequence
  derived and/or modified CDS sequence (wt) from hemagglutinin__InfluenzaA__AFN19865
augaaggcaauacuaguaguucugcuauauacauuugcaaccgcaaaugcagacacauuauguauagguuaucaugcgaacaauucaacagacacuguagacacaguacuagaaaagaauguaacaguaacacacucuguuaaccuucuagaagacaagcauaacgggaaacuaugcaagcuaagagggguagccccauugcauuuggguaaauguaacauugcuggcuggauccugggaaauccagagugugaaucacucuccacagcaagcucaugguccuacauuguggaaacaucuaguucagacaauggaacguguuacccaggagauuucaucgauuaugaggagcuaagagagcaauugagcucagugucaucauuugaaagguuugagauauuccccaagacaaguucauggcccaaucaugacucgaacaaagguguaacggcagcauguccucaugcuggagcaaaaagcuucuacaaaaauuuaauauggcuaguuaaaaaaggaaauucauacccaaagcucagcaaauccuacauuaaugauaaagggaaagaaguccucgugcuauggggcauucaccauccaucuacuacugcugaccaacaaagucucuaucagaaugcagaugcauauguuuuuguggggacaucaagauacagcaagaaguucaagccggaaauagcaauaagacccaaagugagagaucaagaagggagaaugaacuauuacuggacacuaguagagccgggagacaaaauaacauucgaagcaacuggaaaucuagugguaccgagauaugcauucgcaauggaaagaaaugcuggaucugguauuaucauuucagauacacuaguccacgauugcaauacaacuugucagacacccaagggugcuauaaacaccagccucccauuucagaauauacauccgaucacaauuggaaaauguccaaaauauguaaaaagcacaaaauugagacuggccacaggauugaggaaugucccgucuauucaaucuagaggccuauuuggggccauugccggcuucauugaagggggguggacagggaugguagauggaugguacgguuaucaccaucaaaaugagcaggggucaggauaugcagccgaccugaagagcacacagaaugccauugacaagauuacuaacaaaguaaauucuguuauugaaaaaaugaauacacaguucacagcaguagguaaagaguucaaccaccuggaaaaaagaauagagaauuuaaauaaaaaaguugaugaugguuuccuggacauuuggacuuacaaugccgaacuguugguucuauuggaaaaugaaagaacuuuggacuaccacgauucaaaugugaagaacuuauaugaaaagguaagaaaccaguuaaaaaacaaugccaaggaaauuggaaacggcugcuuugaauuuuaccacaaaugcgauaacacgugcauggaaagugucaaaaaugggacuuaugacuacccaaaauacucagaggaagcaaaauuaaacagagaagaaauagaugggguaaagcuggaaucaacaaggauuuaccagauuuuggcgaucuauucaacugucgccaguucauuaguacugguagucucccugggggcaaucaguuucuggaugugcucuaaugggucucuacaguguagaauauguauuuaa

SEQ ID NO: 41592 - RNA, 1701 nt, Artificial Sequence
  derived and/or modified CDS sequence (wt) from hemagglutinin__InfluenzaA__AFN19875
augaaggcaauacuaguaguucugcuauauacauuugcaaccgcaaaugcagacacauuauguauagguuaucaugcgaacaauucaacagacacuguggacacaguacuagaaaagaauguaacaguaacacacucuguuaaccuucuagaagacaagcauaacgggaaacuaugcaaacugagagggguagccccauugcauuuggguaaauguaacauugcuggcuggauccugggaaauccagagugugaaucacucuccacagcaagcucaugguccuacauuguggaaacaucuaguucagacaauggaacguguuacccaggagauuucaucaauuaugaagagcuaagagagcaauugagcucagugucaucauuugaaagguuugagauauuccccaagacaaguucauggcccaaucaugacucgaacaaagguguaacggcagcauguccucaugcuggagaaaaaagcuucuacaaaaauuuaauauggcuaguuaaaaaaggaaauucauacccaaagcucagcaaauccuacauuaacgauaaagggaaagaaguccucgugcuauggggcauucaccauccaucuacuagugcugaccaacaaagucucuaucagaaugcagaugcauauguuuuuguggggacaucaaaauacagcaagaaguucaagccggaaauagcaguaagacccaaagugagggaucaagaagggagaaugaacuauuacuggacacuaguagagccgggagacaaaauaacauucgaagcaacuggaaaucuauugguaccgagauaugcauucgcaauggaaagaaaugcuggaucugguauuaucauuucagauacaccaguccacgauugcaauacaacuugucagacacccaagggugcuauaaacaccagccucccauuucagaauauacauccgaucacaauuggaaaauguccaaaauauguaaaaagcacaaaauugagacuggccacaggauugaggaaugucccgucuauucaaucuagaggccuuuuuggggccauugccgguuucauugaagggggguggacagggaugguagauggaugguacgguuaucaccaucaaaaugagcaggggucaggauaugcagccgaccugaagagcacacagaaugccauugacaagauuacuaacaaaguaaauucuguuauugaaaagaugaauacacaguucacagcaguagguaaagaguucaaccaccuggaaaaaagaauagagaauuuaaauaaaaaaguugaugaugguuuccuggacauuuggacuuacaaugccgaacuguugguucuauuggaaaaugaaagaacuuuggacuaccacgauucaaaugugaaaaacuuauaugaaaagguaagaagccaguuaaaaaacaaugccaaggaaauuggaaacggcugcuuugaauuuuaccacaaaugcgauaacacgugcauggaaagugucaaaaaugggacuuaugacuacccaaaauacucagaggaagcaaaauuaaacagagaagaaauagaugggguaaagcuggaaucaacaaggauuuaccagauuuuggcgaucuauucaacugucgccaguucauugguacugguagucucccugggggcaaucaguuucuggaugugcucuaaugggucucuacaguguagaauauguauuuaa

SEQ ID NO: 41593 - RNA, 1701 nt, Artificial Sequence
  derived and/or modified CDS sequence (wt) from hemagglutinin__InfluenzaA__AFN19895
augaaggcaauacuaguaguucugcuauauacauuugcaaccgcaaaugcagacacauuauguauagguuaucaugcgaacaauucaacagacacuguagacacaguacuagaaaagaauguaacaguaacacacucuguuaaucuucuagaagacaagcauaacgggaaacuaugcaaacuaagagggguagccccauugcauuuggguaaauguaacauugcuggcuggauccugggaaauccagagugugaaucacucuccacagcaagcucaugguccuacauuguggaaacaucuaguucagacaauggaacguguuacccaggagauuucaucgauuaugaggagcuaagggagcaauugagcucagugucaucauuugaaagguuugagauauuccccaagacaaguucauggcccaaucaugacucgaacaaagguguaacggcagcauguccucaugcuggagcaaaaagcuucuacaaaaauuuaauauggcuaguuaaaaaaggaaauucauacccaaagaucagcaaauccuacauuaaugauaaagggaaagaaguccucgugcuauggggcauucaccauccaucuacuacugcugaccaacaaagucucuaucagaaugcagauacauauguuuuuguggggacaucaagauacagcaagaaguucaagccggaaauagcaauaagacccaaagugagggaucaagaagggagaaugaacuauuacuggacacuaguagagccgggagacaaaauaacauucgaagcaacuggaaaucuagugguaccgagauaugcauucgcaauggaaagaaaugcuggaucugguauuaucauuucagauacaccaguccacgauugcaauacaacuugucagacacccaagggugcuauaaacaccagccucccauuucagaauauacauccgaucacaauuggaagauguccaaaauauguaaaaagcacaaaauugagacuggccacaggauugaggaaugucccgucuauucaaucuagaggccuauuuggggccauugccggcuucauugaagggggguggacagggaugguagauggaugguacgguuaucaccaccaaaaugagcaggggucaggauaugcagccgaccugaagagcacacagaaugccauugacaagauuacuaacaaaguaaauucuguuauugaaaagaugaauacacaguucacagcaguagguaaagaguucaaccaccuggaaaaaagaauagagaauuuaaauaaaaaaguugaugaugguuuccuggacauuuggacuuacaaugccgaacuguugguucuauuggaaaaugaaagaacuuuggacuaccacgauucaaaugugaagaacuuauaugaaaagguaagaaaccaguuaaaaaacaaugccaaggaaacuggaaauggcugcuuugaauuuuaccacaaaugcgauaacacgugcauggaaagugucaaaaaugggacuuaugacuacccaaaauacucagaggaagcaaaauuaaacagagaaguaauagaugggguaaagcuggaaucaacaaggauuuaccagauuuuggcgaucuauucaacugucgccaguucauugguacugguagucucccugggggcaaucaguuuuuggaugugcucuaaugggucucuacaguguagaauauguauuuaa

SEQ ID NO: 41594 - RNA, 1701 nt, Artificial Sequence
  derived and/or modified CDS sequence (wt) from hemagglutinin__InfluenzaA__AFN19905
augaaggcaauacuaguaguucugcuauauacauuugcaaccgcaaaugcagacacauuauguauagguuaucaugcgaacaauucaacagacacuguagacacaguacuagaaaagaauguaacaguaacacacucuguuaaucuucuagaagacaagcauaacgggaaacuaugcaaacuaagagggguagccccauugcauuuggguaaauguaacauugcuggcuggauccugggaaauccagagugugaaucacucuccacagcaagcucaugguccuacauuguggaaacaucuaguucagacaauggaacguguuacccaggagauuucaucgauuaugaggagcuaagagagcaauugagcucagugucaucauuugaaagguuugagauauuccccaaaacaaguucauggcccaaucaugacucgaacaaagguguaacggcagcauguccucaugcuggagcaaaaggcuucuacaaaaauuuaauauggcuaguuaaaaaaggaaauucauacccaaagcucagcaaauccuacauuaaugauaaagggaaagaaguccucgugcuauggggcauucaccauccaucuacuacugcugaccaacaaagucucuaucagaaugcagauacauauguuuuuguggggacaucaagauacagcaagaaguucaagccggaaauagcaauaagacccaaagugagggaucaagaagggagaaugaacuauuacuggacacuaguagagccgggagacaaaauaacauucgaagcaacuggaaaucuagugguaccgagauaugcauucgcaauggaaagaaaugcuggaucugguauuaucauuucagauacaccgguccacgauugcaauacaacuugucagacacccaagggugcuauaaacaccagccucccauuucagaauauacauccgaucacaauuggaaaauguccaaaauauguaaaaagcacaaaauugagacuggccacaggauugaggaaugucccgucuauucaaucuagaggccuauuuggggccauugccggcuucauugaagggggguggacagggaugguagauggaugguacgguuaucaccaucaaaaugagcagggaucaggauaugcagccgaccugaagagcacacagaaugccguugacaagauuacuaacaaaguaaauucuguuauugaaaagaugaauacacaguucacagcaguagguaaagaguucaaccaccuggaaaaaagaauagagaauuuaaauaaaaaaguugaugaugguuuccuggacauuuggacuuacaaugccgaacuguugguucuauuggaaaaugaaagaacuuuggacuaccacgauucaaaugugaagaacuuauaugaaaagguaagaaaccaguuaaaaaacaaugccaaggaaauuggaaauggcugcuuugaauuuuaccacaaaugcgauaacacgugcauggaaagugucaaaaaugggacuuaugacuacccaaaauacucagaggaagcaaaauuaaacagagaaaaaauagaugggguaaagcuggaaucaacaaggauuuaccagauuuuggcgaucuauucaacugucgccaguucauugguacugauagucucccugggggcaaucaguuuuuggaugugcucuaaugggucucuacaguguagaauauguauuuaa

SEQ ID NO: 41595 - RNA, 1701 nt, Artificial Sequence
  derived and/or modified CDS sequence (wt) from hemagglutinin__InfluenzaA__AFN19915
augaaggcaauacuaguaguucugcuauauacauuugcaaccgcaaaugcagacacauuauguauagguuaucaugcgaacaauucaacagacacuguagacacaguacuagaaaagaauguaacaguaacacacucuguuaaccuucuagaagacaagcauaacgggaaacuaugcaaacugagagggguagccccauugcauuuggguaaauguaacauugcuggcuggauccugggaaauccagagugugaaucacucuccacagcaagcucaugguccuacaucguggaaacaucuaguucagacaauggaacgugcuacccaggagauuucaucaauuaugaggagcuaagagagcaauugagcucagugucaucauuugaaagguuugagauauuccccaagacaaguucauggcccaaucaugacucgaacaaagguguaacggcagcauguccucaagcuggagcaaaaagcuucuacaaaaauuuaauauggcuaguuaaaaaaggaaauucauacccaaagcucagcagcuccuacauuaacgauaaagggaaagaaguccucgugcuauggggcauucaccauccaucuacuagugcugaccaacaaagucucuaucagaaugcagaugcauauguuuuuguggggacaucagaauacagcaagaaguucaagccggaaauagcaguaagacccaaagugagggaucaagaagggagaaugaacuauuacuggacacuaguagagccgggagacaaaauaacauucgaagcaacuggaaaucuauugguaccgagauaugcauucgcaauggaaagaaaugcuggaucugguauuaucauuucagauacaccaguccacgauugcaauacaacuugucagacacccaagggugcuauaaacaccagccucccauuucagaauauacauccgaucacaauuggaaaaugucccaaauauguaaaaagcacaaaauugagacuggccacaggauugaggaaugucccgucuauucaaucuagaggccuauuuggggccauugccgguuucauugaagggggguggacagggaugguagauggaugguacgguuaucaccaucaaaaugcgcaggggucaggauaugcagccgaccugaagagcacacagaaugccauugacaagauuacuaacaaaguaaauucuguuauugaaaagaugaauacacaguucacagcaguagguaaagaguucaaccaccuggaaaaaagaauagagaauuuaaauaaaaaaguugaugaugguuuccuggacauuuggacuuacaaugccgaacuguugguucuauuggaaaaugaaagaacuuuggacuaccacgauucaaaugugaaaaacuuauaugaaaagguaagaagccaguuaaaaaacaaugccaaggaaauuggaaacggcugcuuugaauuuuaccacaaaugcgacaacacgugcauggaaagugucaaaaaugggacuuaugacuacccaaaauacucagaggaagcaaaauuaaacagagaagaaauagaugggguaaagcuggaaucaacaaggauuuaccagauuuuggcgaucuauucaacugucgccaguucauugguacugguagucucccugggggcaaucaguuucuggaugugcucuaaugggucucuacaguguagaauauguauuuaa

SEQ ID NO: 41596 - RNA, 1701 nt, Artificial Sequence
  derived and/or modified CDS sequence (wt) from hemagglutinin__InfluenzaA__AFN19922
augaaggcaauacuaguaguugugcuauauacauuugcaaccgcaaaugcagacacauuauguauagguuaucaugcgaacaauucaacagacacuguagacacaguacuagaaaagaauguaacaguaacacacucuguuaaucuucuagaagacaagcauaacgggaaacuaugcaaacuaagagggguagccccauuacauuuggguaaauguaacauugcuggcuggauccugggaaauccagagugugaaucacucuccacagcaagcucaugguccuacauuguggaaacaucuaguucagacaauggaacguguuacccaggagauuucaucgauuaugaggagcuaagagagcaauugagcucagugucaucauuugaaagguuugagauauuccccaaaacaaguucauggcccaaucaugacucgaacaaagguguaacggcagcauguccucaugcuggagcaaaaggcuucuacaaaaauuuaauauggcuaguuaaaaaaggaaauucauacccaaagcucagcagauccuacauuaaugauaaagggaaagaaguccucgugcuauggggcauucaccauccaucuacuacugcugaccaacaaagucucuaucagaaugcagauacauauguuuuuguggggacaucaagauacagcaagaaguucaagccggaaauagcaauaagacccaaagugagggaucaagaagggagaaugaacuauuacuggacacuaguagagccgggagacaaaauaacauucgaagcaacuggaaaucuagugguaccgagauaugcauucgcaauggaaagaaaugcuggaucugguauuaucauuucagauacaccagcccaagauugcaauacaacuugucagacacccaagggugcuauaaacaccagccucccauuucagaacauacauccgaucacaauuggaaaauguccaaaauauguaaaaagcacaaaauugagacuggccacaggauugaggaaugucccgucuauucaaucuagaggccuauuuggggccauugccggcuucauugaagggggguggacagggaugguagauggaugguacgguuaucaucaucaaaaugagcaggggucaggauaugcagccgaccugaagagcacacagaaugccauugacaagauuacuaacaaaguaaauucuguuauugaaaagaugaauacacaguucacagcaguagguaaagaguucaaccaccuggaaaaaagaauagagaauuuaaauaaaaaaguugaugaugguuuccuggacauuuggacguacaaugccgaacuguugguucuauuggaaaaugaaagaacuuuggacuaccacgauucaaaugugaagaacuuauaugaaaagguaagaaaccaguuaaaaaacaaugccaaggaaauuggaaauggcugcuuugaauuuuaccacaaaugcgauaacacgugcauggaaagugucaaaaaugggacuuaugacuacccaaaauacucagaggaagcaaaauuaaacagagaagaaauagaugggguaaagcuggaaucaacaaggauuuaccagauuuuggcgaucuauucaacugucgccaguucauugguacugguagucucccugggggcaaucaguuuuuggaugugcucuaaugggucucuacaguguagaauauguauuuaa

SEQ ID NO: 41597 - RNA, 1701 nt, Artificial Sequence
  derived and/or modified CDS sequence (wt) from hemagglutinin__InfluenzaA__AFN19931
augaaggcaauacuaguaguucugcuauauacauuugcaaccgcaaaugcagacacauuauguauagguuaccaugcgaacaauucaacagacacuguagacacaguacuagaaaagaauguaacaguaacacacucugucaaucuucuagaagacaagcauaacgggaaacuaugcaaacuaagagggguagccccauugcauuuggguaaauguaacauugcuggcuggauccuggguaauccagagugugaaucacucuccacagcaagcucaugguccuacauuguggaaacaucuaguucagacaauggaacguguuacccaggagauuucauugauuaugaggagcuaagagagcaauugagcucagugucaucauuugaaagguuugagauauuccccaagacaaguucauggcccaaucaugacucgaacaaagguguaacggcagcauguccucaugcuggagcaaaaggcuucuacaaaaauuuaauuuggcuaguuaaaaaagggaauucauacccaaagcucagcaaauccuacauuaaugauaaagggaaagaaguccucgugcuauggggcauucaccauccaucuacuacugcugaccaacaaagucucuaucagaaugcagauacauauguuuuuguggggacaucaagauacagcaagaaguucaagccggaaauagcaauaagacccaaagugagggaucaagaagggagaaugaacuauuacuggacacuaguagagccgggagacaaaauaacauucgaagcaacuggaaaucuagugguaccgagauaugcauucgcaauggaaagaaaugcuggaucugguauuaucauuucagauacaccaguccacgauugcaauacaacuugucagacacccaagggugcuauaaacaccagccucccauuucagaauauacauccgaucacaauuggaaaauguccaaaauauguaaaaagcacaaaauugagacuggccacaggauugaggaaugucccgucuauucaaucuagaggccuauuuggggccauugccggcuucauugaagggggguggacagggaugguagauggaugguacgguuaucaccaucaaaaugagcaggggucaggauaugcagccgaccugaagagcacacagaaugccauugacaagauuacuaacaaaguaaauucuguuauugaaaagaugaauacacaguucacagcaguagguaaagaguucaaccaccuggaaaaaagaauagagaauuuaaauaaaaaaguugaugaugguuuccuggacauuuggacuuacaaugccgaacuguugguucuauuggaaaaugaaagaacuuuggacuaccacgauucaaacgugaagaacuuauaugaaaaggugagaaaccaguuaaaaaacaaugccaaggaaauuggaaauggcugcuuugaauuuuaccacaaaugugauaacacgugcauggaaagugucaaaaaugggacuuaugacuacccaaaauacucagaggaagcaaaauuaaacagagaagaaauagaugggguaaagcuggaaucaacaaggauuuaccagauuuuggcgaucuauucaacugucgccaguucauugguacugguagucucccugggggcaaucaguuuuuggaugugcucuaaugggucucuacaguguagaauauguauuuaa

SEQ ID NO: 41598 - RNA, 1701 nt, Artificial Sequence
  derived and/or modified CDS sequence (wt) from hemagglutinin__InfluenzaA__AFN19941
augaaggcaauacuaguaguucugcuauauacauuugcaaccgcaaaugcagacacauuauguauagguuaucaugcgaacaauucaacagacacuguagacacaguacuagaaaagaauguaacaguaacacacucuguuaaccuucuagaagacaagcauaacgggaaacuaugcaaacugagagggguagccccauugcauuuggguaaauguaacauugcuggcuggauccuggggaauccagagugugaaucacucuccacagcaagcucaugguccuacaucguggaaacaucuauuucagacaauggaacgugcuacccaggagauuucaucaauuaugaggagcuaagagagcaauugagcucggugucaucauuugaaagguuugagauauuccccaagacaaguucauggcccaaucaugacucgaacaaagguguaacggcagcauguccucaagcuggagcaaaaagcuucuacaaaaauuuaauauggcuaguuaaaaaaggaaauucauacccaaagcucagcaaauccuacauuaacgauaaagggaaagaaguccucgugcuguggggcauucaccauccaucuacuagugcugaccaacaaagucucuaucagaaugcagaugcauauguuuuuguggggacaucaaaauacagcaagaaguucaagccggaaauagcaguaagacccaaagugagggaucaagaagggagaaugaacuauuacuggacacuaguagagccgggagacaaaauaacauucgaagcaacuggaaaucuauugguaccgagauaugcauucgcaauggaaagaaaugcuggaucugguauuaucauuucagauacaccaguccacgauugcaauacaacuugucagacacccaagggugcuauaaacaccagccucccauuucagaauauacauccgaucacaauuggaaaaugucccaaauauguaaaaagcacaaaauugagacuggccacaggauugaggaaugucccgucuauucaaucuagaggccuauuuggggccauugccgguuucauugaagggggguggacagggaugguagauggaugguacgguuaucaccaucaaaaugcgcaggggucaggauaugcagccgaccugaagagcacacagaaugccauugacaagauuacuaacaaaguaaauucuguuauugaaaagaugaauacacaguucacagcaguagguaaagaguucaaccaccuggaaaaaagaauagagaauuuaaauaaaaaaguugaugaugguuuccuggacauuuggacuuacaaugccgaacuguugguucuauuggaaaaugaaagaacuuuggacuaccacgauucaaaugugaaaaacuuauaugaaaagguaagaagccaguuaaaaaacaaugccaaggaaauuggaaacggcugcuuugaauuuuaccacaaaugugacaacacgugcauggaaagugucaaaaaugggacuuaugacuacccaaaauacucagaggaagcaaaauuaaacagagaagaaauagaugggguaaagcuggaaucaacaaggauuuaccagauuuuggcgaucuauucaacugucgccaguucauugguacugguagucucccugggggcaaucaguuucuggaugugcucuaaugggucucuacaguguagaauauguauuuaa

SEQ ID NO: 41599 - RNA, 1701 nt, Artificial Sequence
  derived and/or modified CDS sequence (wt) from hemagglutinin__InfluenzaA__AFN19951
augaaggcaauacuaguaguucugcuauauacauuugcaaccgcaaaugcagacacauuauguauagguuaucaugcgaacaauucaacagacacuguagacacaguacuagaaaagaauguaacaguaacacacucuguuaaucuucuagaagacaagcauaacgggaaacuaugcaaacuaagagggguagccccauugcauuuggguaaauguaacauugcuggcuggauccugggaaauccagagugugaaucacucuccacagcaagcucaugguccuacauuguggaaacaucuaguucagacaauggaacguguuacccaggagauuucaucgauuaugaggagcuaagggagcaauugagcucagugucaucauuugaaagguuugagauauuccccaagacaaguucauggcccaaucaugacucgaacaaagguguaacggcagcauguccucaugcuggagcaaaaagcuucuacaaaaauuuaauauggcuaguuaaaaaaggaaauucauacccaaagcucagcaaauccuacauuaaugauaaagggaaagaaguccucgugcuauggggcauucaccauccaucuacuacugcugaccaacaaagucucuaucagaaugcagauacauauguuuuuguggggacaucaagauacagcaagaaguucaagccggaaauagcaauaagacccaaagugagggaucaagaagggagaaugaacuauuacuggacacuaguagagccgggagacaaaauaacauucgaagcaacuggaaaucuagugguaccgagauaugcauucgcaauggaaagaaaugcuggaucugguauuaucauuucagauacaccaguccacgauugcaauacaacuugucagacacccaagggugcuauaaacaccagccucccauuucagaauauacauccgaucacaauuggaaaauguccaaaauauguaaaaagcacaaaauuaagacuggccacaggauugaggaaugucccgucuauucaaucuagaggccuauuuggggccauugccggcuucauugaagggggguggacagggaugguagacggaugguacgguuaucaccaucaaaaugagcaggggucaggauaugcagccgaccugaagagcacacagaaugccauugacaagauuacuaacaaaguaaauucuguuauugaaaagaugaauacacaguucacagcaguagguaaagaguucaaccaccuggaaaaaagaauagagaauuuaaauaaaaaaguugaugaugguuuccuggacauuuggacuuacaaugccgaacuguugguucuauuggaaaaugaaagaacuuuggacuaccacgauucaaaugugaagaacuuauaugaaaagguaagaaaccaguuaaaaaacaaugccaaggaaacuggaaauggcugcuuugaauuuuaccacaaaugcgauaacacgugcauggaaagugucaaaaaugggacuuaugacuacccaaaauacucagaggaagcaaaauuaaacagagaagaaauagaugggguaaagcuggaaucaacaaggauuuaccagauuuuggcgaucuauucaacugccgccaguucauugguacugguagucucccugggggcaaucaguuuuuggaugugcucuaaugggucucuacaguguagaauauguauuuaa

SEQ ID NO: 41600 - RNA, 1701 nt, Artificial Sequence; identical to SEQ ID NO: 38827
  derived and/or modified CDS sequence (wt) from hemagglutinin__InfluenzaA__AFN19966

SEQ ID NO: 41601 - RNA, 1701 nt, Artificial Sequence
  derived and/or modified CDS sequence (wt) from hemagglutinin__InfluenzaA__AFN19972
augaaggcaauacuaguaguucugcuauauacauuugcaaccgcaaaugcagacacauuauguauagguuaucaugcgaacaauucaacagacacuguagacacaguacuagaaaagaauguaacaguaacacacucuguuaaucuucuagaagacaagcauaacgggaaacuaugcaaacuaagagggguagccccauugcauuuggguaaauguaacauugcuggcuggauccugggaaauccagagugugaaucacucuccacagcaagcucaugguccuacauuguggaaacaucuaguucagacaauggaacguguuacccaggagauuucaucgauaaugaggagcuaagagagcaauugagcucagugucaucauuugaaagguuugagauauuccccaagacaaguucauggcccaaucaugacucgaacaaagguguaacggcagcauguccucaugcuggagcaaaaagcuucuacaaaaauuuaauauggcuaguuaaaaaaggaaauucauacccaaagcucagcaaauccuacauuaaugauaaagggaaagaaguccucgugcuauggggcauucaccauccaucuacuacugcugaccaacaaagucucuaucagaaugcagauacauauguuuuuguggggacaucaagauacagcaagaaguucaagccggaaauagcaauaagacccaaagugagggaucaagaagggagaaugaacuauuacuggacacuaguagagccgggagacaaaauaacauucgaagcaacuggaaaucuaguaguaccgagauaugcauucgcaauggaaagaaaugcuggaucugguauuaucauuucagauacaccaguccacgauugcaauacaacuugucagacacccaagggugcuauaaacaccagccucccauuucagaauauacauccgaucacaauuggaaaauguccaaaauauguaaaaagcacaaaauugagacuggccacaggauugaggaaugucccgucuauucaaucuagaggccuauuuggggccauugccggcuucauugaagggggguggacagggaugguagauggaugguacgguuaucaccaucaaaaugagcaggggucaggauaugcagccgaccugaagagcacacagaaugccauugacaagauuacuaacaaaguaaauucuguuauugaaaagaugaauacacaguucacagcaguagguaaagaguucaaccaccuggaaaaaagaauagagaauuuaaauaaaaaaguugaugaugguuuccuggacauuuggacuuacaaugccgaacuguugguucuauuggaaaaugaaagaacuuuggacuaccacgauucaaaugugaagaacuuauaugaaaagguaagaaaccaguuaaaaaacaaugccaaggaaauuggaaauggcugcuuugaauuuuaccacaaaugcgauaacacgugcauggaaagugucaaaaaugggacuuaugacuacccaaaauacucagaggaagcaaaauuaaacagagaagaaauagaugggguaaagcuggaaucaacaaggguuuaccagauuuuggcgaucuauucaacugucgccaguucauugguacugguagucucccugggggcaaucaguuuuuggaugugcucuaaugggucucuacaguguagaauauguauuuaa

SEQ ID NO: 41602 - RNA, 1701 nt, Artificial Sequence
  derived and/or modified CDS sequence (wt) from hemagglutinin__InfluenzaA__AFN19978
augaaagcaauacuaguaguuaugcuauauacauuugcaaccgcaaaugcagacacauuauguauagguuaucaugcgaacaauucaacagacacuguagacacaguacuagaaaagaauguaacaguaacacacucuguuaaucuucuagaagacaagcauaacgggaaacuaugcaaacuaagagggguagccccauugcauuuggguaaauguaacauugcuggcuggauccugggaaauccagagugugaaucacucuccacagcaagcucaugguccuacauuguggaaacaucuaguucagacaauggaacguguuacccaggagauuucaucgauuaugaggagcuaagagagcaauugagcucagugucaucauuugaaagguuugagauauuccccaaaacaaguucauggcccaaucaugacucgaacaaagguguaacggcagcauguccucaugcuggagcaaaaggcuucuacaaaaauuuaauauggcuaguuaaaaaaggaaauucauacccaaagcucagcaaauccuacauuaaugauaaagggaaagaaguccucgugcuauggggcauucaccauccaucuacuacugcugaccaacaaagucucuaucagaaugcagauacauauguuuuuguggggacaucaagauacagcaagaaguucaagccggaaauagcaauaagacccaaagugagggaucaagaagggagaaugaacuauuacuggacacuaguagagccgggagacaaaauaacauucgaagcaacuggaaaucuagugguaccgagauaugcauucgcaauggaaagaaaugcuggaucugguauuaucauuucagauacaccaguccacgauugcaauacaacuugucagacacccaagggugcuauaaacaccagccucccauuucagaauauacauccgaucacaauuggaaaauguccaaaauauguaaaaagcacaaaauugagacuggccacaggauugaggaaugucccgucuauucaaucuagaggccuauuuggggccauugccggcuucauugaagggggguggacagggaugguagauggaugguacgguuaucaccaucaaaaugagcaggggucaggauaugcagccgaccugaagagcacacagaaugccauugacaagauuacuaacaaaguaaauucuguuauugaaaagaugaauacacaguucacagcaguagguaaagaguucaaccaccuggaaaaaagaauagagaauuuaaauaaaaaaguugaugaugguuuccuggacauuuggacuuacaaugccgaacuguugguucuauuggaaaaugaaagaacuuuggacuaccacgauucaaaugugaagaacuuauaugaaaagguaagaaaccaguuaaaaaacaaugccaaggaaauuggaaauggcugcuuugaauuuuaccacaaaugugauaacacgugcauggaaagugucaaaaaugggacuuaugacuacccaaaauacucagaggaagcaaaauuaaacagagaaaaaauagaugggguaaagcuggaaucaacaaggauuuaccagauuuuggcgaucuauucaacugucgccaguucauugguacugguagucucccugggggcaaucaguuuuuggaugugcucuaaugggucucuacaguguagaauauguauuuaa

SEQ ID NO: 41603 - RNA, 1701 nt, Artificial Sequence
  derived and/or modified CDS sequence (wt) from hemagglutinin__InfluenzaA__AFN19983
augaaggcaauacuaguagugcugcuauauacauuugcaaccgcaaaugcagacacauuauguauagguuaucaugcgaacaauucaacagacacuguagacacaguacuagaaaagaauguaacaguaacacacucuguuaaucuucuagaagacaagcauaacgggaaacuaugcaaacuaagagggguagccccauugcauuuggguaaauguaacauugcuggcuggauccugggaaauccagagugugaaucacucuccacagcaagcucaugguccuacauuguggaaacaucuaguucagacaauggaacguguuacccaggagauuucaucgauuaugaggagcuaagggagcaauugagcucagugucaucauuugaaagguuugagauauuccccaagacaaguucauggcccaaucaugacucgaacaaagguguaacggcagcauguccucaugcuggagcaaaaagcuucuacaaaaauuuaauauggcuaguuaaaaaaggaaauucauacccaaagcucagcaaauccuacauuaaugauaaagggaaagaaguccucgugcuauggggcauucaccauccaucuacuacugcugaccaacaaagucucuaucagaaugcagauacauauguuuuuguggggacaucaagauacagcaagaaguucaagccggaaauagcaauaagacccaaagugagggaucaagaagggagaaugaacuauuacuggacacuaguagagccgggagacaaaauaacauucgaagcaacuggaaaucuagugguaccgagauaugcauucgcaauggaaagaaaugcuggaucugguauuaucauuucagauacaccaguccacgauugcaauacaacuugucagacacccaagggugcuauaaacaccagccucccauuucagaauauacauccgaucacaauuggaaaauguccaaaauauguaaaaagcacaaaauugagacuggccacaggauugaggaaugucccgucuauucaaucuagaggccuauuuggggccauugccggcuucauugaagggggguggacagggaugguagauggaugguacgguuaucaccaccaaaaugagcaggggucaggauaugcagcugaccugaagagcacacagaaugccauugacaagauuacuaacaaaguaaauucuguuauugaaaagaugaauacacaguucacagcaguagguaaagaguucaaccaccuggaaaaaagaauagagaauuuaaauaaaaaaguugaugaugguuuccuggacauuuggacuuacaaugccgaacuguugguucuauuggaaaaugaaagaacuuuggacuaccacgauucaaaugugaagaacuuauaugaaaagguaagaaaccaguuaaaaaacaaugccaaggaaacuggaaauggcugcuuugaauuuuaccacaaaugcgauaacacgugcauggaaagugucaaaaaugggacuuaugacuacccaaaauacucagaggaagcaaaauuaaacagagaagaaauagaugggguaaagcuggaaucaacaaggauuuaccagauuuuggcgaucuauucaacugucgccaguucauugguacugguagucucccugggggcaaucaguuuuuggaugugcucuaaugggucucuacaguguagaauauguauuuaa

SEQ ID NO: 41604 - RNA, 1701 nt, Artificial Sequence
  derived and/or modified CDS sequence (wt) from hemagglutinin__InfluenzaA__AFN19993
augaaggcaauacuaguaguucugcuauauacaguugcaaccacaaaugcagacacauuauguauagguuaccaugcgaacaauucaacagacacuguagacacaguacuagaaaagaauguaacaguaacacacucugucaaucuucuagaagacaagcauaacgggaaacuaugcaaacuaagagggguagccccauugcauuuggguaaauguaacauugcuggcuggauccugggaaauccagagugugaaucacucuccacagcaagcucaugguccuacauuguggaaacaucuaguucagacaauggaacguguuacccaggagauuucauugauuaugaggagcuaagagagcaauugagcucagugucaucauuugaaagauuugagauauuccccaagacaaguucauggcccaaucaugacucgaacaaagguguaacggcagcauguccucaugcuggagcaaaaggcuucuacaaaaauuuaauauggcuaguuaaaaaaggaaauucauacccaaaacucagcaaauccuacauuaaugauaaagggaaagaaguccucgugcuauggggcauucaccauccaucuacuacugcugaccaacaaagucucuaucagaaugcagauacauauguuuuuguggggacaucaagauacagcaagaaguucaagccggaaauagcaauaagacccaaagugagggaucaagaagggagaaugaacuauuacuggacacuaguagagccgggagacaaaauaacauucgaagcaacuggaaaucuagugguaccgagauaugcauucgcaauggaaagaaaugcuggaucugguauuaucauuucagauacaccaguccacgauugcaauacaacuugucagacacccaagggugcuauaaacaccagccucccauuucagaauauacauccgaucacaauuggaaaauguccaaaauauguaaaaagcacaaaauugagacuggccacaggauugaggaaugucccgucuauucaaucuagaggccuauuuggggccauugccggcuucauugaagggggguggacagggaugguagauggaugguacgguuaucaccaucaaaaugagcaggggucaggauaugcagccgaccugaagagcacacagaaugccauugacaagauuacuaacaaaguaaauucuguuauugaaaagaugaauacacaguucacagcaguagguaaagaguucaaccaccuggaaaaaagaauagagaauuuaaauaaaaaaguugaugaugguuuccuggacauuuggacuuacaaugccgaacuguugguucuauuggaaaaugaaagaacuuuggacuaccacgauucaaaugugaagaacuuauaugaaaagguaagaaaccaguuaaaaaacaaugccaaggaaauuggaaauggcugcuuugaauuuuaccacaaaugcgauaacacgugcauggaaagugucaaaaaugggacuuaugacuacccaaaauacucagaggaagcaaaauuaaacagagaagaaauagaugggguaaagcuggaaucaacaaggauuuaccagauuuuggcgaucuauucaacugucgccaguucauugguacugguagucucccugggggcaaucaguuuuuggaugugcucuaaugggucucuacaguguagaauauguauuuaa

SEQ ID NO: 41605 - RNA, 1701 nt, Artificial Sequence; identical to SEQ ID NO: 38827
  derived and/or modified CDS sequence (wt) from hemagglutinin__InfluenzaA__AFN20000

SEQ ID NO: 41606 - RNA, 1701 nt, Artificial Sequence; identical to SEQ ID NO: 38834
  derived and/or modified CDS sequence (wt) from hemagglutinin__InfluenzaA__AFN20006

SEQ ID NO: 41607 - RNA, 1701 nt, Artificial Sequence
  derived and/or modified CDS sequence (wt) from hemagglutinin__InfluenzaA__AFN20012
augaaggcaauacuaguaguucugcuauauacauuugcaaccgcaaaugcagacacauuauguauagguuaccaugcgaacaauucaacagacacuguagacacaguacuagaaaagaauguaacaguaacacacucugucaaucuucuagaagacaagcauaacgggaaacuaugcaaacuaagagggguagccccauugcauuuggguaaauguaacauugcuggcuggauccugggaaauccagagugugaaucacucuccacagcaagcucaugguccuacauuguggaaacaucuaguucagacaauggaacguguuacccaggagauuucauugauuaugaggagcuaagagaacaauugagcucagugucaucauuugaaagauuugagauauuccccaagacaaguucauggcccaaucaugacucgaacaaagguguaacggcagcauguccucaugcuggagcaaaaggcuucuacaaaaauuuaauauggcuaguuaaaaaaggaaauucauacccaaagcucagcaaauccuacauuaaugauaaagggaaagaaguccucgugcuauggggcauucaccauccaucuacuacugcugaccaacaaagucucuaucagaaugcagauacauauguuuuuguggggacaucaagauacagcaagaaguucaagccggaaauagcaauaagacccaaagugagggaucaagaagggagaaugaacuauuacuggacacuaguagagccgggagacaaaauaacauucgaagcaacuggaaaucuagugguaccgagauaugcauucgcaauggaaagaaaugcuggaucugguauuaucauuucagauacaccaguccacgauugcaauacaacuugucagacacccaagggugcuauaaacaccagccucccauuucagaauauacauccgaucacaauuggaaaauguccaaaauauguaaaaagcacaaaauugagacuggccacaggauugaggaaugucccgucuauucaaucuagaggccuauuuggggccauugccggcuucauugaagggggguggacagggaugguagauggaugguacgguuaucaccaucaaaaugagcaggggucaggauaugcagccgaccugaagagcacacagaaugccauugacaagauuacuaacaaaguaaauucuguuauugaaaagaugaauacacaguucacagcaguagguaaagaguucaaccaccuggaaaaaagaauagagaauuuaaauaaaaaaguugaugaugguuuccuggacauuuggacuuacaaugccgaacuguugguucuauuggaaaaugaaagaacuuuggacuaccacgauucaaaugugaagaacuuauaugaaaagguaagaaaccaguuaaaaaacaaugccaaggaaauuggaaauggcugcuuugaauuuuaccacaaaugcgauaacacgugcauggaaagugucaaaaaugggacuuaugacuacccaaaauacucagaggaagcaaaauuaaacagagaagaaauagaugggguaaagcuggaaucaacaaggauuuaccagauuuuggcgaucuauucaacugucgccaguucauugguacugguagucucccugggggcaaucaguuuuuggaugugcucuaaugggucucuacaguguagaauauguauuuaa

SEQ ID NO: 41608 - RNA, 1701 nt, Artificial Sequence
  derived and/or modified CDS sequence (wt) from hemagglutinin__InfluenzaA__AFN20018
augaaggcaauacuaguaguucugcuauauacauuugcaaccgcaaaugcagacacauuauguauagguuaucaugcgaacaauucaacagacacuguagacacaguacuagaaaagaauguaacaguaacacacucuguuaaccuucuagaagacaagcauaacgggaaacuaugcaaacugagagggguagccccauugcauuuggguaaauguaacauugcuggcuggauccugggaaauccagagugugaaucacucuccacagcaagcucaugguccuacaucguggaaacaucuaguucagacaauggaacgugcuacccaggagauuucaucaauuaugaggagcuaagagagcaauugagcucagugucaucauuugaaagguuugagauauuccccaagacaaguucauggcccaaucaugacucgaacaaagguguaacggcagcauguccucaagcuggagcaaaaagcuucuacaaaaauuuaauauggcuaguuaaaaaaggaaauucauacccaaagcucagcaacuccuacauuaacgauaaagggaaagaaguccucgugcuauggggcauucaccauccaucuacuagugcugaccaacaaagucucuaucagaaugcagaugcauauguuuuuguggggacaucaaaauacagcaagaaguucaagccggaaauagcaguaagacccaaagugagggaucaagaagggagaaugaacuauuacuggacacuaguagagccgggagacaaaauaacauucgaagcaacuggaaaucuauugguaccgagauaugcauucgcaauggaaagaaaugcuggaucugguauuaucauuucagauacaccaguccacgauugcaauacaacuugucagacacccaagggugcuauaaacaccagccucccauuucagaauauacauccgaucacaauuggaaaaugucccaaauauguaaaaagcacaaaauugagacuggccacaggauugaggaaugucccgucuauucaaucuagaggccuauuuggggccauugccgguuucauugaagggggguggacagggaugguagauggaugguacgguuaucaccaucaaaaugcgcaggggucaggauaugcagccgaccugaagagcacacagaaugccauugacaagauuacuaacaaaguaaauucuguuauugaaaagaugaauacacaguucacagcaguagguaaagaguucaaccaccuggaaaaaagaauagagaauuuaaauaaaaaaguugaugaugguuuccuggacauuuggacuuacaaugccgaacuguugguucuauuggaaaaugaaagaacuuuggacuaccacgauucaaaugugaaaaacuuauaugaaaagguaagaagccaguuaaaaaacaaugccaaggaaauuggaaacggcugcuuugaauuuuaccacaaaugcgacaacacgugcauggaaagugucaaaaaugggacuuaugacuacccaaaauacucagaggaagcaaaauuaaacagagaagaaauagaugggguaaagcuggaaucaacaaggauuuaccagauuuuggcgaucuauucaacugucgccaguucauugguacugguagucucccugggggcaaucaguuucuggaugugcucuaaugggucucuacaguguagaauauguauuuaa

SEQ ID NO: 41609 - RNA, 1701 nt, Artificial Sequence
  derived and/or modified CDS sequence (wt) from hemagglutinin__InfluenzaA__AFN20019
augaaagcaauacuaguaguuaugcuauauacauuugcaaccgcaaaugcagacacauuauguauagguuaucaugcgaacaauucaacagacacuguagacacaguacuagaaaagaauguaacaguaacacacucuguuaaucuucuagaagacaagcauaacgggaaacuaugcaaacuaagagggguagccccauugcauuuggguaaauguaacauugcuggcuggauccugggaaauccagagugugaaucacucuccacagcaagcucaugguccuacauuguggaaacaucuaguucagacaauggaacguguuacccaggagauuucaucgauuaugaggagcuaagagagcaauugagcucagugucaucauuugaaagguuugagauauuccccaaaacaaguucauggcccaaucaugacucgaacaaagguguaacggcagcauguccucaugcuggagcaaaaggcuucuacaaaaauuuaauauggcuaguuaaaaaaggaaauucauacccaaagcucagcaaauccuacauuaaugauaaagggaaagaaguccucgugcuauggggcauucaccauccaucuacuacugcugaccaacaaagucucuaucagaaugcagauacauauguuuuuguggggacaucaagauacagcaagaaguucaagccggaaauagcaauaagacccaaagugagggaucaagaagggagaaugaacuauuacuggacacuaguagagccgggagacaaaauaacauucgaagcaacuggaaaucuagugguaccgagauaugcauucgcaauggaaagaaaugcuggaucugguauuaucauuucagauacaccaguccacgauugcaauacaacuugucagacacccaagggugcuauaaacaccagccucccauuucagaauauacauccgaucacaauuggaaaauguccaaaauauguaaaaagcacaaaauugagacuggcaacaggauugaggaaugucccgucuauucaaucuagaggccuauuuggggccauugccggcuucauugaagggggguggacagggaugguagauggaugguacgguuaucaccaucaaaaugagcaggggucaggauaugcagccgaccugaagagcacacagaaugccauugacaagauuacuaacaaaguaaauucuguuauugaaaagaugaauacacaguucacagcaguagguaaagaguucaaccaccuggaaaaaagaauagagaauuuaaauaaaaaaguugaugaugguuuccuggacauuuggacuuacaaugccgaacuguugguucuauuggaaaaugaaagaacuuuggacuaccacgauucaaaugugaagaacuuauaugaaaagguaagaaaccaguuaaaaaacaaugccaaggaaaucggaaauggcugcuuugaauuuuaccacaaaugugauaacacgugcauggaaagugucaaaaaugggacuuaugacuacccaaaauacucagaggaagcaaaauuaaacagagaagaaauagaugggguaaagcuggaaucaacaaggauuuaccagauuuuggcgaucuauucaacugucgccaguucauugguacugguagucucccugggggcaaucaguuuuuggaugugcucuaaugggucucuacaguguagaauauguauuuaa

SEQ ID NO: 41610 - RNA, 1701 nt, Artificial Sequence
  derived and/or modified CDS sequence (wt) from hemagglutinin__InfluenzaA__AFN20021
augaaggcaauacuaguaguucugcuauauacauuugcaaccgcaaaugcagacacauuauguauagguuaccaugcgaacaauucaacagacacuguagacacaguacuagaaaagaauguaacaguaacacacucugucaaucuucuagaagacaagcauaacgggaaacuaugcaaacuaagagggguagccccauugcauuuggguaaauguaacauugcuggcuggauccugggaaauccagagugugaaucacucuccacagcaagcucaugguccuacauuguggaaacaucuaguucagacaauggaacguguuacccaggagauuucauugauuaugaggagcuaagagagcaauugagcucagugucaucauuugaaagguuugagauauuccccaagacaaguucauggcccaaucaugacucgaacaaagguguaacggcagcauguccucaugcuggagcaaaaggcuucuacaaaaauuuaauauggcuaguuaaaaaaggaaauucauacccaaagcucagcaaauccuacauuaaugauaaagggaaagaaguccucgugcuauggggcauucaccauccaucuacuacugcugaccaacaaagucucuaucagaaugcagauacauauguuuuuguggggacaucaagauacagcaagaaguucaagccggaaauagcaauaagacccaaagugagggaucaagaagggagaaugaacuauuacuggacacuaguagagccgggagacaaaauaacauucgaagcaacuggaaaucuagugguaccgagauaugcauucgcaauggaaagaaaugcuggaucugguauuaucauuucagauacaccaguccacgauugcaauacaacuugucagacacccaagggugcuauaaacaccagccucccauuucagaauauacauccgaucacaauuggaaaauguccaaaauauguaaaaagcacaaaauugagacuggccacaggauugaggaaugucccgucuauucaaucuagaggccuauuuggggccauugccggcuucauugaagggggguggacagggaugguagauggaugguacgguuaucaccaucaaaaugagcaggggucaggauaugcagccgaccugaagagcacacagaaugccauugacaaaauuacuaacaaaguaaauucuguuauugaaaagaugaauacacaguucacagcaguagguaaagaguucaaccaccuggaaaaaagaauagagaauuuaaauaaaaaaguugaugaugguuuccuggacauuuggacuuacaaugccgaacuguugguucuauuggaaaaugaaagaacuuuggacuaccacgauucaaaugugaagaacuuauaugaaaagguaagaaaccaguuaaaaaacaaugccaaggaaauuggaaauggcugcuuugaauuuuaccacaaaugcgauaacacaugcauggaaagugucaaaaaugggacuuaugacuacccaaaauacucagaggaagcaaaauuaaacagagaagaaauagaugggguaaagcuggaaucaacaaggauuuaccagauuuuggcgaucuauucaacugucgccaguucauugguacugguagucucccugggggcaaucaguuuuuggaugugcucuaaugggucucuacaguguagaauauguauuuaa

SEQ ID NO: 41611 - RNA, 1701 nt, Artificial Sequence; identical to SEQ ID NO: 38836
  derived and/or modified CDS sequence (wt) from hemagglutinin__InfluenzaA__AFN20034

SEQ ID NO: 41612 - RNA, 1701 nt, Artificial Sequence
  derived and/or modified CDS sequence (wt) from hemagglutinin__InfluenzaA__AFN20040
augaaggcaauacuaguaguucugcuauauacauuugcaaccgcaaaugcagacacauuauguauagguuaucaugcgaacaauucaacagacacuguagacacaguacuagaaaagaauguaacaguaacacacucuguuaaucuucuagaagacaagcauaacgggaaacuaugcaaacuaagagggguagccccauugcauuuggguaaauguaacauugcuggcuggauccugggaaauccagagugugaaucacucuccacagcaagcucaugguccuacauuguggaaacaucuaguucagacaauggaacguguuacccaggagauuucaucgauuaugaggagcuaagggagcaauugagcucagugucaucauuugaaagguuugagauauuccccaagacaaguucauggcccaaucaugacucgaacaaagguguaacggcagcauguccucaugcuggagcaaaaagcuucuacaaaaauuuaauauggcuaguuaaaaaaggaaauucauacccaaagcucagcaaauccuacauuaaugauaaagggaaagaaguccucgugcuauggggcauucaccauccaucuacuacugcugaccaacaaagucucuaucagaaugcagauacauauguuuuuguggggacaucaagauacagcaagaaguucaagccggaaauagcaauaagacccaaagugagggaucaagaagggagaaugaacuauuacuggacacuaguagagccgggagacaaaauaacauucgaagcaacuggaaaucuagugguaccgagauaugcauucgcaauggaaagaaaugcuggaucugguauuaucauuucagauacaccaguccacgauugcaauacaacuugucagacacccaagggugcuauaaacaccagccucccauuucagaauauacauccgaucacaauuggaaaauguccaaaauauguaaaaagcacaaaauugagacuggccacaggauugaggaaugucccgucuauucaaucuagaggccuauuuggggccauugccggcuucauugaagggggguggacagggaugguagauggaugguacgguuaucaccaccaaaaugagcaggggucaggauaugcagccgaccugaagagcacacagaaugccauugacaagauuacuaacaaaguaaauucuguuauugaaaagaugaauacacaauucacagcaguagguaaagaguucaaccaccuggaaaaaagaauagagaauuuaaauaaaaaaguugaugaugguuuccuggacauuuggacuuacaaugccgaacugcugguucuauuggaaaaugaaagaacuuuggacuaccacgauucaaaugugaagaacuuauaugaaaagguaagaaaccaguuaaaaaacaaugccaaggaaacuggaaauggcugcuuugaauuuuaccacaaaugcgauaacacgugcauggaaagugucaaaaaugggacuuaugacuacccaaaauacucagaggaagcaaaauuaaacagagaagaaauagaugggguaaagcuggaaucaacaaggauuuaccagauuuuggcgaucuauucaacugucgccaguucauugguacugguagucucccugggggcaaucaguuuuuggaugugcucuaaugggucucuacaguguagaauauguauuuaa

SEQ ID NO: 41613 - RNA, 1701 nt, Artificial Sequence
  derived and/or modified CDS sequence (wt) from hemagglutinin__InfluenzaA__AFN20046
augaaggcaauacuaguaguucugcuauauacauuugcaaccgcaaaugcagacacauuauguauagguuaucaugcgaacaauucaacagacacuguagacacaguacuagaaaagaauguaacaguaacacacucuguuaaucuucuagaagacaagcauaacgggaaacuaugcaaacuaagagggguagccccauugcauuuggguaaauguaacauugcuggcuggauccugggaaauccagagugugaaucacucuccacagcaagcucaugguccuacauuguggaaacaucuaguucagacaauggaacguguuacccaggagauuucaucgauuaugaggagcuaagggagcaauugagcucagugucaucauuugaaagguuugagauauuccccaagacaaguucauggcccaaucaugacucgaacaaagguguaacggcagcauguccucaugcuggagcaaaaagcuucuacaaaaauuuaauauggcuaguuaaaaaaggaaauucauacccaaagcucagcaaauccuacauuaaugauaaagggaaagaaguccucgugcuauggggcauucaccauccaucuacuacugcugaccaacaaagucucuaucagaaugcagauacauauguuuuuguggggacaucaagauacagcaagaaguucaagccggaaauagcaauaagacccaaagugagggaucaagaagggagaaugaacuauuacuggacacuaguagagccgggagacaaaauaacauucgaagcaacuggaaaucuagugguaccgagauaugcauucgcaauggaaagaaaugcuggaucugguauuaucauuucagauacaccaguccacgauugcaauacaacuugucagacacccaagggugcuauaaacaccagccucccauuucagaauauacauccgaucacaauuggaaaauguccaaaauauguaaaaagcacaaaauugagacuggccacaggauugaggaaugucccgucuauucaaucuagaggccuauuuggggccauugccggcuucauugaagggggguggacagggaugguagacggaugguacgguuaucaccaucaaaaugagcaggggucaggauaugcagccgaccugaagagcacacagaaugccauugacaagauuacuaacaaaguaaauucuguuauugaaaagaugaauacacaguucacagcaguagguaaagaguucaaccaccuggaaaaaagaauagagaauuuaaauaaaaaaguugaugaugguuuccuggacauuuggacuuacaaugccgaacuguugguucuauuggaaaaugaaagaacuuuggacuaccacgauucaaaugugaagaacuuauaugaaaagguaagaaaccaguuaaaaaacaaugccaaggaaacuggaaauggcugcuuugaauuuuaccacaaaugcgauaacacgugcauggaaagugucaaaaaugggacuuaugacuacccaaaauacucagaggaagcaaaauuaaacagagaagaaauagaugggguaaagcuggaaucaacaaggauuuaccagauuuuggcgaucuauucaacugccgccaguucauugguacugguagucucccugggggcaaucaguuuuuggaugugcucuaaugggucucuacaguguagaauauguauuuaa

SEQ ID NO: 41614 - RNA, 1701 nt, Artificial Sequence
  derived and/or modified CDS sequence (wt) from hemagglutinin__InfluenzaA__AFN20052
augaaggcaauacuaguaguuaugcuauauacauuugcaaccgcaaaugcagacacauuauguauagguuaucaugcgaacaauucaacagacacuguagacacaguacuagaaaagaauguaacaguaacacacucuguuaaucuucuagaagacaagcauaacgggaaacuaugcaaacuaagagggguagccccauugcauuuggguaaauguaacauugcuggcuggauccugggaaauccagagugugaaucacucuccacagcaagcucaugguccuacauuguagaaacaucuaguucagacaauggaacguguuacccaggagauuucaucgauuaugaggagcuaagagagcaauugagcucagugucaucauuugaaagguuugagauauuccccaaaacaaguucauggcccaaucaugacucgaacaaagguguaacggcagcauguccucaugcuggagcaaaaggcuucuacaaaaauuuaauauggcuaguuaaaaaaggaaauucauacccaaagcucagcaaauccuacauuaaugauaaagggaaagaaguccucgugcuauggggcauucaccauccaucuacuacugcugaccaacaaagucucuaucagaaugcagauacauauguuuuuguggggacaucaagauacagcaagaaguucaagccggaaauagcaauaagacccaaagugagggaucaagaagggagaaugaacuauuacuggacacuaguagagccgggagacaaaauaacauucgaagcaacuggaaaucuagugguaccgagauaugcauucgcaauggaaagaaaugcuggaucugguauuaucauuucagauacaccaguccacgauugcaauacaacuugucagacacccaagggugcuauaaacaccagccucccauuucagaauauacauccgaucacaauuggaaaauguccaaaauauguaaaaagcacaaaauugagacuggccacaggauugaggaaugucccgucuauucaaucuagaggccuauuuggggccauugccggcuucauugaagggggguggacagggaugguagauggaugguacgguuaucaccaucaaaaugagcaggggucaggauaugcagccgaccugaagagcacacagaaugccauugacaagauuacuaacaaaguaaauucuguuauugaaaagaugaauacacaguucacagcaguagguaaagaguucaaccaccuggaaaaaagaauagagaauuuaaauaaaaaaguugaugaugguuuccuggacauuuggacuuacaaugccgaacuguugguucuauuggaaaaugaaagaacuuuggacuaccacgauucaaaugugaagaacuuauaugaaaagguaagaaaccaguuaaaaaacaaugccaaggaaauuggaaauggcugcuuugaauuuuaccacaaaugcgauaacacgugcauggaaagugucaaaaaugggacuuaugacuacccaaaauacucagaggaagcaaaauuaaacagagaagaaaucgaugggguaaagcuggaaucaacaaggauuuaccagauuuuggcgaucuauucaacugucgccaguucauugguacugguagucucccugggggcaaucaguuuuuggaugugcucuaaugggucucuacaguguagaauauguauuuaa

SEQ ID NO: 41615 - RNA, 1701 nt, Artificial Sequence; identical to SEQ ID NO: 41586
  derived and/or modified CDS sequence (wt) from hemagglutinin__InfluenzaA__AFN20061

SEQ ID NO: 41616 - RNA, 1701 nt, Artificial Sequence
  derived and/or modified CDS sequence (wt) from hemagglutinin__InfluenzaA__AFN20076
augaaggcaauacuaguaguucugcuauauacauuugcaaccgcaaaugcagacacauuauguauagguuaucaugcgaacaauucaacagacacuguagacacaguacuagaaaagaauguaacaguaacacacucuguuaaucuucuagaagacaagcauaacgggaaacuaugcaaacuaagagggguagccccauugcauuuggguaaauguaacauugcuggcuggauccugggaaauccagauugugaaucacucuccacagcaagcucaugguccuacauuguggaaacaucuaguucagacaauggaacguguuacccaggagauuucaucgauuaugaggagcuaagggagcaauugagcucagugucaucauuugaaagguuugagauauuccccaagacaaguucauggcccaaucaugacucgaacaaagguguaacggcagcauguccucaugcuggagcaaaaagcuucuacaaaaauuuaauauggcugguuaaaaaaggaaauucauacccaaagcucagcaaauccuacauuaaugauaaagggaaagaaguccucgugcuauggggcauucaccauccaucuacuacugcugaccaacaaagucucuaucagaaugcagauacauauguuuuuguggggacaucaagauacagcaagaaguucaagccggaaauagcaauaagacccaaagugagggaucaagaagggagaaugaacuauuacuggacacuaguagagccgggagacaaaauaacauucgaagcaacuggaaaucuagugguaccgagauaugcauucgcaauggaaagaaaugcuggaucugguauuaucauuucagauacaccaguccacgauugcaauacaacuugucagacacccaagggugcuauaaacaccagccucccauuucagaacauacauccgaucacaauuggaaaauguccaaaauauguaaaaagcacaaaauugagacuggccacaggauugaggaaugucccgucuauucaaucuagaggccuauuuggggccauugccggcuucauugaagggggguggacagggaugguagauggaugguacgguuaucaccaucaaaaugagcaggggucaggauaugcagccgaccugaagagcacacagaaugccauugacaagauuacuaacaaaguaaauucuguuauugaaaaaaugaauacacaguucacagcaguagguaaagaguucaaccaccuggaaaaaagaauagagaauuuaaauaaaaaaguugaugaugguuuccuggacauuuggacuuacaaugccgaacuguugguucuauuggaaaaugaaagaacuuuggacuaccacgauucaaaugugaagaacuuauaugaaaagguaagaaaccaguuaaaaaacaaugccaaggaaacuggaaauggcugcuuugaauuuuaccacaaaugcgauaacacgugcauggaaagugucaaaaaugggacuuaugacuacccaaaauacucagaggaagcaaaauuaaacagagaagaaauagaugggguaaagcuggaaucaacaaggauuuaccagauuuuggcgaucuauucaacugucgccaguucauugguacugguagucucccugggggcaaucaguuuuuggaugugcucuaaugggucucuacaguguagaauauguauuuaa

SEQ ID NO: 41617 - RNA, 1701 nt, Artificial Sequence
  derived and/or modified CDS sequence (wt) from hemagglutinin__InfluenzaA__AFN20081
augaaggcaauacuaguaguucugcuauauacauuugcaaccgcaaaugcagacacauuauguauagguuaucaugcgaacaauucaacagacacuguagacacaguacuagaaaagaauguaacaguaacacacucuguuaaucuucuagaagacaagcauaacgggaaacuaugcaaacuaagagggguagccccauugcauuuggguaaauguaacauugcuggcuggauccugggaaauccagagugugaaucacucuccacagcaagcucaugguccuacauuguggaaacaucuaguucagacaauggaacguguuacccaggagauuucaucgauuaugaggagcuaagggagcaauugagcucagugucaucauuugaaagguuugagauauuccccaagacaaguucauggcccaaucaugacucgaacaaagguguaacggcagcauguccucaugcuggagcaaaaagcuucuacaaaaauuuaauauggcuaguuaaaaaaggaaauucauacccaaagaucagcaaauccuacauuaaugauaaagggaaagaaguccucgugcuauggggcauucaccauccaucuacuacugcugaccaacaaagucucuaucagaaugcagauacauauguuuuuguggggacaucaagauacagcaagaaguucaagccggaaauagcaauaagacccaaagugagggaucaagaagggagaaugaacuauuacuggacacuaguagagccgggagacaaaauaacauucgaagcaacuggaaaucuagugauaccgagauaugcauucgcaauggaaagaaaugcuggaucugguauuaucauuucagauacaccaguccacgauugcaauacaacuugucagacacccaagggugcuauaaacaccagccucccauuucagaauauacauccgaucacaauuggaagauguccaaaauauguaaaaagcacaaaauugagacuggccacaggauugaggaaugucccgucuauucaaucuagaggccuauuuggggccauugccggcuucauugaagggggguggacagggaugguagauggaugguacgguuaucaccaccaaaaugagcaggggucaggauaugcagccgaccugaagagcacacagaaugccauugacaagauuacuaacaaaguaaauucuguuauugaaaagaugaauacacaguucacagcaguagguaaagaguucaaccaccuggaaaaaagaauagagaauuuaaauaaaaaaguugaugaugguuuccuggacauuuggacuuacaaugccgaacuguugguucuauuggaaaaugaaagaacuuuggacuaccacgauucaaaugugaagaacuuauaugaaaagguaagaaaccaguuaaaaaacaaugccaaggaaacuggaaauggcugcuuugaauuuuaccacaaaugcgauaacacgugcauggaaagugucaaaaaugggacuuaugacuacccaaaauacucagaggaagcaaaauuaaacagagaaguaauagaugggguaaagcuggaaucaacaaggauuuaccagauuuuggcgaucuauucaacugucgccaguucauugguacugguagucucccugggggcaaucaguuuuuggaugugcucuaaugggucucuacaguguagaauauguauuuaa

SEQ ID NO: 41618 - RNA, 1701 nt, Artificial Sequence
  derived and/or modified CDS sequence (wt) from hemagglutinin__InfluenzaA__AFN20092
augaaggcaauacuaguaguuaugcuauauacauuugcaaccgcaaaugcagacacauuauguauagguuaucaugcgaacaauucaacagacacuguagacacaguacuagaaaagaauguaacaguaacacacucuguuaaucuucuagaagacaagcauaacgggaaacuaugcaaacuaagagggguagccccauugcauuuggguaaauguaacauugcuggcuggauccugggaaauccagagugugaaucacucuccacagcaagcucaugguccuacauuguagaaacaucuaguucagacaauggaacguguuacccaggagauuucaucgauuaugaggagcuaagagagcaauugagcucagugucaucauuugaaagguuugagauauuccccaaaacaaguucauggcccaaucaugacucgaacaaagguguaacggcagcauguccucaugcuggagcaaaaggcuucuacaaaaauuuaauauggcuaguuaaaaaaggaaauucauacccaaagcucagcaaauccuacauuaaugauaaagggaaagaaguccucgugcuauggggcauucaccauccaucuacuacugcugaccaacaaagucucuaucagaaugcagauacauauguuuuuguggggacaucaagauacagcaagaaguucaagccggaaauagcaauaagacccaaagugagggaucaagaagggagaaugaacuauuacuggacacuaguagagccgggagacaaaauaacauucgaagcaacuggaaaucuagugguaccgagauaugcauucgcaauggaaagaaaugcuggaucugguauuaucauuucagauacaccaguccacgauugcaauacaacuugucagacacccaagggugcuauaaacaccagccucccauuucagaauauacauccgaucacaauuggaaaauguccaaaauauguaaaaagcacaaaauugagacuggccacaggauugaggaaugucccgucuauucaaucuagaggccuauuuggggccauugccggcuucauugaagggggguggacagggaugguagauggaugguacgguuaucaccaucaaaaugagcaggggucaggauaugcagccgaucugaagagcacacagaaugccauugacaagauuacuaacaaaguaaauucuguuauugaaaagaugaauacacaguucacagcaguagguaaagaguucaaccaccuggaaaaaagaauagagaauuuaaauaaaaaaguugaugaugguuuccuggacauuuggacuuacaaugccgaacuguugguucuauuggaaaaugaaagaacuuuggacuaccacgauucaaaugugaagaacuuauaugaaaagguaagaaaccaguuaaaaaacaaugccaaggaaauuggaaauggcugcuuugaauuuuaccacaaaugcgauaacacgugcauggaaagugucaaaaaugggacuuaugacuacccaaaauacucagaggaagcaaaauuaaacagagaagaaaucgaugggguaaagcuggaaucaacaaggauuuaccagauuuuggcgaucuauucaacugucgccaguucauugguacugguagucucccugggggcaaucaguuuuuggaugugcucuaaugggucucuacaguguagaauauguauuuaa

SEQ ID NO: 41619 - RNA, 1701 nt, Artificial Sequence; identical to SEQ ID NO: 41598
  derived and/or modified CDS sequence (wt) from hemagglutinin__InfluenzaA__AFN20099

SEQ ID NO: 41620 - RNA, 1701 nt, Artificial Sequence
  derived and/or modified CDS sequence (wt) from hemagglutinin__InfluenzaA__AFN20112
augaaggcaauacuaguaguucugcuauauacauuugcaaccgcaaaugcagacacauuauguauagguuaucaugcgaacaauucaacagacacuguagacacaguacuagaaaagaauguaacaguaacacacucuguuaaccuucuagaagacaagcauaacgggaaacuaugcaaacuaagagggguagccccauugcauuuggguaaauguaacauagcuggcuggauccugggaaauccagaguguaaaucacucuccacagcaagcucaugguccuacauuguggaaacaucuaguucagacaauggaacguguuacccaggagauuucaucgauuaugaggagcuaagagagcaauugagcucagugucaucauuugaaagauuugagauauuccccaagacaaguucauggcccaaucauaacccgaacaaagguguaacggcagcauguccucaugcuggagcaaaaagcuucuacaaaaauuuaauauggcuaguuaaaaacggaaauucauacccaaagcucaacacauccuauauuaaugauaaagggaaagaaguccucgugcuauggggcauucaccauccaucuacuagugcugaccaacaaagucucuaucagaaugcagaugcauaugcuuuuguggggacaucaagauacagcaagaaguucaagccggaaauagcaauaagacccaaagugagggaucaagaagggagaaugaacuauuacuggacacuaguagagccgggagacaaaauaacauucgaagcaacuggaaaucuaguggugccgagauaugcauucgcaauggaaagaaaugcgggaucugguauuaucauuucagauacaucaguccacgauugcaauacaacuugucagacacccaagggugcuauaaacaccagccucccauuucagaauguacauccgaucacaauuggaaaauguccaaaauauguaaaaagcacaaaauugagacuggccacaggauugaggaaugucccgucuauucaaucucgaggccuauuuggggccauugccgguuucauugaagggggguggacagggaugguagauggaugguacgguuaucaucaucaaaaugagcaggggucaggauaugcagccgaccugaagagcacacagaaugccuuugacaagauuacuaacaaaguaaauucuguuauugaaaagaugaauacacaguucacagcaguagguaaagaguucaaccaccuggaaaaaagaauagagaauuuaaauaaaaaaguugaugaugguuuccuggacauuuggacuuacaaugccgaacuguugguucuauuggaaaaugaaagaacuuuggacuaccacgauucaaaugugaagaacuuauaugaaaagguaagaagccaguuaaaaaccaaugccaaggaaauuggaaacggcugcuuugaauuuuaccacaaaugcgauaacacgugcauggaaagugucaaaaaugggacuuaugacuacccaaaauacucagaggaagcaaaauuaaacagagaagaaauagaugggguaaagcuggaaucaacaaggauuuaccagauuuuggcgaucuauucaacugucgccaguucauugguacugguagucucccugggggcaaucaguuucuggaugugcucuaaugggucucuacaguguagaauaugcauuuaa

SEQ ID NO: 41621 - RNA, 1701 nt, Artificial Sequence
  derived and/or modified CDS sequence (wt) from hemagglutinin__InfluenzaA__AFN87924
augaaggcaauacuaguaguucugcuauauacauuugcaaccgcaaaugcagacacauuauguauagguuaucaugcgaacaauucaacagacacuguagacacaguacuagaaaagaauguaacaguaacacacucuguuaaccuucuagaagacaagcauaacgggaaacuaugcaaacuaagagggguagccccauugcauuuggguaaauguaacauagcuggcuggauccugggaaauccagagugugaaucacucuccacagcaagcucaugguccuacauuguggaaacaucuaguucagacaauggaacguguuacccaggagauuucaucgauuaugaggagcuaagagagcaauugagcucagugucaucauuugaaagauuugagauauuccccaagacaaguucauggcccaaucaugacccgaacaaagguguaacggcagcauguccucaugcuggagcaaaaagcuucuacaaaaauuuaauauggcuaguuaaaaaaggaaauucauacccaaagcucagcacauccuauauuaaugauaaaaggaaagaaguccucgugcuauggggcauucaccauccaucuacuagugcugaccaacaaagucucuaucagaaugcagaugcauaugcuuuuguggggacaucaagauacagcaagaaguucaagccggaaauagcaauaagacccaaagugagggaucaagaagggagaaugaacuauuacuggacacuaguagagccgggagacaaaauaacauucgaagcaacuggaaaucuaguggugccgagauaugcauucgcaauggaaagaaaugcgggaucugguauuaucauuucagauacaucaguccacgauugcaauacaacuugucagacacccaagggugcuauaaacaccagccucccauuucagaauguacauccgaucacaauuggaaaauguccaaaauauguaaaaagcacaaaauugagacuggccacaggauugaggaaugucccgucuauucaaucucgaggccuauuuggggccauugccgguuucauugaagggggguggacagggaugguagauggaugguacgguuaucaucaucaaaaugaacaggggucaggauaugcagccgaccugaagagcacacagaaugccuuugacaagauuacuaacaaaguaaauucuguuauugaaaagaugaauacacaguucacagcaguagguaaagaguucaaccaccuggaaaaaagaauagagaauuuaaauaaaaaaguugaugaugguuuccuggacauuuggacuuacaaugccgaacuguugguucuauuggaaaaugaaagaacuuuggacuaccacgauucaaaugugaagaacuuauaugaaaagguaagaagccaguuaaaaaacaaugccaaggaaauuggaaacggcugcuuugaauuuuaccacaaaugcgauaacacgugcauggaaagugucaaaaaugggacuuaugacuacccaaaauacucagaggaagcaaaauuaaacagagaagaaauagaugggguaaagcuggaaucaacaaggauuuaccagauuuuggcgaucuauucaacugucgccaguucauugguacugguagucucccugggggcaaucaguuucuggaugugcucuaaugggucucuacaguguagaauauguauuuaa

SEQ ID NO: 41622 - RNA, 1701 nt, Artificial Sequence; identical to SEQ ID NO: 36522
  derived and/or modified CDS sequence (wt) from hemagglutinin__InfluenzaA__AFN87926

SEQ ID NO: 41623 - RNA, 1701 nt, Artificial Sequence
  derived and/or modified CDS sequence (wt) from hemagglutinin__InfluenzaA__AFN87927
augaaggcaauacuaguaguucugcuauacacauuugcaaccgcaaaugcagacacauuauguauagguuaucaugcgaacaauucaacagacacuguagacacaguacuagaaaagaauguaacaguaacacacucuguuaaccuucuagaagacaagcauaacgggaaacuaugcaaacuaagagggguagccccauugcauuuggguaaauguaacauugcuggcuggauccugggaaauccagagugugaaucacucuccacagcaagcucaugguccuacauuguggaaacaucuaguucagacaauggaacguguuacccaggagauuucaucgauuaugaggagcuaagagagcaauugagcucagugucgucauuugaaagguuugagauauuccccaagacaaguucauggcccaaucaugacucgaacaaagguguaacggcagcauguccucaugcuggagcaaaaagcuucuacaaaaauuuaauauggcuaguuaaaaaaggaaauucauacccaaagcucagcaaauccuacauuaaugauaaaaggaaagaaguccucgugcuauggggcauucaccauccaucuacuagugcugaccaacaaagucucuaucagaaugcagaugcauauguuuuuguggggacaucaagauacagcaagaaguucaagccggaaauagcaauaagacccaaagugagggaucaagaagggagaaugaacuauuacuggacacuaguagagccgggagacaaaauaacauucgaagcaacuggaaaucuagugguaccgagauaugcauucgcaauggaaagaaaugcuggaucugguauuaucauuucagguacaccaguccacgauugcaauacaacuugucagacacccaagggugcuauaaacaccagccucccauuucagaauauacauccgaucacaauuggaaaauguccaaaauauguaaaaagcacaaaauugagacuggccacaggauugaggaaugucccgucuauucaaucuagaggccuauuuggggccauugccgguuucauugaagggggguggacagggaugguagauggaugguacgguuaucaccaucaaaaugagcaggggucaggauaugcagccgaccugaagagcacacagaaugccauugacaagauuacuaacagaguaaauucuguuauugaaaagaugaauacacaguucacagcaguagguaaagaguucaaccaccuggaaaaaagaauagagaauuuaaauaaaaaaguugaugaugguuuccuggacauuuggacuuacaaugccgaacuguugguucuauuggaaaaugaaagaaccuuggacuaccacgauucaaaugugaagaacuuauaugaaaagguaagaagccaguuaaaaaacaaugccaaggaaauuggaaacggcugcuuugaauuuuaccacaaaugcgauaacacgugcauggaaagugucaaaaaugggacuuaugacuacccaaaauacucagaggaagcaaaauuaaacagagaagaaauagaugggguaaagcuggaaucaacaaggauuuaccagauuuuggcgaucuauucaacugucgccaguucauugguacugguagucucccugggggcaaucaguuucuggaugugcucuaaugggucucuacaguguagaauauguauuuaa

SEQ ID NO: 41624 - RNA, 1701 nt, Artificial Sequence
  derived and/or modified CDS sequence (wt) from hemagglutinin__InfluenzaA__AFN87928
augaaggcaauacuaguaguucugcuauauacauuugcaaccgcaaaugcagacacauuauguauagguuaucaugcgaacaauucaacagacacuguagacacaguacuagaaaagaauguaacaguaacacacucuguuaaccuucuagaagacaagcauaacgggaaacuaugcaaacuaagagggguagccccauugcauuuggguaaauguaacauugcuggcuggauccugggaaauccagagugugaaucacucuccacagcaagcucaugguccuacauuguggaaacaucuaguucagacaauggaacguguuacccaggagauuucaucgauuaugaggagcuaagagagcaauugagcucagugucaucauuugaaagguuugagauauuccccaagacaaguucauggcccaaucaugacucgaacaaagguguaacggcagcauguccucaugcuggagcaaaaagcuucuacaaaaauuuaauauggcuaguuaaaaaaggaaauucauacccaaagcucagcaaauccuacauuaaugauaaagggaaagaaguccucgugcuauggggcauucaccauccaucuacuagugcugaccaacaaagucucuaucagaaugcagaugcauauguuuuuguggggacaucaagauacagcaagaaguucaagccggaaauagcaauaagacccaaagugagggaucgagaagggagaaugaacuauuacuggacacuaguagagccgggagacaaaauaacauucgaagcaacuggaaaucuagugguaccgagauaugcauucgcaauggaaagaaaugcuggaucugguauuaucauuucagauacaccaguccacgauugcaauacaacuugucagacacccaagggugcuauaaacaccagccucccauuucagaauauacauccgaucacaauuggaaaauguccaaaauauguaaaaagcacaaaauugagacuggccacaggauugaggaaugucccgucuauucaaucuagaggccuauuuggggccauugccgguuucauugaagggggguggacagggaugguagauggaugguacgguuaucaccaucaaaaugagcaggggucaggauaugcagccgaccugaagagcacacagaaugccauugacaagauuacuaacaaaguaaauucuguuauugaaaagaugaauacacaguucacagcaguagguaaagaguucaaccaccuggaaaaaagaauagagaauuuaaauaaaaaaguugaugaugguuuccuggacauuuggacuuacaaugccgaacuguugguucuauuggaaaaugaaagaacuuuggacuaccacgauucaaaugugaagaacuuauaugaaaagguaagaagccaguuaaaaaacaaugccaaggaaauuggaaacggcugcuuugaauuuuaccacaaaugcgauaacacgugcauggaaagugucaaaaaugggacuuaugacuacccaaaauacucagaggaagcaaaauuaaacagagaagaaauagaugggguaaagcuggaaucaacaaggauuuaccagauuuuggcgaucuauucaacugucgccaguucauugguacuggcagucucccugggggcaaucaguuucuggaugugcucuaaugggucucuacaguguagaauauguauuuaa

SEQ ID NO: 41625 - RNA, 1701 nt, Artificial Sequence
  derived and/or modified CDS sequence (wt) from hemagglutinin__InfluenzaA__AFN87929
augaaggcaauacuaguaguucugcuauauacauuugcaaccgcaaaugcagacacauuauguauagguuaucaugcgaacaauucaacagacacuguagacacaguacuagaaaagaauguaacaguaacacacucuguuaaccuucuagaagacaagcauaacgggaaacuaugcaaacuaagagggguagccccauugcauuuggguaaauguaacauugcuggcuggauccugggaaauccagagugugaaucacucuccacagcaagcucaugguccuacauuguggaaacaucuaguucagacaauggaacguguuacccaggagauuucaucgauuaugaggagcuaagagagcaauugagcucagugucaucauuugaaagguuugagauauuccccaagacaaguucauggcccaaucaugacucgaacaaagguguaacggcagcauguccucaugcuggagcaaaaagcuucuacaaaaauuuaauauggcuaguuaaaaaaggaaauucauacccaaagcucagcaaauccuacauuaaugauaaagggaaagaaguccucgugcuauggggcauucaccauccaucuacuagugcugaccaacaaagucucuaucagaaugcagaugcauauguuuuuguggggacaucaagauacagcaagaaguucaagccggaaauagcaauaagacccaaagugagggaucaagaagggagaaugaacuauuacuggacacuaguagagccgggagacaaaauaacauucgaagcaacuggaaaucuagugguaccgagauaugcauucgcaauggaaagaaaugcuggaucugguauuaucauuucagauacaccaguccacgauugcaauacaacuugucagacacccaagggugcuauaaacaccagccucccauuucagaauauacauccgaucacaauuggaaaauguccaaaauauguaaaaagcacaaaauugagacuggccacaggauugaggaaugucccgucuauucaaucuagaggccuauuuggggccauugccgguuucauugaagggggguggacagggaugguagauggaugguacgguuaucaccaucaaaaugaacaggggucaggauaugcagccgaccugaagagcacacagaaugccauugacaagauuacuaacaaaguaaauucuguuauugaaaagaugaauacacaguucacagcaguagguaaagaguucaaccaccuggaaaaaagaauagagaauuuaaauaaaaaaguugaugaugguuuccuggacauuuggacuuacaaugccgaacuguugguucuauuggaaaaugaaagaacuuuggacuaccacgauucaaaugugaagaacuuauaugaaaagguaagaagccaguuaaaaaacaaugccaaggaaauuggaaacggcugcuuugaauuuuaccacaaaugcgauaacacgugcauggaaagugucaaaaaugggacuuaugacuacccaaaauacucagaggaagcaaaauuaaacagagaagaaauagaugggguaaagcuggaaucaacaaggauuuaccagauuuuggcgaucuauucaacugucgccaguucauugguacugguagucucccugggggcaaucaguuucuggaugugcucuaaugggucucuacaguguagaauauguauuuaa

SEQ ID NO: 41626 - RNA, 1701 nt, Artificial Sequence; identical to SEQ ID NO: 41625
  derived and/or modified CDS sequence (wt) from hemagglutinin__InfluenzaA__AFN87930

SEQ ID NO: 41627 - RNA, 1701 nt, Artificial Sequence
  derived and/or modified CDS sequence (wt) from hemagglutinin__InfluenzaA__AFN87931
augaaggcaauacuaguaguucugcuauauacauuugcaaccgcaaaugcagacacauuauguauagguuaucaugcgaacaauucaacagacacuguagacacaguacuagaaaagaauguaacaguaacacacucuguuaaccuucuagaagaaaagcauaacgggaaacuaugcaaacuaagagggguagccccauugcauuuggguaaauguaacauugcuggcuggauccugggaaauccagagugugaaucacucuccacagcaagcucaugguccuacauuguggaaacaucuaguucagacaauggaacguguuacccaggagauuucaucgauuaugaggagcuaagagagcaauugagcucagugucaucauuugaaagguuugagauauuccccaagacaaguucauggcccaaucaugacucgaacaaagguguaacggcagcauguccucaugcuggagcaaaaagcuucuacaaaaauuuaauauggcuaguuaaaaaaggaaauucauacccaaagcucagcaaauccuacauuaaugauaaagggaaagaaguccucgugcuauggggcauucaccauccaucuacuagugcugaccaacaaaguaucuaucagaaugcagaugcauauguuuuuguggggacaucaagauacagcaagaaguucaagccggaaauagcaauaagacccaaagugagggaucaagaagggagaaugaacuauuacuggacacuaguagagccgggagacaaaauaacauucgaagcaacuggaaaucuagugguaccgagauaugcauucacaauggaaagaaaugcuggaucugguauuaucauuucagauacaccaguccacgauugcaauacaacuugucagacacccaagggugcuauaaacaccagccucccauuucagaauauacauccgaucacaauuggaaaauguccaaaauauguaaaaagcacaaaauugagacuggccacaggauugaggaaugucccgucuauucaaucuagaggccuauuuggggccauugccgguuucauugaagggggguggacagggaugguagauggaugguacgguuaucaccaucaaaaugagcaggggucaggauaugcagccgaccugaagagcacacagaaugccauugacaagauuacuaacaaaguaaauucuguuauugaaaagaugaauacacaguucacagcaguagguaaagaguucaaccaccuggaaaaaagaauagagaauuuaaauaaaaaaguugaugaugguuuccuggacauuuggacuuacaaugccgaacuguugguucuauuggaaaaugaaagaacuuuggacuaccacgauucaaaugugaagaacuuauaugaaaagguaagaagccaguuaaaaaacaaugccaaggaaauuggaaacggcugcuuugaauuuuaccacaaaugcgauaacacgugcauggaaagugucaaaaaugggacuuaugacuacccaaaauacucagaggaagcaaaauuaaacagagaagaaauagaugggguaaagcuggaaucaacaaggauuuaccagauuuuggcgaucuauucaacugucgccaguucauugguacugguagucucccugggggcaaucaguuucuggaugugcucuaaugggucucuacaguguagaauauguauuuaa

SEQ ID NO: 41628 - RNA, 1701 nt, Artificial Sequence
  derived and/or modified CDS sequence (wt) from hemagglutinin__InfluenzaA__AFN87932
auggaggcaauacuaguaguucugcuauauacauuugcaaccgcaaaugcagacacauuauguauagguuaucaugcgaacaauucaacagacacuguagacacaguacuagaaaagaauguaacaguaacacacucuguuaaccuucuagaagacaagcauaacgggaaacuaugcaaacuaagagggguagccccauugcauuuggguaaauguaacauugcuggcuggauccugggaaauccagagugugaaucacucuccacagcaagcucaugguccuacauuguggaaacaucuaguucagacaauggaacguguuacccaggagauuucaucgauuaugaggagcuaagagagcaauugagcucagugucaucauuugaaagguuugagauauuccccaaaacaaguucauggcccaaucaugacucgaacaaagguguaacggcagcauguccucaugccggagcaaaaagcuucuacaaaaauuuaauauggcuaguuaaaaaaggaaauucauacccaaagcucagcaaauccuacauuaaugauaaagggaaagaaguccucgugcuauggggcauucaccauccaucuacuagugcugaccaacaaagucucuaucagaaugcagaugcauauguuuuuguggggucaucaagauacagcaagaaguucaagccggaaauagcaauaagacccaaagugagggaucgagaagggagaaugaacuauuacuggacacuaguagagccgggagacaaaauaacauucgaagcaacuggaaaucuagugguaccgagauaugcauucgcaauggaaagaaaugcuggaucugguauuaucauuucagauacaccaguccacgauugcaauacaacuugucagacacccaagggugcuauaaacaccagccucccauuucauaauauacauccgaucacaauuggaaaauguccaaaauauguaaaaagcacaaaauugagacuggccacaggauugaggaaugucccgucuauucaaucuagaggccuauuuggggccauugccgguuucauugaagggggguggacagggaugguggauggaugguacgguuaucaccaucaaaaugagcaggggucaggauaugcagccgaccugaagagcacacagaaugccauugacgagauuacuaacaaaguaaauucuguuauugaaaagaugaauacacaguucacagcaguagguaaagaguucaaccaucuggaaaaaagaauagagaauuuaaauaaaaagguugaugaugguuuccuggacauuuggacuuacaaugccgaacuguugguucuauuggaaaaugaaagaacuuuggacuaccacgauucaaaugugaagaacuuauaugaaaagguaagaagccaguuaaaaaacaaugccaaggaaauuggaaacggcugcuuugaauuuuaccacaaaugcgauaacacgugcauggaaagugucaaaaaugggacuuaugacuacccaaaauacucagaggaagcaaaauuaaacagagaagaaauagaugggguaaagcuggaaucaacaaggauuuaccagauuuuggcgaucuauucaacugucgccaguucauugguacugguagucucccugggggcaaucaguuucuggaugugcucuaaugggucucuacaguguagaauauguauuuaa

SEQ ID NO: 41629 - RNA, 1701 nt, Artificial Sequence; identical to SEQ ID NO: 35845
  derived and/or modified CDS sequence (wt) from hemagglutinin__InfluenzaA__AFN87933

SEQ ID NO: 41630 - RNA, 1701 nt, Artificial Sequence
  derived and/or modified CDS sequence (wt) from hemagglutinin__InfluenzaA__AFN87934
augaaggcaauacuaguaguuaugcuauauacauuugcaaccgcaaaugcagacacauuauguauagguuaucaugcgaacaauucaacagacacuguagacacaguacuagaaaagaauguaacaguaacacacucuguuaaucuucuagaagacaagcauaacgggaaacuaugcaaacuaagagggguagccccauugcaguuggguaaauguaacauugcuggcuggauccugggaaauccagagugugaaucacucuccacagcaagcucaugguccuacauuguggaaacaucuaguucagacaauggaacguguuacccaggagauuucaucgauuaugaggagcuaagagagcaauugagcucagugucaucauuugaaagguuugagauauuccccaaaacaaguucauggcccaaucaugacucgaacaaagguguaacggcagcauguccucaugcuggagcaaaaggcuucuacaaaaauuuaauauggcuaguuaaaaaaggaaauucauacccaaagcucagcaaauccuacauuaaugauaaagggaaagaaguccucgugcuauggggcauucaccauccaucuacuagugcugaccaacaaagucucuaucagaaugcagauacauauguuuuuguggggacaucaagauacagcaagaaguucaagccggaaauagcaauaagacccaaagugagggaucaagaagggagaaugaacuauuacuggacacuaguagagccgggagacaaaauaacauucgaagcaacuggaaaucuagugguaccgagauaugcauucgcaauggaaagaaaugcuggaucugguauuaucauuucagauacaccaguccacgauugcaauacaacuugucagacacccaagggugcuauaaacaccagccucccauuucagaauauacauccgaucacaauuggaaaauguccaaaauauguaaaaagcacaaaauugagacuggccacaggauugaggaaugucccgucuauucaaucuagaggccuauuuggggccauugccggcuucauugaagggggguggacagggaugguagauggaugguacgguuaucaccaucaaaaugagcaggggucaggauaugcagccgaccugaagagcacacagaaugccauugacaagauuacuaacaaaguaaauucuguuauugaaaagaugaauacacaguucacagcaguagguaaagaguucaaccaccuggaaaaaagaauagagaauuuaaauaaaaaaguugaugaugguuuccuggacauuuggacuuacaaugccgaacuguugguucuauuggaaaaugaaagaacuuuggacuaccacgauucaaaugugaagaacuuauaugaaaagguaagaagccaguuaaaaaacaaugccaaggaaauuggaaauggcugcuuugaauuuuaccacaaaugcgauaacacgugcauggaaagugucaaaaaugggacuuaugacuacccaaaauacucagaggaagcaaaauuaaacagagaagaaauagaugggguaaagcuggaaucaacaaggauuuaccagauuuuggcgaucuauucaacugucgccaguucauugguacugguagucucccugggggcaaucaguuuuuggaugugcucuaaugggucucuacaguguagaauauguauuuaa

SEQ ID NO: 41631 - RNA, 1701 nt, Artificial Sequence
  derived and/or modified CDS sequence (wt) from hemagglutinin__InfluenzaA__AFN87936
augaaggcaauacuaguaguucugcuauauacauuugcaaccgcaaaugcagacacauuauguauagguuaucaugcgaacaauucaacagacacuguagacacgguacuagaaaagaauguaacaguaacacacucuguuaaccuucuagaagacaagcauaacgggaaacuaugcaaacuaagaggaguagccccauugcauuuggguaaauguaacauagcuggcuggauccugggaaauccagagugugaaucacucuccacagcaagcucaugguccuacauuguggaaacaucuauuucagacaauggaacguguuacccaggagauuucaucgauuaugaggagcuaagagagcaauugagcucagugucaucauuugaaagauuugagauauuccccaagacaaguucauggcccaaucaugacccgaacaaagguguaacggcagcauguccucaugcuggagcaaaaagcuucuacaaaaauuuaauauggcuaguuaaaaaaggaaauucauacccaaagcucagcacauccuauauuaaugauaaagggaaagaaguccucgugcuauggggcauucaccauccaucuacuagugcugaccaacaaagucucuaucagaaugcagaugcauaugcuuuuguggggacaucaagauacagcaagaaguucaagccggaaauagcaauaagacccaaagugagggaucaagaagggagaaugaacuauuacuggacacuaguagagccgggagacaaaauaacauucgaagcaacuggaaaucuaguggugccgagauaugcauucgcaauggaaagaaaugcgggaucugguauuaucauuucagauacaucaguccacgauugcaauacaacuugucagacacccaagggugcuauaaacaccagccucccauuucagaauguacauccgaucacaauuggaaaauguccaaaauauguaaaaagcacaaaauugagacuggccacaggauugaggauugucccgucuauucaaucucgaggccuauuuggggccauugccgguuucauugaagggggguggacagggaugguagauggaugguacgguuaucaucaucaaaaugagcaggggucaggauaugcagccgaccugaagagcacacagaaugccuuugacaagauuacuaacaaaguaaauucuguuauugaaaagaugaauacacaguucacagcaguagguaaagaguucaaccaccuggaaaaaagaauagagaauuuaaauaaaaaaguugaugaugguuuccuggacauuuggacuuacaaugccgaacuguugguucuauuggaaaaugaaagaacuuuggacuaccacgauucaaaugugaagaacuuauaugaaaagguaagaagccaguuaaaaaacaaugccaaggaaauuggaaacggcugcuuugaauuuuaccacaaaugcgauaacacgugcauggaaagugucaaaaaugggacuuaugacuacccaaaauacucagaggaagcaaaauuaaacagagaagaaauagaugggguaaagcuggaaucaacaaggauuuaccagauuuuggcgaucuauucaacugucgccaguucauugguacugguagucucccugggggcaaucaguuucuggaugugcucuaaugggucucuacaguguagaauauguauuuaa

SEQ ID NO: 41632 - RNA, 1701 nt, Artificial Sequence
  derived and/or modified CDS sequence (wt) from hemagglutinin__InfluenzaA__AFN87938
augaaggcaauacuaguaguucugcuauauacauuugcaaccgcaaaugcagacacauuauguauagguuaucaugcgaacaauucaacagacacuguagacacaguacuagaaaagaauguaacaguaacacacucuguuaaccuucuagaagacaagcauaacgggaaacuaugcaaacuaagagggguagccccauugcauuuggguaaauguaacauugcuggcuggauccugggaaauccagagugugaaucacucuccacagcaagcucaugguccuacauuguggaaacaucuaguucagacaauggaacguguuacccaggagauuucaucgauuaugaggagcuaagagagcaauugagcucagugucaucauuugaaagguuugagauauuccccaagacaaguucauggcccaaucaugauccgaacaaagguguaacggcagcaugcccucaugcuggagcaaaaagcuucuacaaaaauuuaauauggcuaguuaaaaaaggaaauucauacccaaagcucagcaaauccuacauuaaugauaaagggaaagaaguccuagugcuauggggcauucaccauccaucuacuagugcugaccaacaaagucucuaucagaaugcagaugcauauguuuuuguggggacaucaagauacagcaagaaguucaagccggaaauagcaauaagacccaaagugagggaucaagaagggagaaugaacuauuacuggacacuaguagagccgggagacaaaauaacauucgaagcaacuggaaaucuagugguaccgagauaugcauucgcaauggaaagaaaugcuggaucugguauuaucauuucagauacaccaguccacgauugcaauacaacuugucagacauccaagggugcuauaaacaccagccucccauuucagaauauacauccgaucacaauuggaaaauguccaaaauauguaaaaagcacaaaauugagacuggccacaggauugaggaaugucccgucuauucaaucuagaggccuauuuggggccauugccgguuucauugaagggggguggacagggaugguagauggaugguacgguuaucaccaucaaaaugagcaggggucaggauaugcagccgaccugaagagcacacagaaugccauugacgagauuacuaacaaaguaaauucuguuauugaaaagaugaauacacaguucacagcaguagguaaagaguucaaccaccuggaaaaaagaauagagaauuuaaauaaaaaaguugaugaugguuuccuggacauuuggacuuacaaugccgaacuguugguucuauuggaaaaugaaagaacuuuggacuaccacgauucaaaugugaagaacuuauaugaaaagguaagaaaccaguuaaaaaacaaugccaaggaaauuggaaacggcugcuuugaauuuuaccacaaaugcgauaacacgugcauggaaagugucaaaaaugggacuuaugacuacccaaaauacucagaggaagcaaaauuaaacagagaagaaauagaugggguaaagcuggaaucaacaaggauuuaccagauuuuggcgaucuauucaacugucgccaguucauugguacugguagucucccugggggcaaucaguuucuggaugugcucuaaugggucucuacaguguagaauauguauuuaa

SEQ ID NO: 41633 - RNA, 1701 nt, Artificial Sequence
  derived and/or modified CDS sequence (wt) from hemagglutinin__InfluenzaA__AFN87939
augaaggcaauacuaguaguucugcuauauacauuugcaaccgcaaaugcagacacauuauguauagguuaucaugcgaacaauucaacagacacuguagacacaguacuagaaaagaauguaacaguaacacacucuguuaaccuucuagaagacaagcauaacgggaaacuaugcaaacuaagagggguagccccauugcauuuggguaaauguaacauagcuggcuggauccugggaaauccagagugugaaucacucuccacagcaagcucaugguccuacauuguggaaacaucuaguucagacaauggaacguguuacccaggagauuucaucgauuaugaggagcuaagagagcaauugagcucagugucaucauuugaaagguuugagauauuccccaagacaaguucauggcccaaucaugacccgaacaaagguguaacggcagcauguccucaugcuggagcaaaaagcuucuacaaaaauuuaauauggcuaguuaaaaaaggaaauucauacccaaagcucagcacauccuacauuaaugauaaagggaaagaaguccucgugcuauggggcauucaccauccaucuacuagugcugaccaacaaagucucuaucagaaugcagaugcauaugcuuuuguggggacaucaagauacagcaagaaguucaagccggaaauagcaauaagacccaaagugagggaucaagaagggagaaugaacuauuacuggacacuaguagagccgggagacaaaauaacauucgaagcaacuggaaaucuagugguaccgagauaugcauucgcaauggaaagaaaugcuggaucugguauuaucauuucagauacaucaguccacgauugcaauacaacuugucagacacccaagggugcuauaaacaccagccucccauuucagaauguacauccgaucacaauuggaaaauguccaaaauauguaaaaagcacaaaauugagacuggccacaggauugaggaaugucccgucuauucaaucucgaggccuauuuggggccauugccgguuucauugaagggggguggacagggaugguagauggaugguacgguuaucaucaucaaaaugagcaggggucaggauaugcagccgaccugaagagcacacagaaugccauugacgagauuacuaacaaaguaaauucuguuauugaaaagaugaauacacaguucacagcaguagguaaagaguucaaccaccuggaaaaaagaauagagaauuuaaauaaaaaaguugaugaugguuuccuggacauuuggacuuacaaugccgaacuguugguucuauuggaaaaugaaagaacuuuggacuaccacgauucaaaugugaagaacuuauaugaaaagguaagaagccaguuaaaaaacaaugccaaggaaauuggaaacggcugcuuugaauuuuaccacaaaugcgauaacacgugcauggaaagugucaaaaaugggacuuaugacuacccaaaauacucagaggaagcaaaauuaaacagagaagaaauagaugggguaaagcuggaaucaacaaggauuuaccagauuuuggcgaucuauucaacugucgccaguucauugguacugguagucucccugggggcaaucaguuucuggaugugcucuaaugggucucuacaguguagaauauguauuuaa

SEQ ID NO: 41634 - RNA, 1701 nt, Artificial Sequence
  derived and/or modified CDS sequence (wt) from hemagglutinin__InfluenzaA__AFN87941
augaaggcaauacuaguaguucugcuauauacauuugcaaccgcaaaugcagacacauuauguauagguuaucaugcgaacaauucaacagacacuguagacacaguacuagaaaagaauguaacaguaacacacucuguuaaccuucuagaagacaagcauaacgggaaacuaugcaaacuaagagggguagccccauugcauuuggguaaauguaacauugcuggcuggauccugggaaauccagagugugaaucacucuccacagcaagcucaugguccuacauuguggaaacaucuaguucagacaauggaacguguuacccaggagauuucaucgauuaugaggagcuaagagagcaauugagcucagugucaucauuugaaagguuugagauauuccccaagacaaguucauggcccaaucaugauccgaacaaagguguaacggcagcauguccucaugcuggagcaaaaagcuucuacaaaaauuuaauauggcuaguuaaaaaaggaaauucauacccaaagcucagcaaauccuacauuaaugauaaagggaaagaaguccuagugcuauggggcauucaccauccaucuacuagugcugaccaacaaagucucuaucagaaugcagaugcauauguuuuuguggggacaucaagauacagcaagaaguucaagccggaaauagcaauaagacccaaagugagggaucaagaagggagaaugaacuauuacuggacacuaguagagccgggagacaaaauaacauucgaagcaacuggaaaucuagugguaccgagauaugcauucgcaauggaaagaaaugcuggaucugguauuaucauuucagauacaccaguccacgauugcaauacaacuugucagacacccaagggugcuauaaacaccagccucccauuucagaauauacauccgaucacaauuggaaaauguccaaaauauguaaaaagcacaaaauugagacuggccacaggauugaggaaugucccgucuauucaaucuagaggccuauuuggggccauugccgguuucauugaagggggguggacagggaugguagauggaugguacgguuaucaccaucaaaaugagcaggggucaggauaugcagccgaccugaagagcacacagaaugccauugacgagauuacuaacaaaguaaauucuguuauugaaaagaugaauacacaguucacagcaguagguaaagaguucaaccaccuggaaaaaagaauagagaauuuaaauaaaaaaguugaugaugguuuccuggacauuuggacuuacaaugccgaacuguugguucuauuggaaaaugaaagaacuuuggacuaccacgauucaaaugugaagaacuuauaugaaaagguaagaaaccaguuaaaaaacaaugccaaggaaauuggaaacggcugcuuugaauuuuaccacaaaugcgauaacacgugcauggaaagugucaaaaaugggacuuaugacuacccaaaauacucagaggaagcaaaauuaaacagagaagaaauagaugggguaaagcuggaaucaacaaggauuuaccagauuuuggcgaucuauucaacugucgccaguucauugguacugguagucucccugggggcaaucaguuucuggaugugcucuaaugggucucuacaguguagaauauguauuuaa

SEQ ID NO: 41635 - RNA, 1701 nt, Artificial Sequence
  derived and/or modified CDS sequence (wt) from hemagglutinin__InfluenzaA__AFN87943
augaaggcaauacuaguaguucugcuauauacauuugcaaccgcaaaugcagacacauuauguauagguuaucaugcgaacaauucaacagacacuguagacacaguacuagaaaagaauguaacaguaacacacucuguuaaccuucuagaagacaagcauaacgggaaacuaugcaaacuaagagggguagccccauugcauuuggguaaauguaacauagcuggcuggauccugggaaauccagagugugaaucacucuccacagcaagcucaugguccuacauuguggaaacaucuauuucagacaauggaacguguuacccaggagauuucaucgauuaugaggagcuaagagagcaauugagcucagugucaucauuugaaagauuugagauauuccccaagacaaguucauggcccaaucaugacccgaacaaagguguaacggcagcauguccucaugcuggagcaaaaagcuucuacaaaaauuuaauauggcuaguuaaaaaaggaaauucauacccaaagcucagcacauccuauauuaaugauaaagggaaagaaguccucgugcuauggggcauucaccauccaucuacuagugcugaccaacaaagucucuaucagaaugcagaugcauaugcuuuuguggggacaucaagauacagcaagaaguucaagccggaaauagcaauaagacccaaagugagggaucaagaagggagaaugaacuauuacuggacacuaguagagccgggagacaaaauaacauucgaagcaacuggaaaucuaguggugccgagauaugcauucgcaauggaaagaaaugcgggaucugguauuaucauuucagauacaucaguccacgauugcaauacaacuugucagacacccaagggugcuauaaacaccagccucccauuucagaauguacauccgaucacaauuggaaaauguccaaaauauguaaaaagcacaaaauugagacuggccacaggauugaggaaugucccgucuauucaaucucgaggccuauuuggggccauugccgguuucauugaagggggguggacagggaugguagauggaugguacgguuaucaucaucaaaaugagcaggggucaggauaugcagccgaccugaagagcacacagaaugccauugacgagauuacuaacaaaguaaauucuguuauugaaaagaugaauacacaguucacagcaguagguaaagaguucaaccaccuggaaaaaagaauagagaauuuaaauaaaaagguugaugaugguuuccuggacauuuggacuuacaaugccgaacuguugguucuauuggaaaaugaaagaacuuuggacuaccacgauucaaaugugaagaacuuauaugaaaagguaagaagccaguuaaaaaacaaugccaaggaaauuggaaacggcugcuuugaauuuuaccacaaaugcgauaacacgugcauggaaagugucaaaaaugggacuuaugacuacccaaaauacucagaggaagcaaaauuaaacagagaagaaauagaugggguaaagcuggaaucaacaaggauuuaccagauuuuggcgaucuauucaacugucgccaguucauugguacugguagucucccugggggcaaucaguuucuggaugugcucuaaugggucucuacaguguagaauauguauuuaa

SEQ ID NO: 41636 - RNA, 1701 nt, Artificial Sequence
  derived and/or modified CDS sequence (wt) from hemagglutinin__InfluenzaA__AFN87945
augaaggcaauacuaguaguucugcuauauacauuugcaaccgcaaaugcagacacauuauguauagguuaucaugcgaacaauucaacagacacaguagacacuguacuagaaaagaaugugacaguaacacacucuguuaaccuucuagaagacaagcaugacgggaaacuaugcaaacuaagagggguagccccauugcauuuggguaaauguaacauugcuggcuggauccugggaaauccagagugugaaucacucuccacagcaagcucaugguccuacauuguggaaacaucuaguucagauaauggaacguguuacccaggagauuucaucgauuaugaggagcuaagagagcaauugagcucagugucaucauuugaaagguuugagauauuccccaagacaaguucauggcccaaucaugacucgaacaaagguguaacggcagcauguccucaugcuggagcaaaaagcuucuacaaaaauuuaauauggcuaguuaaaaaaggaaauucauacccaaagcucagccaauccuacauuaaugauaaagggaaagaaguccucgugcuauggggcauucaccauccaucuacuagugcugaccaacaaagucucuaucagaaugcagaugcauauguuuuuguggggacaucaagauacagcaagaaguucaaaccggaaauagcaauaagacccaaagugagggaucaagaagggagaaugaacuauuacuggacacuaguagagccgggagacaaaauaacauucgaagcaacuggaaaucuagugguaccgagauaugcauucgcaauggaaagaaaugcuggaucugguauuaucauuucagauacaccaguccacgauugcaauacaacuugucagacacccaagggugcuauaaacaccagccucccauuucagaauauacauccgaucacaauuggaaaauguccaaaauauguaaaaagcacaaaauugagacuggccacaggauugaggaaugucccgucuauucaaucuagaggccuauuuggggccauugccgguuucauugaagggggguggacagggaugguagauggaugguacgguuaucaccaucaaaaugagcaggggucaggauaugcagccgaccugaagagcacacagaaugccauugacaagauuacuaacaaaguaaauucuguuauugaaaagaugaauacacaguucacagcaguagguaaagaguucaaucaccuggaaaaaagaauagaaaauuuaaauaaaaaaguugaugaugguuuccuggacauuuggacuuacaaugccgaacuguugguucuauuggaaaaugaaagaacuuuggacuaccacgauucaaaugugaagaacuuauaugaaaagguaagaagccaguuaaaaaacaaugccaaggaaauuggaaacggcugcuuugaauuuuaccacaaaugcgauaacacgugcauggaaagugucaaaaaugggacuuaugacuacccaaaauacucagaggaagcaaaauugaacagagaagaaauagaugggguaaagcuggaaucaacaaggauuuaccagauuuuggcgaucuauucaacugucgccaguucauugguacugguagucucccugggggcaaucaguuucuggaugugcucuaaugggucucuacaguguagaauauguauuuaa

SEQ ID NO: 41637 - RNA, 1701 nt, Artificial Sequence
  derived and/or modified CDS sequence (wt) from hemagglutinin__InfluenzaA__AFN87947
augaaggcaauacuaguaguucugcuauauacauuugcaaccgcaaaugcagacacauuauguauagguuaucaugcgaacaauucaacagacacuguagacacaguacuagaaaagaauguaacaguaacacacucuguuaaccuucuagaagacaagcauaacgggaaacuaugcaaacuaagagggguagccccauugcauuuggguaaauguaacauagcuggcuggauccugggaaauccagagugugaaucacucuccacagcaagcucaugguccuacauuguggaaacaucuaguucagacaauggaacguguuacccaggagauuucaucgauuaugaggagcuaagagagcaauugagcucagugucaucauuugaaagguuugagauauuccccaagacaaguucauggcccaaucaugacccgaacaaagguguaacggcagcauguccucaugcuggagcaaaaagcuucuacaaaaauuuaauauggcuaguuaaaaaaggaaauucauacccaaagcucagcacauccuacauuaaugauaaagggaaagaaguccucgugcuauggggcauucaccauccaucuacuagugcugaccaacaaagucucuaucagaaugcagaugcauaugcuuuuguggggacaucaagauacagcaagaaguucaagccggaaauagcaauaagacccaaagugagggaucaagaagggagaaugaacuauuacuggacacuaguagagccgggagacaaaauaacauucgaagcaacuggaaaucuagugguaccgagauaugcauucgcaauggaaagaaaugcuggaucugguauuaucauuucagauacaucaguccacgauugcaauacaacuugucagacacccaagggugcuauaaacaccagccucccauuucagaauguacauccgaucacaauuggaaaauguccaaaauauguaaaaagcacaaaauugagacuggccacaggauugaggaaugucccgucuauucaaucucgaggccuauuuggggccauugccgguuucauugaagggggguggacagggaugguagauggaugguacgguuaucaucaucaaaaugagcaggggucaggauaugcagccgaccugaagagcacacagaaugccuuugacgagauuacuaacaaaguaaauucuguuauugaaaagaugaauacacaguucacagcaguagguaaagaguucaaccaccuggaaaaaagaauagagaauuuaaauaaaaaaguugaugaugguuuccuggacauuuggacuuacaaugccgaacuguugguucuauuggaaaaugaaagaacuuuggacuaccacgauucaaaugugaagaacuuauaugaaaagguaagaagccaguuaaaaaacaaugccaaggaaauuggaaacggcugcuuugaauuuuaccacaaaugcgauaacacgugcauggaaagugucaaaaaugggacuuaugacuacccaaaauacucagaggaagcaaaauuaaacagagaagaaauagaugggguaaagcuggaaucaacaaggauuuaccagauuuuggcgaucuauucaacugucgccaguucauugguacugguagucucccugggggcaaucaguuucuggaugugcucuaaugggucucuacaguguagaauauguauuuaa

SEQ ID NO: 41638 - RNA, 1701 nt, Artificial Sequence
  derived and/or modified CDS sequence (wt) from hemagglutinin__InfluenzaA__AFN87949
augaaggcaauacuaguaguuaugcuauauacauuugcaaccgcaaaugcagacacauuauguauagguuaucaugcgaacaauucaacagacacuguagacacaguacuagaaaagaauguaacaguaacacacucuguuaaucuucuagaagacaagcauaacgggaaacuaugcaaacuaagagggguagccccauugcauuuggguaaauguaacauugcuggcuggauccugggaaauccagagugugaaucacucuccacagcaagcucaugguccuacauuguggaaacaucuaguucagacaauggaacguguuacccaggagauuucaucgauuaugaggagcuaagagagcaauugagcucagugucaucauuugaaagguuugagauauuccccaaaacaaguucauggcccaaucaugacucgaacaaagguguaacggcagcauguccucaugcuggagcaaaaggcuucuacaaaaauuuaauauggcuaguuaaaaaaggaaauucauacccaaagcucagcaaauccuacauuaaugauaaagggaaagaaguccucgugcuauggggcauucaccauccaucuacuagugcugaccaacaaagucucuaucagaaugcagauacauauguuuuuguggggacaucaagauacagcaagaaguucaagccggaaauagcaauaagacccaaagugagggaucaagaagggagaaugaacuauuacuggacacuaguagagccgggagacaaaauaacauucgaagcaacuggaaaucuagugguaccgagauaugcauuugcaauggaaagaaaugcuggaucugguauuaucauuucagauacaccaguccacgauugcaauacaacuugucagacacccaagggugcuauaaacaccagccucccauuucagaauauacauccgaucacaauuggaaaauguccaaaauauguaaaaagcacaaaauugagacuggccacaggauugaggaaugucccgucuauucaaucuagaggccuauuuggggccauugccggauucauugaagggggguggacagggaugguagauggaugguacgguuaucaccaucaaaaugagcaggggucaggauaugcagccgaccugaagagcacacagaaugccauugacaagauuacuaacaaaguaaauucuguuauugaaaagaugaauacacaguucacagcaguagguaaagaguucaaccaccuggaaaaaagaauagagaauuuaaauaaaaaaguugaugaugguuuccuggacauuuggacuuacaaugccgaacuguugguucuauuggaaaaugaaagaacuuuggacuaccacgauucaaaugugaagaacuuauaugaaaagguaagaagccaguuaaaaaacaaugccaaggaaauuggaaauggcugcuuugaauuuuaccacaaaugcgauaacacgugcauggaaagugucaaaaaugggacuuaugacuacccaaaauacucagaggaagcaaaauuaaacagagaagaaauagaugggguaaagcuggaaucaacaaggauuuaccagauuuuggcgaucuauucaacugucgccaguucauugguacugguagucucccugggggcaaucaguuuuuggaugugcucuaaugggucucuacaguguagaauauguauuuaa

SEQ ID NO: 41639 - RNA, 1701 nt, Artificial Sequence
  derived and/or modified CDS sequence (wt) from hemagglutinin__InfluenzaA__AFN87951
augaaggcaauacuaguaguucugcuauauacauuugcaaccgcaaaugcagacacauuauguauagguuaucaugcgaacaauucaacagacacuguagacacaguacuagaaaagaauguaacaguaacacacucuguuaaccuucuagaagacaagcauaacgggaaacuaugcaaacuaagagggguagccccauugcauuuggguaaauguaacauugcuggcuggauccugggaaauccagagugugaaucacucuccacagcaagcucaugguccuacauuguggaaacaucuaguucagacaauggaacguguuacccaggaguuuucaucgauuaugaggagcuaagagagcaauugagcucagugucaucauuugaaagguuugagauauuccccaagacaaguucauggcccaaucaugacucgaacaaagguguaacggcagcauguccucaugcuggagcaaaaagcuucuacaaaaauuuaauauggcuaguuaaaaaaggaaauucauacccaaagcucagcaaauccuacauuaaugauaaagggaaagaaguccucgugcuauggggcauucaccauccaucuacuacugcugaccaacaaagucucuaucagaaugcagaugcauauguuuuuguggggacaucaagauacagcaagaaguucaagccggaaauagcaguaagacccaaagugagggaucaagaagggagaaugaacuauuacuggacacuaguagagccgggagacaaaauaacauucgaagcaacuggaaaucuagugguaccgagauaugcauucgcaauggaaagaaaugcuggaucugguauuaucauuucagauacaccaguccacgauugcaauacaacuugucagacacccaagggugcuauaaacaccagccucccauuucagaauauacauccgaucacaauuggaaaauguccaaaauauguaaaaagcacaaaauugagacuggccacaggauugaggaaugucccaucuauucaaucuagaggccuauuuggggccauugccggcuucauugaagggggguggacagggaugguagauggaugguacgguuaucaccaucaaaaugagcaggggucaggauaugcagccgaccugaagagcacacagaaugccaucgacaagauuacuaacaaaguaaauucuguuauugaaaagaugaauacacaguucacagcaguagguaaagaguucaaccaccuggaaaaaagaauagagaauuuaaauaaaaaaguugaugaugguuuccuggacauuuggacuuacaaugccgaacuguugguucuauuggaaaaugaaagaacuuuggacuaccacgauucaaaugugaagaacuuauaugaaaagguaagaaaccaguuaaaaaacaaugccaaggaaauuggaaacggcugcuuugaauuuuaccacaaaugcgauaacacgugcauggaaagugucaaaaaugggacuuaugacuauccaaaauacucagaggaagcaaaauuaaacagagaagaaauagaugggguaaagcuggaaucaacaaggauuuaccagauuuuggcgaucuauucaacugucgccaguucauugguacugguagucucccugggggcaaucaguuucuggaugugcucuaaugggucucuacaguguagaauauguauuuaa

SEQ ID NO: 41640 - RNA, 1701 nt, Artificial Sequence
  derived and/or modified CDS sequence (wt) from hemagglutinin__InfluenzaA__AFN87953
augaaggcaauacuaguaguucugcuauauacauuugcaaccgcaaaugcagacacauuauguauagguuaucaugcgaacaauucaacagacacuguagacacaguacuagaaaagaauguaacaguaacacacucugcuaaccuucuagaagacaagcauaacgggaaacuaugcaaacuaagagggguagccccauugcauuuggguaaauguaacauugcuggcuggauccugggaaauccagagugugaaucacucuccacagcaagcucaugguccuacauuguggaaacaucuaguucagacaauggaacguguuacccaggagauuucaucgauuaugaggagcuaagagagcaauugagcucagugucaucauuugaaagguuugagauauuccccaagacaaguucauggcccaaucaugaccugaacaaagguguaacggcagcauguccucaugcuggagcaaaaagcuucuacaaaaauuuaauauggcuaguuaaaaaaggaaauucauacccaaagcucagcaaauccuacauuaaugauaaagggaaagaaguccucgugcuauggggcauacaccauccaucuacuagugcugaccaacaaagucucuaucagaaugcagaugcauauguuuuuguggggacaucaagauacagcaagaaguucaagccggaaauagcaauaagacccaaagugagggaucaagaagggagaaugaacuauuacuggacacuaguagagccgggagacaaaauaacauucgaagcaacuggaaaucuagugguaccgagauaugcauucgcaauggaaagaaaugcuggaucugguauuaucauuucagauacaccaguccacgauugcaauacaacuugucagacacccaagggugcuauaaacaccagccucccauuucagaauauacauccgaucacaauuggaaaauguccaaaauauguaaaaagcacaaaauugagacuggccacaggauugaggaaugucccgucuauucaaucuagaggccuauuuggggccauugccgguuucauugaagggggguggacagggaugguagauggaugguacgguuaucaccaucaaaaugagcaggggucaggauaugcagccgaccugaagagcacacaaaaugccauugacgagauuacuaacaaaguaaauucuguuauugaaaagaugaauacacaguucacagcaguagguaaagaguucaaccaccuggaaaaaagaauagagaauuuaaauaaaaaaguugaugaugguuuccuggacauauggacuuacaaugccgaacuguugguucuauuggaaaaugaaagaacuuuggacuaccacgauucaaaugugaagaauuuauaugaaaagguaagaagccaguuaaaaaacaaugccaaggaaauuggaaacggcugcuuugaauuuuaccacaaaugcgauaacacgugcauggaaagugucaaaaaugggacuuaugacuacccaaaauacucagaggaagcaaaauuaaacagagaagaaauagaugggguaaagcuggaaucaacaaggauuuaccagauuuuggcgaucuauucaacugucgccaguucauugguacugguagucucccugggggcaaucaguuucuggaugugcucuaaugggucucuacaguguagaauauguauuuaa

SEQ ID NO: 41641 - RNA, 1701 nt, Artificial Sequence
  derived and/or modified CDS sequence (wt) from hemagglutinin__InfluenzaA__AFN87955
augaaggcaauacuaguaguuaugcuauauacauuugcaaccgcaaaugcagacacauuauguauagguuaucaugcgaacaauucaacagacacuguagacacaguacuagaaaagaauguaacaguaacacacucuguuaaucuccuagaagacaagcauaacgggaaacuaugcaaacuaagagggguagccccauugcauuuggguaaauguaacauugcuggcuggauccugggaaauccagagugugaaucacucuccacagcaagcucaugguccuacauuguggaaacaucuaguucagacaauggaacguguuacccaggagauuucaucgauuaugaggagcuaagagagcaauugagcucagugucaucauuugaaagguuugagauauuccccaaaacaaguucauggcccaaucaugacucgaacaaagguguaacggcagcauguccucaugcuggagcaaaaggcuucuacaaaaauuuaauauggcuaguuaaaaaaggaaauucauacccaaagcucagcaaauccuacauuaaugauaaagggaaagaaguccuugugcuauggggcauucaccauccaucuacuacugcugaccaacaaagucucuaucagaaugcagauacauauguuuuuguggggacaucaagauacagcaagaaguucaagccggaaauagcaauaagacccaaagugagggaucaagaagggagaaugaacuauuacuggacacuaguagagccgggagacaaaauaacauucgaagcaacuggaaaucuagugguaccgagauaugcauucgcaauggaaagaaaugcuggaucugguauuaucauuucagauacaccaguccacgauugcaauacaacuugucagacacccaagggugcuauaaacaccagccucccauuucagaauauacauccgaucacaauuggaaaauguccaaaauauguaaaaagcacaaaauugagacuggccacaggauugaggaaugucccgucuauucaaucuagaggccuauuuggggccauugccggcuucauugaagggggguggacagggaugguagauggaugguacgguuaucaccaucaaaaugagcaggggucaggauaugcagccgaccugaagagcacacagaaugccauugacgagauuacuaacaaaguaaauucuguuauugaaaagaugaauacacaguucacagcaguagguaaagaguucaaccaccuggaaaaaagaauagagaauuuaaauaaaaagguugaugaugguuuccuggacauuuggacuuacaaugccgaacuguugguucuauuggaaaaugaaagaacuuuggacuaccacgauucaaaugugaagaacuuauaugaaaagguaagaagccaguuaaaaaacaaugccaaggaaauuggaaauggcugcuuugaauuuuaccacaaaugcgauaacacgugcauggaaagugucaaaaaugggacuuaugacuacccaaaauacucagaggaagcaaaauuaaacagagaagaaauagaugggguaaagcuggaaucaacaaggauuuaccagauuuuggcgaucuauucaacugucgccaguucauugguacugguagucucccugggggcaaucaguuuuuggaugugcucuaaugggucucuacaguguagaauauguauuuaa

SEQ ID NO: 41642 - RNA, 1701 nt, Artificial Sequence
  derived and/or modified CDS sequence (wt) from hemagglutinin__InfluenzaA__AFN87957
augaaggcaauacuaguaguucugcuauauacauuugcaaccgcaaaugcagacacauuauguauagguuaucaugcgaacaauucaacagacacuguagacacaguacuagaaaagaauguaacaguaacacacucuguuaaccuucuagaagacaagcauaacgggaaacuaugcaaacuaagagggguagccccauugcauuuggguaaauguaacauagcuggcuggauccugggaaauccagagugugaaucacucuccacagcaagcucaugguccuacauuguggaaacaucuauuucagacaauggaacguguuacccaggagauuucauugauuaugaggagcuaagagagcaauugagcucagugucaucauuugaaagauuugagauauuccccaagacaaguucauggcccaaucaugacccgaacaaagguguaacggcagcauguccucaugcuggagcaaaaagcuucuacaaaaauuuaauauggcuaguuaaaaaaggaaauucauacccaaagcucagcacauccuauauuaaugauaaagggaaagaaguccucgugcuauggggcauucaccauccaucuacuagugcugaccaacaaagucucuaucagaaugcagaugcauaugcuuuuguggggacaucaagauacagcaagaaguucaagccggaaauagcaauaagacccaaagugagggaucaagaagggagaaugaacuauuacuggacacuaguagagccgggagacaaaauaacauucgaagcaacuggaaaucuaguggugccgagauaugcauucgcaauggaaagaaaugcgggaucugguauuaucauuucagauacaucaguccacgauugcaauacaacuugucagacacccaagggugcuauaaacaccagccucccauuucagaauguacauccgaucacaauuggaaaauguccaaaauauguaaaaagcacaaaauugagacuggccacaggauugaggaaugucccgucuauucaaucucgaggccuauuuggggccauugccgguuucauugaagggggguggacagggaugguagauggaugguacgguuaucaucaucaaaaugagcaggggucaggauaugcagccgaccugaagagcacacagaaugccuuugacgagauuacuaacaaaguaaauucuguuauugaaaagaugaauacacaguucacagcaguagguaaagaguucaaccaccuggaaaaaagaauagagaauuuaaauaaaaaaguugaugaugguuuccuggacauuuggacuuacaaugccgaacuguugguucuauuggaaaaugaaagaacuuuggacuaccacgauucaaaugugaagaacuuauaugaaaagguaagaagccaguuaaaaaacaaugccaaggaaauuggaaacggcugcuuugaauuuuaccacaaaugcgauaacaagugcauggaaagugucaaaaaugggacuuaugacuacccaaaauacucagaggaagcaaaauuaaacagagaagaaauagaugggguaaagcuggaaucaacaaggauuuaccagauuuuggcgaucuauucaacugucgccaguucauugguacugguagucucccugggggcaaucaguuucuggaugugcucuaaugggucucuacaguguagaauauguauuuaa

SEQ ID NO: 41643 - RNA, 1701 nt, Artificial Sequence
  derived and/or modified CDS sequence (wt) from hemagglutinin__InfluenzaA__AFN87959
augaaggcaauacuaguaguuaugcuauauacauuugcaaccgcaaaugcagacacauuauguauagguuaucaugcgaacaauucaacagacacuguagacacaguacuagaaaagaauguaacaguaacacacucuguuaaucuucuagaagacaagcauaacgggaaacuaugcaaacuaagagggguagccccauugcauuuggguaaauguaacauugcuggcuggauccugggaaauccagagugugaaucacucuccacagcaagcucaugguccuacauuguggaaacaucuaguucagacaauggaacguguuacccaggagauuucaucgauuaugaggagcuaagagagcaauugagcucagugucaucauuugaaagguuugagauauuccccaaaacaaguucauggcccaaucaugacucgaacaaagguguaacggcagcauguccucaugcuggagcaaaaggcuucuacaaaaauuuaauauggcuaguuaaaaaaggaaauucauacccaaagcucagcaaauccuacauuaaugauaaagggaaagaaguccucgugcuauggggcauucaccauccaucuacuagugcugaccaacaaagucucuaucagaaugcagauacauauguuuuuguggggacaucaagauacagcaagaaguucaagccggaaauagcaauaagacccaaagugagggaucaagaagggagaaugaacuauuacuggacacuaguagagccgggagacaaaauaacauucgaagcaacuggaaaucuagugguaccgagauaugcauucgcaauggaaagaaaugcuggaucugguauuaucauuucagauacaccaguccacgauugcaacacaacuugucagacacccaagggugcuauaaacaccagccucccauuucagaauauacauccgaucacaauuggaaaauguccaaaauauguaaaaagcacaaaauugagacuggccacaggauugaggaaugucccgucuauucaaucuagaggccuauuuggggccauugccggcuucauugaagggggguggacagggaugguagauggaugguacgguuaucaccaucaaaaugagcaggggucaggauaugcagccgaccugaagagcacacagaaugccauugacaagauuacuaacaaaguaaauucuguuauugaaaagaugaauacacaguucacagcaguagguaaagaguucaaccaccuggaaaaaagaauagagaauuuaaauaaaaaaguugaugaugguuuccuggacauuuggacuuacaaugccgaacuguugguucuauuggaaaaugaaagaacuuuggacuaccacgauucaaaugugaagaacuuauaugaaaagguaagaaaccaguuaaaaaacaaugccaaggaaauuggaaauggcugcuuugaauuuuaccacaaaugcgauaacacgugcauggaaagugucaaaaaugggacuuaugacuacccaaaauacucagaggaagcaaaauuaaacagagaagaaauagaugggguaaaacuggaaucaacaaggauuuaccagauuuuggcgaucuauucaacugucgccaguucauugguacugguagucucccugggggcaaucaguuuuuggaugugcucuaaugggucucuacaguguagaauauguauuuaa

SEQ ID NO: 41644 - RNA, 1701 nt, Artificial Sequence
  derived and/or modified CDS sequence (wt) from hemagglutinin__InfluenzaA__AFN87961
augaaggcaauacuaguaguucugcuauauacauuugcaaccgcaaaugcagacacauuauguauagguuaucaugcgaacaauucaacagacacuguagacacaguacuagaaaagaauguaacaguaacacacucuguuaaccuucuagaagacaagcauaacgggaaacuaugcaaacuaagagggguagccccauugcauuuggguaaauguaacauugcuggcuggauccugggaaauccagagugugaaucacucuccacagcaagcucaugguccuacauuguggaaacaucuaguucagacaauggaacguguuacccaggagauuucaucgauuaugaggagcuaagagagcaauugagcucagugucaucauuugaaagguuugagauauuccccaagacaaguucauggcccaaucaugacucgaacaaagguguaacggcagcauguccucaugcuggagcaaaaagcuucuacaaaaauuuaauaugguuaguuaaaaaaggaaauucauacccaaagcucagcaaauccuacauuaaugauaaagggaaagagguccucgugcuauggggcauucaccauccaucuacuagugcugaccaacaaagucucuaucagaaugcagaugcauauguuuuuguggggacaucaagauacagcaagaaguucaagccggaaauagcaauaagacccaaagugagggaucgagaagggagaaugaacuauuacuggacacuaguagagccgggagacaaaauaacauucgaagcaacuggaaaucuagugguaccgagauaugcauucgcaauggaaagaaaugcuggaucugguauuaucauuucagauacaccaguccacgauugcaauacaacuugucagacacccaagggugcuauaaacaccagccucccauuucagaauauacauccgaucacaauuggaaaauguccaaaauauguaaaaagcacaaaauugagacuggccacaggauugaggaaugucccgucuauucaaucuagaggccuauuuggggccauugccgguuucauugaagggggguggacagggaugguagauggaugguacgguuaucaccaucaaaaugagcaggggucaggauaugcagccgaccugaagagcacacagaaugccauugacgagauuacuaacaaaguaaauucuguuauugaaaagaugaauacacaguucacagcaguagguaaagaguucaaccaccuggaaaaaagaauagagaauuuaaauaaaaaaguugaugaugguuuccuggacauuuggacuuacaaugccgaacuguugguucuauuggaaaaugaaagaacuuuggacuaccacgauucaaaugugaagaacuuauaugaaaagguaagaagccaguuaaaaaacaaugccaaggaaauuggaaacggcugcuuugaauuuuaccacaaaugcgauaacacgugcauggaaagugucaaaaaugggacuuaugacuacccaaaauacucagaggaagcaaaauuaaacagagaagaaauagaugggguaaagcuggaaucaacaaggauuuaccagauuuuggcgaucuauucaacugucgccaguucauugguacugguagucucccugggggcaaucaguuucuggauguguucuaaugggucucuacaguguagaauauguauuuaa

SEQ ID NO: 41645 - RNA, 1698 nt, Artificial Sequence
  derived and/or modified CDS sequence (wt) from hemagglutinin__InfluenzaA__AFO64802
augaaagcaaaacuacuaguccuguuauguacauuuacagcuacauaugcagacacaauauguauaggcuaccaugccaacaacucaaccgacacuguugacacaguacuugagaagaaugugacagugacacacucugucaaccuacuugaggacagucacaauggaaaacuaugucuacuaaaaggaauagccccacuacaauuggguaauugcagcguugccggauggaucuuaggaaacccagaaugcgaauuacugauuucuaaggaaucaugguccuacauuguagaaacaccaaauccugagaauggaacauguuacccaggguauuucgccgacuaugaggaacugagggagcaauugaguucaguaucuucauuugagagauucgaaauauuccccaaagaaagcucauggcccaaccacaccguaaccggaguaucggcaucaugcucccauaaugggaaaagcaguuuuuacagaaauuugcuauggcugacggugaagaauggcuuguacccaaaccugagcaaguccuauguaaacaacaaagggaaagaaguccuuguacuaugggguguucaucacccgucuaacauaagggaccaaagggccaucuaucauacagaaaaugcuuaugucucuguagugucuucacauuauagcagaagauucaccccagaaauagccaaaagacccaaaguaagagaucaggaaggaagaaucaacuacuacuggacucugcuggaacccggggacacaauaauauuugaggcaaauggaaaucuaauagcgccaugguaugcuuucgcacugaguagaggcuuuggaucaggaaucaucaccucaaaugcaccaauggaugaaugugaugcgaagugucaaacaccucagggagcuauaaacaguagucuuccuuuccagaauguacacccagucacaauaggagaguguccaaaguaugucaggagugcaaaauuaaggaugguuacaggacuaaggaacaucccauccauucaauccagagguuuguuuggagccauugccgguuucauugaagggggguggacuggaaugauagaugggugguaugguuaucaucaucagaaugagcaaggaucuggcuaugcugcagaucaaaaaagcacacaaaaugccauuaacgggauuacaaacaaggugaauucuguaauugagaaaaugaacacucaauucacagcugugggcaaagaauucaacaaauuagaaagaaggauggaaaacuuaaauaaaaaaguugaugauggauuucuagacauuuggacauauaaugcagaauuguugguacuacuggaaaaugaaaggacuuuggauuuccaugacucaaaugugaagaaucuguaugagaaaguaaaaagccaauuaaagaauaaugccaaagaaauaggaaacggguguuuugaauucuaucacaaguguaacaaugaaugcauggaaagugugaaaaauggaacuuaugacuauccaaaauauuccgaagaaucaaaguuaaacagggagaaaauugauggagugaaauuggaaucaaugggagucuaucagauucuggcgaucuacucaacugucgccaguucacugguucuuuuggucucccugggggcaaucagcuucuggauguguuccaaugggucuuugcaguguagaauaugcaucuga

SEQ ID NO: 41646 - RNA, 1701 nt, Artificial Sequence
  derived and/or modified CDS sequence (wt) from hemagglutinin__InfluenzaA__AFO64813
augaaagcaaaacuacuaguccuguuaugugcauuuacagcuacagaugcagacacaauauguauaggcuaccaugcgaacaacucaaccgacacuguugacacaguacuugaaaagaacgugacagugacacacucugucaaccuacuugaggacagucacaacggaaagcuaugucgacuaaaaggaauagccccacuacaauuggguaauugcagcauugccggauggaucuuaggaaacccagaaugcgaaucacuguuuucuaagaaaucaugguccuacauugcagaaacaccaaacuccgagaauggaacauguuacccaggguauuucgccgacuaugaggaacugagggagcaauugaguucaguaucaucauucgagagauucgaaauauuccccaaagaaagcucauggcccaaccacaccguaaccaaaggaguaacggcaucaugcucccauaaggggagaagcaguuuuuacagaaauuugcuauggcuaacggagaagaauggcucguacccaaaucugagcaaguccuaugugaacaacaaagagaaagaaguccuuguacuaugggguguucaucacccgucuaacauaagggaccaaagggccaucuaucauacagaaaaugcuuaugucucuguagugucuucacauuauaacaggagauucaccccagaaauagcaaaaagacccaaaguaagagaucaagaaggaaggauuaacuacuacuggacucugcuggaacccggggacacaauaauauuugaggcaaauggaaaucuaauagcgccaugguaugcuuucgcacugaguagaggcuuugggucaggaaucaucaccucaaaugcaucaauggaugaaugugacgcgaagugucaaacaccccagggagcuauaaacaguagucuuccuuuccagaauguacacccagucacaauaggagagugcccaaaguaugucaggaguacaaaauuaaggaugguuacaggacuaaggaacaucccauccauucaauccagagguuuguuuggagccauugccgguuucauugaagggggguggacuggaaugauagauggaugguaugguuaucaucaucagaaugaacaaggaucuggcuaugcugcggaucaaaaaagcacacaaaaugccauuaacgggauuacaaacaaggugaauucuguaaucgagaaaaugaacacucaauucacagcugugggcaaagaauucaacaaauuagaaagaaggauggaaaacuuaaauaaaaaaguugaugauggauuucuggacauuuggacauauaaugcagaauuguugguucuacuggaaaaugaaaggacuuuggauuuucaugacucaaaugugaagaaucuguaugagaaaguaaaaagccaauuaaagaauaaugccaaagaaauaggaaacggguguuuugaauucuaccacaaguguaacaaugaaugcauggaaagugugaaaaauggaacuuaugacuauccaaaauauuccgaggaaucaaaauuaaacagggaaaaaauugauggagugaaauuggaaucaaugggagucuaucagauucuggcgaucuacucaacugucgccaguucacuggugcuuuuggucucccugggggcaaucaguuucuggauguguucuaaugggucuuugcaguguagaauaugcaucuga

SEQ ID NO: 41647 - RNA, 1701 nt, Artificial Sequence
  derived and/or modified CDS sequence (wt) from hemagglutinin__InfluenzaA__AFO64824
augaaagcaauacuacuaguccuguuaugugcauuuacagcuacagaugcagacacaauauguauaggcuaccaugcgaacaacucaaccgacacuguugacacaguacuugaaaagaacgugacagugacacauucugucaaccuacuugaggacagucacaacggaaaacuaugucgacuaaaaggaauagccccacuacaauuggguaauugcagcauugccggauggaucuuaggaaacccagaaugcgaaucacuguuuucuaagaaaucaugguccuacauugcagaaacaccaaacuccgagaauggaacauguuacccaggguauuucgccgacuaugaggaacugagggagcaauugaguucaguaucaucauucgagagauucgaaauauuccccaaagaaagcucauggcccaaccacaccguaaccaaaggaguaacggcaucaugcucccauaaggggagaagcaguuuuuacagaaauuugcuauggcugacggagaagaauggcuuguacccaaaucugagcaaguccuaugugaacaacaaagagaaagaaguccuuguacuaugggguguucaucacccgucuaacauaggggaccaaagggccaucuaucauacagaaaaugcuuaugucucuguagugucuucacauuauaacaggagauucaccccagaaauagcaaaaagacccaaagucagaggucaagaaggaagaauuaacuacuacuggacucugcuggaacccggggacacaauaauauuugaggcaaauggaaaucuaauagcgccaugguaugcuuucgcacugaguagaggcuuuggaucaggaaucaucaccucaaacgcaucaauggaugaaugugacgcgaagugucaaacaccccagggagcuauaaacaguagucuuccuuuccagaauguacacccagucacaauaggagagugcccaaaguaugucaggaguacaaaauuaaagaugguuacaggacuaaggaacaucccauccauucaauccagaggucuguuuggagccauugccgguuucauugaagggggguggacuggaaugauagauggaugguaugguuaucaucaucagaaugaacaaggaucuggcuaugcugcggaucaaaaaagcacacaaaaugccauuaacgggauuacaaacaaggugaauucuguaaucgagaaaaugaacacucaauucacagcugugggcaaagaauucaacaaauuagaaaaaaggauggaaaauuuaaauaaaaaaguugaugauggauuucuggacauuuggacauauaaugcagaauuguugguucuacuggaaaaugaaaggacuuuggauuuucaugacucaaaugugaagaaucuguaugagaaaguaaaaaaccaauuaaagaauaaugccaaagaaauaggaaacggguguuuugaauucuaccacaaguguaacaaugaaugcauggaaagugugaaaaauggaacuuaugacuaucccaaauauuccgaggaaucaaaauuaaacagggaaaaaauugauggagugaaauuggaaucaaugggagucuaucagauucuggcgaucuacucaacugucgccaguucacuggugcuuuuggucucccugggggcaaucagcuucuggauguguucuaaugggucuuugcaguguagaauaugcauuuga

SEQ ID NO: 41648 - RNA, 1701 nt, Artificial Sequence
  derived and/or modified CDS sequence (wt) from hemagglutinin__InfluenzaA__AFO64835
augaaagcaaaacuacuaguccuguuaugugcauuuacagcuacauaugcagacacaauauguauaggcuaccaugcgaacaacucaaccgacacuguugacacaguacuugagaagaacgugacagugacacacucugucaaccuacuugaggacagucacaacggaaaacuaugucgacuaaaaggaauagccccacuacaauuggguaauugcagcguugccggauggaucuuaggaaacccagaaugcgaaucacuguuuucuaaggaaucaugguccuacauugcagaaacaccagacccugagaauggaacauguuacccaggguauuucgccgacuaugaggaacugagggagcaauugaguucaguaucaucauucgagagauucgaaauauuccccaaggaaagcucauggcccaaccacaccguaaccaaaggaguaacggcaucaugcucccauaaugggaaaagcaguuuuuacagaaauuugcuauggcugacgaagaagaauggcuuguacccaaaucugagcaaguccuauguaaacaacaaagagaaagaaguccuuguacuaugggguguucaucacccgucuaacauaggggaacaaagggccaucuaucauacagaaaaugcuuaugucucuguagugucuucacauuauagcagaagauucaccccagaaauagcaaaaagacccaaaguaagagaucaagaaggaagaaucaacuacuacuggacucugcuggaacccggggacacaauaauauuugaggcaaauggaaaucuaauagcgccaugguacgcuuucgcacugaguagaggcuuugggucaggaaucaucaccucaaacgcaucaauggaugagugugacgcuaagugucaaacaccccaaggagcuauaaacaguagucuuccuuuccagaauguacacccagucacaauaggagaguguccaaaguaugucaggaguacaaaauuaaggaugguuacaggacuaaggaacaucccauccauucaauccagagguuuguuuggagccauugccgguuucauugaagggggguggacuggaaugauagauggaugguaugguuaucaucaucagaaugaacaaggaucuggcuaugcugcggaccaaaaaagcacacaaaaugccauuaacgggauuacaaacaaggugaauucuguaaucgagaaaaugaacacucaauucacagcuguaggcaaagaauucaacaaauuagaaagaaggauggaaaacuuaaauaagaaaguugaugauggauuucuggacauuuggacauauaaugcagaauuguugguucuccuggaaaaugaaaggacuuuggauuuucaugacucaaaugugaagaaucuguaugagaaaguaaaaaaccaauugaagaauaaugccaaagaaauagggaacggguguuuugaauucuaucacaaguguaacaaugaaugcauggaaagugugaaaaauggaacuuaugacuauccaaaauauuccgaagaaucaaaguuaaacagggaaaaaauugauggagugaaauuggaaucaaugggagucuaucagauucuggcgaucuacucaacugucgccaguucacuggugcuuuuggucucccugggggcaaucaguuucuggauguguucuaaugggucuuugcaguguagaauaugcaucuga

SEQ ID NO: 41649 - RNA, 1701 nt, Artificial Sequence
  derived and/or modified CDS sequence (wt) from hemagglutinin__InfluenzaA__AFO64846
augaaagcaaaacuacuaguccuguuaugugcauuuacagcuacauaugcagacacaauauguauaggcuaccaugcgaacaacucaaccgacacuguugacacaguacuugagaagaacgugacagugacacacucugucaaccuacuugaggacagucacaacggaaaacuaugucgacuaaaaggaauagccccacuacaauuggguaauugcagcguugccggauggaucuuaggaaacccagaaugcgaaucacuguuuacuaaggaaucaugguccuacauugcagaaacuccaaacccugagaauggaacauguuacccaggguauuucgcagacuaugaagaacugagggagcaauugaguucaguaucaucauucgagagauucgaaauauuccccaaagaaagcucauggcccaaccacaccguaacuaaaggaguaacggcaucaugcucccauaaugggaaaagcaguuuuuacagaaauuugcuauggcugacggagaagaauggcuuguacccaaaucugagcaaguccuauguaaacaacaaagagaaagaaguccuuguacuaugggguguucaucacccgucuaacaugggggaccaaagggccaucuaucauacagaaaaugcuuauguuucuguagugucuucacauuauagcagaagauucaccccagaaauagcaaaaagacccaaaguaagaggucaagaaggaagaauuaacuacuacuggacucugcuggaacccggggacacaauaauauuugaggcaaauggaaaucuaauagcgccaagguaugcuuucgcacugaguagaggcuuugggucaggaaucaucaccucaaacgcaucaauggaugaaugugacgcgaagugucaaacaccccaaggagcuauaaacaguagucuuccuuuccagaacguacacccagucacaauaggagaguguccaaaguaugucaggaguacaaaauuaaggaugguuacaggacuaaggaacaucccauccauucaauccagagguuuguuuggagccauugccgguuucauugaagggggguggacuggaaugauagauggaugguaugguuaucaucaucagaaugaacaaggaucuggcuaugcugcggaccaaaaaagcacacaaaaugccauuaacgggauuacaaacaaggugaauucuguaaucgagaaaaugaacacucaauucacagcugugggcaaagaauucaacaaauuagaaagaaggauggaaaacuugaacaaaaaaguugaugauggauuucuggacauuuggacauauaaugcagaauuguugguucuacuggaaaaugaaaggacuuuggauuuucaugacucaaaugugaagaaucuguaugagaaaguaaaaagccaacugaagaauaaugccaaagaaauagggaacggguguuuugaauucuaucacaaguguaacaaugaaugcauggaaagugugaaaaauggaacuuaugacuauccaaaauauuccgaagaaucaaaguuaaacagggaaaaaauugauggagugaaauuggaaucaaugggagucuaucagauucuggcgaucuacucaacugucgccaguucacuggugcuuuuggucucccugggggcaaucagcuucuggaugugcucuaaugggucuuugcaguguagaauaugcaucuga

SEQ ID NO: 41650 - RNA, 1701 nt, Artificial Sequence
  derived and/or modified CDS sequence (wt) from hemagglutinin__InfluenzaA__AFO64857
augaaagcaaaacuacuaguccuguugugugcauuuacagcuacauaugcagacacaauauguauaggcuaccaugcgaacaacucaaccgacacuguugacacaguacuugagaagaacgugacagugacacacucugucaaccuacuugaggacagucacaacggaaaacuaugccgacuaaaaggaacagccccacuacaauuggguaauugcagcguugccggauggaucuuaggaaacccagaaugcgaaucacuguuuucuaaggaaucaugguccuacauugcagaaacaccaaacccugagaauggaacauguuacccaggguauuucgccgacuaugaggaacugagggagcaauugagcucaguaucaucauucgagagauucgaaauauuccccaaggaaagcucauggcccaaccacaccguaaccaaaggagugacggcaucaugcucccauaaugggaaaagcaguuuuuacaaaaauuugcuauggcugacggaaaagaauggcuuguacccaaaucugagcaaguccuauguaaacaacaaggagaaagaaguccuuguacuaugggguguucaucacccgucuaacauaggggaccaaagggccaucuaucauacagaaaaugcuuaugucucuguagugucuucacauuauagcagaagauucaccccagaaauagcaaaaagacccaaaguaagaggucaagaagggagaauuaacuacuacuggacucugcuggaacccggggacacaauaauauuugaggcaaauggaaaucuaauagcgccaugguacgcuuucgcacugaguagaggcuuugggucaggaaucaucaccucaaccgcaucaaugggugaaugugacgcuaagugucaaacaccccaaggagcuauaaacaguagucuuccuuuccagaauguacacccagucacaauaggagagugucccaaguaugucaggaguacaaaauuaaggaugguuacaggacuaagaaacaucccauccauucaaucuagagguuuguuuggagccauugccgguuucauugaagggggguggacuggaaugauagauggaugguaugguuaucaucaucagaaugaacaaggaucuggcuaugcugcagaccaaaaaagcacacaaaaugccauugaugggauuacaaacaaggugaauucuguaaucgagaaaaugaacacucaauucacagcuguaggcaaagaauucaacaaauuagagagaaggauggaaaacuuaaauaagaaaguugaugauggauuucuggacauuuggacauauaaugcagaguuguugguucuccuggaaaauggaaggacuuuggauuuucaugacucaaaugugaagaaucuguaugagaaaguaaaaaaccaauugaagaauaaugccaaagaaaucgggaacggguguuuugaauucuaucacaaguguaacaaugaaugcauggaaagugugaaaaauggaacuuaugacuauccaaaauauuccgaagaaucaaaguuaaacagggaaaaaauugauggagugaaauuggaaucaaugggagucuaucagauucuggcgaucuacucaacugucgccaguucacuggugcuuuuggucucccugggggcaaucaguuucuggauguguucuaaugggucuuugcaguguagaauaugcaucuga

SEQ ID NO: 41651 - RNA, 1701 nt, Artificial Sequence
  derived and/or modified CDS sequence (wt) from hemagglutinin__InfluenzaA__AFO64868
augaaaguaaaacuacuaguccuguugugugcauuuacagcuacauaugcagacacaauauguauaggcuaccaugcgaacaacucaaccgacacuguugacacaguacuugagaagaacgugacagugacacacucugucaaccuacuugaggacagucacaacggaaaacuaugccgacuaaaaggaacagccccacuacaauuggguaauugcagcguugccggauggaucuuaggaaacccagaaugcgaaucacuguuuucuaaggaaucaugguccuacauugcagaaacaccaaacccugagaauggaacauguuacccaggguguuucgccgacuaugaggaacugagggagcaauugagcucaguaucaucauucgagagauucgaaauauuccccaaggaaagcucauggcccaaccacaccguaaccaaaggagugacggcaucaugcucccauaaugggaaaagcaguuuuuacaaaaauuuacuauggcugacggaaaagaauggcuuguacccaaaccugagcaaguccuauguaaacaacaaggagaaagaaguccuuguacuaugggguguucaucacccgucuaacauaagggaccaaagggccaucuaucauacagaaaaugcuuaugucucuguagugucuucacauuauagcagaagauucaccccagaaauagcaaaaagacccaaaguaagaggucaagaagggagaauuaacuacuacuggacucugcuggaacccggggacacaauaauauuugaggcaaauggaaaucuaauagcgccaugguaugcuuucgcacugaguagaggcuuugggucaggaaucaucaccucaaacgcaucaaugggugaaugugacgcuaagugucaaacaccccaaggagcuauaaacaguagucuuccuuuccagaauguacacccagucacaauaggagagugucccaaguaugucaggaguacaaaauuaaggaugguuacaggacuaagaaacaucccauccauucaaucuagagguuuguuuggagccauugccgguuucauugaagggggguggacuggaaugauagauggaugguaugguuaucaccaucagaaugaacaaggaucuggcuaugcugcagaccaaaaaagcacacaaaaugccauugaugggauuacaaacaaggugaauucuguaauugagaaaaugaacacucaauucacagcuguaggcaaagaauucaacaaauuagagagaaggauggaaaacuuaaauaagaaaguugaugauggauuucuggacauuuggacauauaaugcagaguuguugguucuucuggaaaaugaaaggacuuuggauuuucaugacucaaaugugaagaaucuguaugagaaaguaaaaaaccaauugaagaauaaugccaaagaaaucgggaacggguguuuugaauucuaucacaaguguaacaaugaaugcauggaaagugugaaaaauggaacuuaugacuauccaaaauauuccgaagaaucaaaguuaaacagggaaaaaauugauggagugaaauuggaaucaaugggcgucuaucagauucuggcgaucuacucaacugucgccaguucacuggugcuuuuggucucccugggggcaaucaguuucuggauguguucuaaugggucuuugcaguguagaauaugcaucuga

SEQ ID NO: 41652 - RNA, 1698 nt, Artificial Sequence
  derived and/or modified CDS sequence (wt) from hemagglutinin__InfluenzaA__AFO64879
augaaagcaaaacuacuaguccuguuauguacauuuacagcuacauaugcagacacaauauguauaggcuaccaugccaacaacucaaccgacacuguugacacaguacuugagaagaaugugacagugacacacucugucaaccuacuugaggacagucacaauggaaaacuaugucuacuaaaaggaauagccccacuacaauuggguaauugcagcguugccggauggaucuuaggaaacccagaaugcgaaucacugauuuuuaaggaaucaugguccuacauuguagagacaccaaauccugagaauggaacauguuacccaggguauuucgccgacuaugaggaacugagggagcaauugaguucaguaucuucauuugagagauucgaaauauuccccaaagaaagcucauggcccaaccacaccguaaccggaguaucggcaucaugcucccauaaugggaaaagcaguuuuuacagaaauuugcuauggcugacggagaagaauggcuuguacccaaaccugagcaaguccuauguaaacaacaaagagaaagaaguccuuguacuaugggguguucaucacccgucuaacauaagggaccaaagggccaucuaucauacagaaaaugcuuaugucucuguagugucuucacauuauagcagaagauucaccccagaaauagcaaaaagacccaaaguaagaggucaggaaggaagaaucaacuacuacuggacucugcuggaacccggggacacaauaauauuugaggcaaauggaaaucuaauagcgccaugguaugcuuucgcacugaguagaggcuuuggaucaggaaucaucaccucaaaugcaccaauggaugaaugugaugcgaagugucaaacaccucagggagcuauaaacaguagucuucccuuccagaauguacacccagucacaauaggagaguguccaaaguaugucaggagugcaaaauuaaggaugguuacaggacuaaggaacaucccauccauccaauccagagguuuguuuggagccauugccgguuucauugaagggggguggacuggaaugauagaugggugguaugguuaucaucaucagaaugagcaaggaucuggcuaugcugcagaccaaaaaagcacacaaaaugcuauuaacgggaucacaaacaaggugaauucuguaauugagaaaaugaacacucaauucacagcugugggcaaagaauucaacaaauuagaaagaaggauggaaaacuuaaauaaaaaaguugaugauggauuucuagacauuuggacauauaaugcagaauuguugguucuacuggaaaaugaaaggacuuuggauuuccaugacucaaaugugaagaaucuguaugagaaaguaaaaagccaauuaaagaauaaugcuaaagaaauaggaaacggguguuuugaauucuaucacaaguguaacaaugaaugcauggaaagugugaaaaaugggacuuaugacuauccaaaauauuccgaagaaucaaaguuaaacagggagaaaauugauggagugaaauuggaaucaaugggagucuaucagauucuggcgaucuacucaacugucgccaguucacugguucuuuuggucucccugggggcaaucagcuucuggauguguuccaaugggucuuugcaguguagaauaugcaucuga

SEQ ID NO: 41653 - RNA, 1698 nt, Artificial Sequence
  derived and/or modified CDS sequence (wt) from hemagglutinin__InfluenzaA__AFO64890
augaaagcaaaacuacuaguccuguuauguacauuuacagcuacauaugcagacacaauauguauaggcuaccaugccaacaacucaaccgacacuguugacacaguacuugagaagaaugugacagugacacacucugucaaccuacuugaggacagucacaauggaaaacuaugucuacuaaaaggaauagccccacuacaauuggguaauugcagcguugccggauggaucuuaggaaacccagaaugcgaaucacugauuucuaaggaaucaugguccuacauuguagagacaccaaacccugagaauggaacauguuacccaggguauuucgccgacuaugaggaacugagggagcaauugaguucaguaucuucauuugagagauucgaaauauuccccaaagaaagcucauggcccaaccacaccguaaccggaguaucggcaucaugcucccauaaugggaaaagcaguuuuuacagaaauuugcuauggcugacggagaagaauggcuuguacccaaaccugagcaaguccuauguaaacaacaaagagaaagaaguccuuguacuaugggguguucaucacccgucuaacauaagggaccaaagggccaucuaucauacagaaaaugcuuaugucucuguagugucuucacauuauagcagaagauucaccccagaaauagcaaaaagacccaaaguaagaggucaggaaggaagaaucaacuacuacuggacucugcuggaacccggggacacaauaauauuugaggcaaauggaaaucuaauagcgccaugguaugcuuucgcacugaguagaggcuuugggucaggaaucaucaccucaaaugcaccaauggaugaaugugaugugaagugucagacaccucagggagcuauaaacaguagucuuccuuuccagaauguacacccagucacaauaggagaguguccaaaguaugucaggagugcaaaauuaaggaugguuacaggacuaaggaacaucccauccauucaauccagagguuuguuuggagccauugccgguuucauugaagggggguggacuggaaugauagaugggugguaugguuaucaucaucagaaugagcaaggaucuggcuaugcugcagaucaaaaaagcacacaaaaugccauuaacgggauuacaaacaaggugaauucuguaauugagaaaaugaacacucaauucacagcugugggcaaagaauucaacaaauuagaaagaaggauggaaaacuuaaauaaaaagguugaugauggauuucuagacauuuggacauauaaugcagaauuguugguucuacuggaaaaugaaaggacuuuggauuuccaugacucaaaugugaagaaucuguaugagaaaguaaaaagccaauuaaagaauaaugccaaagaaauaggaaacggguguuuugaauucuaucacaaguguaacaaugaaugcauggaaagugugaaaaauggaacuuaugacuauccaaaauauuccgaagaaucaaaguuaaacagggagaaaauugauggagugaaauuggaaucaaugggagucuaucagauucuggcgaucuacucaacugucgccaguucacugguucuuuuggucucccugggggcaaucagcuucuggauguguuccaaugggucuuugcaguguagaauaugcaucuga

SEQ ID NO: 41654 - RNA, 1701 nt, Artificial Sequence
  derived and/or modified CDS sequence (wt) from hemagglutinin__InfluenzaA__AFO64901
augaaagcaaaacuacuaguccuguugugugcauuuacagcuacauaugcagacacaauauguauaggcuaccaugcgaacaauucaacugacacuguugacacaguacuugagaagaacgugacagugacacacucugucaaccuacuugaggacagucacaacggaaaacuaugccgacuaaaaggaacagccccacuacaauuggguaauugcagcauugcuggauggaucuuaggaaauccagaaugcgaaucacuguuuucuaaggaaucaugguccuacauugcagaaacaccaaacccugaaaauggaacauguuacccaggguauuucgccgacuaugaggaacugagggagcaauugagcucaguaucaucauucgaaagauuugaaauauuccccaaggaaagcucauggcccaaccacaccguaaccaaaggagugacggcaucaugcucccauaauggaaaaagcagcuuuuacaaaaauuugcuauggcugacggagaagaauggcuuguacccaaaucugagcaaguccuauguaaacaacaagaaaaaagaaguccuugugcuaugggguguucaucacccgucuaacauaggggaccaaagggccauuuaucauacagaaaaugcuuaugucucuguagugucuucacauuauagcagaagauucaccccagaaauagcaaaaagacccaaaguaagaaaucaagaagggagaauuaacuacuacuggacucugcuggaacccggggacacaauaauauuugaggcaaauggaaaucuaauagcgccaugguacgcuuucgcauugaguagaggcuuugagucaggaaucaucaccucaaacgcaucaaugggugaaugugacgcuaagugucaaacaccucaaggagcuauaaacaguagucuuccuuuccagaauguacacccagucacaauaggggaguguccaaaguaugucaggaguacaaaauuaaggaugguuacaggacuaaggaacaucccauccauucaauccagagguuuguuuggagccauugccgguuucauugaaggaggguggacuggaaugauagauggaugguaugguuaucaucaucagaaugaacaaggaucuggcuaugcugcggaccaaaaaagcacacaaaaugccauuaaugggauuacaaacaaggugaauucuauaaucgagaaaaugaacacucaauucacagcuguaggcaaagaauucaacaaauuagaaagaagaauggagaacuuaaauaagaaaguugaugauggauuucuggacauuuggacauauaaugcagaauuguugguucuccuggaaaaugaaaggacuuuggauuuucaugacucaaaugugaagaaccuguaugagaaaguaaaaaaccaauugaagaauaaugccaaagaaauaggaaacggguguuuugaauucuaucacaaguguaacaaugaaugcauggaaagugugaaaaauggaacuuaugacuauccaaaauauuccaaagaaucaaaguuaaacagggaaaaaauugauggagugaaauuggaaucaaugggagucuaucagauucuggcgaucuacucaacugucgccaguucacuggugcuuuuggucucccugggggcaaucagcuucuggauguguucuaaugggucuuugcaguguagaauaugcaucuga

SEQ ID NO: 41655 - RNA, 1698 nt, Artificial Sequence
  derived and/or modified CDS sequence (wt) from hemagglutinin__InfluenzaA__AFO65016
augaaagcaaaacuacuaguccuguuauguacauuuacagcuacauaugcagacacaauauguauaggcuaccaugccaacaacucaaccgacacuguugacacaguacuugagaagaaugugacagugacacacucugucaaccuacuugaggacagucacaauggaaaacuaugucuacuaaaaggaauagccccacuacaauuagguaauugcagcguugccggauggaucuuaggaaacccagaaugcgaaucacugauuucuaaagaaucaugguccuacauuguagagacaccaaauccugagaauggaacauguuacccaggguauuucgccgacuaugaggaacugagggagcaauugaguucaguaucuucauuugagagauucgaaauauuccccaaagaaagcucauggcccaaccacaccguaaccggaguaucggcaucaugcucccauaaugggaaaagcaguuuuuacagaaauuugcuauggcugacgaagaagaauggcuuguacccaaaccugagcaaguccuauguaaacaacaaagagaaagaaguccuuguacuaugggguguucaucacccgucuaacauaggggaccaaaggaccaucuaucauacagaaaaugcuuaugucucuguagugucuucacauuauagcagaagauucaccccagaaauagcaaaaagacccaaaguaagagaucaggaaggaagaaucaacuacuacuggacucugcuggaacccggggacacaauaauauuugaggcaaauggaaaucuaauagcgccaugguaugcuuucgcacugaguagaggcuuuggaucaggaaucaucaccucaaaugcaccaauggaugaaugugaugcgaagugccaaacaccucagggagcuauaaacaguagucuuccuuuccagaauguacacccaaucacaauaggagaguguccaaaguaugucaggagugcaaaauuaaggaugguuacaggacuaaggaacaucccauccauucaauccagagguuuguuuggagccauugccgguuucauugaagggggguggacuggaaugauagaugggugguaugguuaucaucaucagaaugagcaaggaucuggcuaugcugcagaucaaaaaagcacacaaaaugccauuaacgggauuacaaacaaggugaauucuguaauugagaaaaugaacacucaauucacagcugugggcaaagaauucaacaacuuagaaagaaggauggaaaacuuaaauaaaaagguugaugauggauuucuggacauuuggacauauaaugcagaauuguugguucuacuggaaaaugaaaggacuuuggauuuccaugacucaaaugugaagaaucuguaugagaaaguaaaaagccaauuaaagaauaaugccaaagaaauaggaaacggguguuuugaauucuaucacaaguguaacaaugaaugcauggaaagugugaaaaauggaacuuaugacuauccaaaauauuccgaagaaucaaaguuaaacagggagaaaauugauggagugaaauuggaaucaaugggagucuaucagauucuggcgaucuacucaacugucgccaguucacugguucuuuuggucucccugggggcaaucagcuucuggauguguuccaaugggucuuugcaguguagaauaugcaucuga

SEQ ID NO: 41656 - RNA, 1698 nt, Artificial Sequence; identical to SEQ ID NO: 34127
  derived and/or modified CDS sequence (wt) from hemagglutinin__InfluenzaA__AFO65027

SEQ ID NO: 41657 - RNA, 1698 nt, Artificial Sequence
  derived and/or modified CDS sequence (wt) from hemagglutinin__InfluenzaA__AFO65038
augaaagcaaaacuacugguccuguuauguacauuuacagcuacauacgcagacacaauauguauaggcuaccaugccaacaacucaaccgacacuguugacacaguacuugagaagaaugugacagugacacacucugucaaucuacuugaggacagucacaauggaaaacuaugucuacuaaaaggaauagccccacuacaauuggguaauugcagcguugccggauggaucuuaggaaacccagaaugcgaauuacugauuuccaaggaaucaugguccuacauuguagaaacaccaaauccugagaauggaacauguuacccaggguauuucgccgacuaugaggaacugagggagcaauugaguucaguaucuucauuugagagauucgaaauauuccccaaagaaagcucauggcccaaccacaccguaaccggaguaucagcaucaugcucccauaaugggaaaagcaguuuuuacagaaauuugcuauggcugacggggaagaaugguuuguacccaaaccugagcauguccuauguaaacaacaaagagaaagaaguccuugugcuaugggguguucaucacccaccuaacauagggaaccaaagggcccucuaccauacagaaaaugcuuaugucucuguagugucuucacauuauagcagaagauucaccccagaaauagccaaaagacccaaaguaagagaucaggaaggaagaaucaacuacuacuggacucugcuggaacccggggacacaauaauauuugaggcaaauggaaaucuaauagcgccaugguaugcuuucgcacugaguagaggcuuuggaucaggaaucaucaccucaaaugcaccaauggaugaaugugaugcgaagugucaaacaccucagggagcuauaaacaguagucuuccuuuccagaauguacacccaguuacaauaggagaguguccaaaguaugucaggagugcaaaauuaaggaugguuacaggacuaaggaacaucccauccauucaauccagagguuuguuuggagccauugccgguuucauugaagggggguggacuggaaugguagaugggugguaugguuaucaucaucagaaugagcaaggaucuggcuaugcugcagaucaaaaaagcacacaaaaugccauuaacgggauuacaaacaaggugaauucuguaauugagaaaaugaacacucaauucacagcugugggcaaagaauucaacaaauuagaaagaaggauggaaaacuuaaauaaaaaaguugaugauggguuucuagacauuuggacauauaaugcagaauuguugguucuacuggaaaaugaaaggacuuuggauuuccaugacuccaaugugaagaaucuguaugagaaaguaaaaagccaauuaaagaauaaugccaaagaaauaggaaacggguguuuugaauucuaucacaaguguaacaaugaaugcauggaaagugugaaaaauggaacuuaugacuauccaaaauauuccgaagaaucaaaguuaaacagggagaaaauugauggaguaaaauuggaaucaaugggagucuaucagauucuggcgaucuacucaacugucgccaguucccugguucuuuuggucucccugggggcaaucagcuucuggauguguuccaaugggucuuugcaguguagaauaugcaucuga

SEQ ID NO: 41658 - RNA, 1698 nt, Artificial Sequence
  derived and/or modified CDS sequence (wt) from hemagglutinin__InfluenzaA__AFO66136
augaaaguaaaacuacugguccuguuauguacauuuacagcuacauaugcagacacaauauguauaggguaccaugccaacaacucaaccgacacuguugacacaguacuugagaagaaugugacagugacacacucugucaaccuacuugaggacagucacaauggaaaacuaugucuacuaaaaggaauagccccacuacaauuggguaauugcagcguugccggauggaucuuaggaaacccagaaugcgaauuacugauuuccaaggaaucaugguccuacauuguagaaacaccaaauccugagaauggaacauguuacccaggguauuucgccgacuaugaggaacugagggagcaauugaguucaguaucuucauuugagagauucgaaauauuccccaaagaaagcucauggcccaaccacaccguaaccggaguaucagcaucaugcucccauaaugggaaaagcaguuuuuacagaaauuugcuauggcugacggggaagaaugguuuguacccaaaccugagcaaguccuaugcaaacaacaaagagaaagaaguccuuguacuaugggguguucaucacccgccuaacauagggaaccaaagggcccucuaucauacagaaaaugcuuaugucucuguagugucuucacauuauagcagaagauucaccccagaaauagccaaaagacccaaaguaagagaucaggaaggaagaaucaacuacuacuggacucugcuggaacccggggauacaauaauauuugaggcaaauggaaaucuaauagcgccacgguaugcuuucgcacugaguagaggauuuggaucaggaaucaucaccucaaaugcaccaauggaugaaugugaugcgaagugucaaacaccucagggagcuauaaacagcagucuuccuuuccagaacguacacccagucacaauaggagaguguccaaaguaugucaggagugcaaaauuaaggaugguuacaggacuaaggaacaucccauccauucaauccagagguuuguuuggagccauugccgguuucauugaagggggguggacuggaaugguagaugggugguaugguuaucaucaucagaaugagcaaggaucuggcuaugccgcagaucaaaaaagcacacaaaaugccauuaacgggauuacgaacaaggugaauucuguaauugagaaaaugaacacucaauucacagcugugggcaaagaauucaacaaauuggaaagaaggauggaaaacuuaaauaaaaaaguugaugauggguuucuagacauuuggacauauaaugcagaauuguugguucuacuggaaaaugaaaggacuuuggauuuccaugacuccaaugugaagaaucuauaugagaaaguaaaaagccaauuaaagaauaaugccaaagaaauaggaaacggguguuuugaauucuaucacaaguguaacaaugaaugcauggagagugugaaaaauggaacuuaugacuauccaaaauauuccgaagaaucaaaguuaaacagggagaaaauugauggagugaaauuggaaucaaugggagucuaucagauucuggcgaucuacucaacugucgccaguucccugguucuuuuggucucccugggggcaaucagcuucuggauguguuccaaugggucuuugcaguguagaauaugcaucuga

SEQ ID NO: 41659 - RNA, 1701 nt, Artificial Sequence
  derived and/or modified CDS sequence (wt) from hemagglutinin__InfluenzaA__AFO66147
augaaagcaaaacuacuaguucuguugugugcauuuacaacuacauaugcagacacaauauguauaggcuaccaugcgaacaacucaacugacacuguugacacaguacuugagaagaacgugacagugacacacucugucaaccuacuugaggacagucacaacggaaaacuaugccgacuaaaaggaacagccccacuacaauuggguaauugcagcauugccggauggaucuuaggaaauccagaaugcgaaucacuguuuucuaaggaaucaugguccuacauugcagaaacaccaaacccuaaaaauggaacauguuacccaggguauuucgccgacuaugaggaacugagggagcaauugagcucaguaucaucauucgagagauuugaaauauuccccaaggauagcucauggcccaaccacacuguaaccaaaggagugacggcaucaugcucccauaaugggaaaagcagcuuuuacaaaaauuugcuauggcugacggggaagaauggcuuguacccaaaucugagcaaguccuauguaaacaaaaagggaaaagaaguccuugugcuaugggguguucaucacccgucuaacaugggggaccaacgggccaucuaucauaaagaaaaugcuuauguuucuguguugucuucacauuauagcagaagauucaccccagaaauagcaaaaagacccaaaguaagagaucaagaagggagaauuaacuacuacuggacucugcuggaaccuggggacacaauaauauuugaggcaaauggaaaucuaauagcgccgugguacgcuuucgcacugaguagaggcuuugggucaggaaucaucaucucaaacgcaucaaugggugaaugugacgcuaagugucaaacaccccaaggagcuauaaacaguagucuccccuuccagaauguacacccagucacaauaggagaguguccaaaguaugucaggaguacaaaauuaaggaugguuacaggucuaaggaacgucccauccauucaauccagaggguuguuuggagccauugccgguuucauugaaggaggguggacuggaaugauagauggaugguaugguuaucaucaucaaaaugaacaaggaucuggcuaugcugcggaccaaaaaagcacacaaaaugccauuaaugggauuacaaacaaggugaauucuauaaucgagaaaaugaacacucaauucacagcuguaggcaaagaauucaacaaauuagaaagaaggauggaaaacuuaaauaagaaaguugaugauggauuucuggacauuuggacauauaaugcagaauuguuaguucuccuggaaaaugaaaggacuuuggauuuucaugacucaaaugugaagaaccuguaugagaaaguaaaaaaccaauugaagaauaaugccaaagaaauagggaacggguguuuugaauucuaucacaaguguaacaaugaaugcauggaaagugugaaaaauggaacuuaugacuauccaaaauauuccaaagaaucaaaguuaaacagggaaaaaauugauggagugaaauuggaaucaaugggagucuaucagauucuggcgaucuacucaacugucgccaguucgcuggugcuuuuggucucccugggggcaaucagcuucuggauguguucuaaugggucuuugcaguguagaauaugcaucuga

SEQ ID NO: 41660 - RNA, 1698 nt, Artificial Sequence
  derived and/or modified CDS sequence (wt) from hemagglutinin__InfluenzaA__AFO66158
augaaagcaaaacuacugguccuguuauguacauuuacagcuacauacgcagacacaauauguauaggcuaccaugccaacaacucaaccgauacuguugacacaguacuugagaagaaugugacagugacacacucugucaaccuacuugaggacagucacaauggaaaacuaugucuacuaaaaggaauagccccacuacaauuggguaauugcagcguugccggauggaucuuaggaaacccagaaugcgaauuacugauuuccaagggaucaugguccuacauuguagaaacaccaaaucccgagaauggaacauguuacccaggguauuucgccgacuaugaggaacugagggagcaauugaguucaguaucuucauuugagagauucgaaauauuccccaaaggaagcucauggcccaaccacaccgugaccggaguaucagcaucaugcucccauaaugggaaaagcaguuuuuacagaaauuugcuauggcugacggggaagaaugguuuguacccaaaccugagcauguccuauguaaacaacaaagagaaagaaguccuugugcuaugggguguucaucacccaccuaacauagggaaccaaagggcccucuaccauacagaaaaugcuuaugucucuguagugucuucacauuauagcagaagauucaccccagaaauagccaaaagacccaaaguaagagaucaggaaggaagaaucaacuacuacuggacucugcuggaacccggggacacaauaauauuugaggcaaauggaaaucuaauagcaccaugguaugcuuuugcacugaguagaggcuuuggaucaggaaucaucaccucaaaugcaccaaugggugaaugugaugcgaagugucaaacaccucagggagcuauaaacaguagucuuccuuuucagaauguacacccaguuacaauaggagaguguccaaaguaugucaggagugcaaaauuaaggaugguuacaggacuaaggaacaucccauccauucaauccagagguuuguuuggagccauugccgguuucauugaagggggguggacuggaaugguagaugggugguaugguuaucaucaucagaaugagcaaggaucuggcuaugcugcagaucaaaaaagcacacaaaaugccauuaacgggauuacaaacaaggugaauucuguaauugagaaaaugaacacucaauuuacagcugugggcaaagaauucaacaaauuagaaagaaggauggaaaacuuaaauaaaaaaguugaugauggguuucuagacauuuggacauauaaugcagaauuguugguucuacuggaaaaugaaagaacuuuggauuuccaugacuccaaugugaagaaucuguaugagaaaguaaaaagccaauuaaagaauaaugccaaagaaauaggaaacggguguuuugaauucuaucacaaguguaacaaugaaugcauggaaagugugaaaaauggaacuuaugacuauccaaaauauucugaagaaucaaaguuaaacagggagaaaauugauggaguaaaauuggaaucaaugggagucuaucagauucuggcgaucuacucaacugucgccaguuccuugguucuuuuggucucccugggggcaaucagcuucuggauguguuccaaugggucuuugcaguguagaauaugcaucuga

SEQ ID NO: 41661 - RNA, 1698 nt, Artificial Sequence
  derived and/or modified CDS sequence (wt) from hemagglutinin__InfluenzaA__AFO66169
augaaaguaaaacuacugguccuguuaugcacauuuacagcuacauaugcagacacaauauguauaggcuaccaugccaacaacucaaccgacacuguugacacaguacuugagaagaaugugacagugacacacucugucaaccugcuugaggacagucacaauggaaaacuaugucuauuaaaaggaauagccccacuacaauuggguaauugcagcguugccggauggaucuuaggaaacccagaaugcgaguuacugauuuccaaggaaucaugguccuacauuguagaaacaucaaauccugagaauggaacauguuacccaggguauuucaccgacuaugaggaacugagggagcaauugaguucaguaucuucauuugagagguucgaaauauuccccaaagaaagcucauggcccaaccacaccguaaccggaguaucagcaucaugcucccauaaugggaaaagcaguuuuuacaaaaauuugcuauggcugacggggaagaaugguuuguacccaaaccugagcaaguccuaugcaaacaacaaagagaaagaaguccuuguacuaugggguguucaucacccgccuaacauaggugaccaaagggcccucuaucauacagaaaaugcuuaugucucuguagugucuucacauuauagcagaagauucaccccagaaauagccaaaagacccaaaguaagagaucaagaaggaagaaucaacuacuacuggacucugcuugaacccggggauacaauaauauuugaggcaaauggaaaucuaauagcgccaagauaugcuuucgcacugaguagaggcuuuggaucaggaaucaucaccucaaaugcaccaauggaugaaugugaugcgaagugccaaacaccucauggagcuauaaacagcagucuuccuuuccagaauguacacccagucacaauaggugaguguccaaaguaugucaggagugcaaaauuaaggaugguuacaggacuaaggaacaucccauccauucaauccagagguuuguuuggagccauugccgguuucauugaagggggguggacuggaaugguagaugguugguaugguuaucaucaucagaaugagcaaggaucuggcuaugcugcagaucaaaaaagcacacaaaaugccauuaaugggauuacaaacaaggugaauucuguaauugagaaaaugaacacucaauucacagcugugggcaaagaauucaacaaauuggaaagaaggauggaaaacuuaaauaaaaaaguugaugauggguuuauagacauuuggacauauaaugcagaauuguugguucuacuggaaaaugaaaggacuuuggauuuccaugacuccaaugugaagaaucuguaugagaaaguaaaaagccaauuaaagaauaaugccaaagaaauaggaaauggguguuuugaauucuaucacaaguguaacgaugaaugcauggagaguguaaaaaauggaacuuaugacuauccaaaguauuccgaagaaucaaaguuaaacagggagaaaauugauggagugaaauuggaaucaaugggagucuaucagauucuggcgaucuacucaacagucgccaguucucugguucuuuuggucucccugggggcaaucagcuucuggauguguuccaaugggucuuugcaguguagaauaugcaucuaa

SEQ ID NO: 41662 - RNA, 1698 nt, Artificial Sequence
  derived and/or modified CDS sequence (wt) from hemagglutinin__InfluenzaA__AFO66180
augaaagcaaaacuacugguccuguuauguacauuuacagcuacauacgcagacacaauauguauaggcuaccaugccaacaacucaaccgacacuguugacacaguacuugagaagaaugugacagugacacacucugucaaccuacuugaggacagucacaauggaaaacuaugucuacuaaaaggaauagccccacuacaauuggguaauugcagcguugccggauggaucuuaggaaacccagaaugcgaauuacugauuuccaaggaaucaugguccuacauuguagaaacaccaaaucccgagaauggaacauguuacccaggguauuucgccgacuaugaggaacugagggagcaauugaguucaguaucuucauuugagagauucgaaauauuccccaaaggaagcucauggcccaaccacaccgugaccggaguaucagcaucaugcucccauaaugggaaaagcaguuuuuacagaaauuugcuauggcugacggggaagaaugguuuguacccaaaccugagcauguccuauguaaacaacaaagagaaagaaguccuugugcuaugggguguucaucacccaccuaacauaggggaccaaagggcccucuaccauacagaaaaugcuuaugucucuguagugucuucacauuauagcagaagauucaccccagaaauagccaaaagacccaaaguaagaaaucaggaaggaagaaucaacuacuacuggacucugcuggaacccggggacacaauaauauuugaggcaaauggaaaucuaauagcgccaugguaugcuuucgcacugaguagaggcuuuggaucaggaaucaucaccucaaaugcaccaaugggugaaugugaugcgaagugucaaacaccucagggagcuauaaacaguagucuuccuuuccagaauguacacccaguuacaauaggagaguguccaaaguaugucaggagugcaaaauuaaggaugguuacaggacuaaggaacaucccauccauucaauccagagguuuguuuggagccauugccgguuucauugaagggggguggacuggaaugguagaugggugguaugguuaucaucaucagaaugagcaaggaucuggcuaugcugcagaucaaaaaagcacacaaaaugccauuaacgggauuacaaacaaggugaauucuguaauugagaaaaugaacacucaauucacagcugugggcaaagaauucaacaaauuagaaagaaggauggaaaacuuaaauaaaaaaguugaugauggguuucuagacauuuggacauauaaugcagaauuguugguucuacuggaaaaugaaaggacuuuggauuuccaugacuccaaugugaagaaucuguaugagaaaguaaaaagccaauuaaagaauaaugccaaagaaauaggaaacggguguuuugaauucuaucacaaguguaacaaugaaugcauggaaagugugaaaaauggaacuuaugacuauccaaaauauuccgaagaaucaaaguuaaacagggagaaaauugaugggguaaaauuggaaucaaugggagucuaucagauucuggcgaucuacucaacugucgccaguucccugguucuuuuggucucccugggggcaaucagcuucuggauguguuccaaugggucuuugcaguguagaauaugcaucuga

SEQ ID NO: 41663 - RNA, 1698 nt, Artificial Sequence
  derived and/or modified CDS sequence (wt) from hemagglutinin__InfluenzaA__AFO66191
augaaagcaaaacuacugguccuguuauguacauuuacagcuacauacgcagacacaauauguauaggcuaccaugccaacaacucaaccgacacuguugacacaguacuugagaagaaugugacagugacacacucugucaaccuacuugaggacagucacaauggaaaacuaugucuacuaaaaggaauagccccacuacaauuggguaauugcagcguugccggauggaucuuaggaaacccagaaugcgaauuacugauuuccaaggaaucaugguccuacauuguagaaacaccaaaucccgagaauggaacauguuacccaggguauuucgccgacuaugaggaacugagggagcaauugaguucaguaucuucauuugagagauucgaaauauuccccaaaggaagcucauggcccaaccacaccguaaccggaguaucagcaucaugcucccauaaugggaaaagcaguuuuuacagaaauuugcuauggcugacggggaagaaugguuuguacccaaaccugagcauguccuauguaaacaacaaagagaaagaaguccuugugcuaugggguguucaucacccaccuaacauagggaaccaaagggcccucuaccauacagaaaaugcuuaugucucuguagugucuucacauuauagcagaagauucaccccagaaauagccaaaagacccaaaguaagagaucaggaaggaagaaucaacuacuacuggacucugcuggaacccggggacacaauaauauuugaggcaaauggaaaucuaauagcgccaugguaugcuuucgcacugaguagaggcuuuggaucaggaaucaucaccucaaaugcaccaauggaugaaugugaugcgaagugucaaacaccucagggagcuauaaacaguagucuuccuuuccagaauguacacccaguuacaauaggagaguguccaaaguaugucaggagugcaaaauuaaggaugguuacaggacuaaggaacaucccauccauucaauccagagguuuguuuggagccauugccgguuucauugaagggggguggacuggaaugguagaugggugguaugguuaucaucaucagaaugagcaaggaucuggcuaugcugcagaucaaaaaagcacacaaaaugccauuaacgggauuacaaacaaggugaauucuguaauugagaaaaugaacacucaauucacagcugugggcaaagaauucaacaaauuagaaagaaggauggaaaacuuaaauaaaaaaguugaugauggguuucuagacauuuggacauauaaugcagaauuguugguucuacuggaaaaugaaaggacuuuggauuuccaugacuccaaugugaagaaucuguaugagaaaguaaaaagccaauuaaagaauaaugccaaagaaauaggaaacggguguuuugaauucuaucacaaguguaacaaugaaugcauggaaagugugaaaaauggaacuuaugacuauccaaaauauuccgaagaaucaaaguuaaacagggagaaaauugauggaguaaaauuggaaucaaugggagucuaucagauucuggcgaucuacucaacugucgccaguucccugguucuuuuggucucccugggggcaaucagcuucuggauguguuccaaugggucuuugcaguguagaauaugcaucuga

SEQ ID NO: 41664 - RNA, 1698 nt, Artificial Sequence
  derived and/or modified CDS sequence (wt) from hemagglutinin__InfluenzaA__AFO66202
augaaaguaaaacuacugauccuguuauguacauuuacagcuacauaugcagacacaauauguauaggcuaccaugccaacaacucaaccgacacuguugacacaguacuugagaagaaugugacagugacacacucugucaaccuacuugaggacagucacaauggaaaacuaugucuacuaaaaggaauagccccccuacaauuggguaauugcagcguugccggauggaucuuaggaaacccagaaugcgaauuacugauuuccaaggaaucaugguccuacauuguagaaacaccaaauccugagaauggaacauguuacccaggguauuucgccgacuaugaggagcuaagggagcaauugaguucaguaucuucauuugagagauucgaaauauuccccaaagaaagcucauggcccaaccacaccguaaccggaguaucagcaucaugcucccauaaugggaaaagcaguuuuuacagaaauuugcuauggcugacggggaagaaugguuuguacccaaaccugagcaaguccuaugcaaacaacaaagagaaagaaguccuuauacuaugggguguucaucacccgccuaacauaggggaccaaaggacccucuaucauacagaaaaugcuuaugucucuguagugucuucacauuauagcagaagauucaccccagaaauaaccaaaaggcccaaaguaagagaucaggaaggaagaaucaacuacuacuggacucugcuggaacccggggauacaauaauauuugaggcaaauggaaaucuaauagcgccaugguaugcuuucgcacugaguagaggcuuuggaucaggaaucaucaccucaaaugcaccaauggaugaaugugaugcgaagugucaaacaccucagggagcuauaaacagcagucuuccuuuccagaauguacacccagucacaauaggagaguguccaaaguaugucaggagugcaaaauuaaggaugguuacaggacuaaggaacaucccauccauucaauccagagguuuguuuggagccauugccgguuucauugaagggggguggacuggaaugguagaugggugguaugguuaucaucaucagaaugagcaaggaucuggcuaugcugcagaucaaaaaagcacacaaaacgccauuaacgggauuacaaacaaggugaauucuguaauugagaaaaugaacacucaauucacagcugugggcaaagaauucaacaaauuggaaagaaggauggaaaacuuaaauaaaaaaguugaugauggauuucuagacauuuggacauauaaugcagaauuguugguucuacuggaaaaugaaaggacuuuggauuuccacgacuccaaugugaagaaucuguaugagaaaguaaaaagccaauuaaagaauaaugccaaagaaauaggaaauggguguuuugaauucuaucacaaguguaacaaugaaugcauggagagugugaaaaauggaacuuaugacuauccaaaauauuccgaagaaucaaaguuaaacagggaaaaaauugauggagugaaauuggaaucaaugggagucuaucagauucuggcgaucuacucaacugucgccaguucccugguucuuuuggucucccugggggcaaucagcuucuggauguguuccaaugggucuuugcaguguagaauaugcaucuga

SEQ ID NO: 41665 - RNA, 1698 nt, Artificial Sequence
  derived and/or modified CDS sequence (wt) from hemagglutinin__InfluenzaA__AFO66213
augaaaguaaaacuacugguccuguuauguacauuuacagcuacauaugcagacacaauauguauaggcuaccaugccaacaacucaaccgacacuguugacacaguacuugagaaaaaugugacagugacacacucugucaacuuacuugaggacagucacaauggaaaacuaugucuacuaaaaggaauagccccacuacaauuggguaauugcagcguugccggauggaucuuaggaaacccagaaugcgaauuacugauuuccaaggaaucaugguccuacauuguagaaacaccaaauccugagaauggaacauguuacccaggguauuucgccgacuaugaggaacugagggagcaauugaguucaguaucuucauuugagagguucgaaauauuccccaaagaaagcucauggcccaaccacaccguaaccggaguaucagcaucaugcucccauaaugggaaaagcaguuuuuacagaaauuugcuauggcugacggggaagaaugguuuguacccaaaccugagcaaguccuaugcaaacaacaaaaagaaagaaguccuuguacuaugggguguucaucacccgccuaacauagggaaccaaagggcccucuaucauacagaaaaugcuuaugucucuguagugucuucacauuauagcagaagauucaccccagaaauagccaaaagacccaaaguaagagaucaggaaggaagaaucaacuacuacuggacucugcuggaacccggggauacaauaauauuugaggcaaauggaaaucuaauagcgccaagguaugcuuucgcacugaguagaggcuuuggaucaggaaucaucaccucaaaugcaccaauggaugaaugugaugcgaagugucaaacaccucagggagcuauaaacagcagucuuccuuuccagaauguacacccagucacaauaggagaguguccaaaguaugucaggagugcaaaauuaaggaugguuacaggacuaaggaacaucccauccauucaauccagagguuuguuuggagccauugccgguuucauugaagggggguggacuggaaugguagaugguugguaugguuaccaucaucagaaugagcaaggaucuggcuaugcugcagaucaaaaaagcacacaaaaugccauuaacgggauuacaaacaaggugaauucuguaauugagaaaaugaacacucaauucacagcugugggcaaagaauucaacaaauuggaaagaaggauggaaaacuuaaauaaaaaaguugaugauggguuucuagauauuuggacauauaaugcagaauuguugguucuacuggaaaaugaaaggacuuuggauuuccaugacuccaaugugaagaaucuguaugagaaaguaaaaagccaauuaaagaauaaugccaaagaaauaggaaacggguguuuugaauucuaucacaaguguaacgaugaaugcauggagaguguaaaaaauggaacuuaugacuauccgaaauauuccgaagaaucaaaguuaaacagggagaaaauugauggagugaaauuggaaucaaugggagucuaucagauucuggcgaucuacucaacagucgccaguucccugguucuuuuggucucccugggggcaaucagcuucuggauguguuccaaugggucuuugcaguguagaauaugcaucuga

SEQ ID NO: 41666 - RNA, 1698 nt, Artificial Sequence
  derived and/or modified CDS sequence (wt) from hemagglutinin__InfluenzaA__AFO66224
augaaaguaaaacuacugguucuguuauguacauuuacagcuacauaugcagacacaauauguauaggcuaccaugccaacaacucaaccgacacuguugacacaguacuugagaagaaugugacagugacacacucugucaaccuacuugaggacagucacaauggaaaacuaugucuacuaaaaggaauagccccacuacaauuggguaauugcagcguugccggauggaucuuaggaaacccagaaugcgaauuacugauuuccaaggaaucaugguccuacauuguagaaacaccaaauccugagaauggaacauguuacccaggguauuucgccgacuaugaggaacugagggagcaauugaguucaguaucuucauuugagagguucgaaauauuccccaaagagagcucauggcccaaccacaccguaaccggaguaucagcaucaugcucccauaacgggaaaagcaguuuuuacagaaauuugcuauggcugacggggaagaaugguuuguacccaaaccugagcaaguccuaugcaaacaacaaagagaaagaaguccuuguacuaugggguguucaucacccgccuaacauagggaaccaaagggcccucuaucauacagaaaaugcuuaugucucuguagugucuucacauuauagcagaagauucaccccagaaauagccaaaagacccaaggugagagaucaggaaggaagaaucaacuacuacuggacucugcuggaacccggggauacaauaauauuugaggcaaauggaaaucuaauagcgccaagguaugcuuucgcacugaguagaggcuuuggaucaggaaucaucaccucaaaugcaccaauggaugaaugugaugcgaagugucaaacaccucagggagcuauaaacagcagucuuccuuuccagaauguacacccagucacaauaggagaguguccaaaguaugucaggagugcaaaauuaaggaugguuacaggacuaaggaacaucccauccauucaauccagagguuuguuuggagccauugccgguuucauugaggggggguggacuggaaugguagaugguugguaugguuaucaucaucagaaugagcaaggaucuggguaugcugcagaucaaaaaagcacacaaaaugccauuaacgggauuacaaacaaggugaauucuguaauugagaaaaugaacacucaauucacagcugugggcaaagaauucaacaaauuggaaagaaggauggaaaacuuaaauaaaaaaguugaugauggguuucuagacauuuggacauauaaugcagaauuguugguucuacuggaaaaugaaaggacuuuggauuuccaugacuccaacgugaagaaucuguaugagaaaguaaaaagccaauuaaagaauaaugccaaagaaauaggaaacggguguuuugaauucuaucacaaguguaacgaugaaugcauggagagugugaaaaauggaacuuaugacuauccaaaauauuccgaagaaucaaaguuaaacagggagaaaauugauggagugaaauuggaaucaaugggagucuaucagauucuggcgaucuacucaacagucgccaguucccugguucuuuuggucucccugggggcaaucagcuucuggauguguuccaaugggucuuugcaguguagaauaugcaucuaa

SEQ ID NO: 41667 - RNA, 1698 nt, Artificial Sequence
  derived and/or modified CDS sequence (wt) from hemagglutinin__InfluenzaA__AFO66235
augaaaguaaaacuacugguccuguuaugcacauuuacagcuacauaugcagacacaauauguauaggcuaccaugccaacaacucaaccgacacuguugacacaguacuugaaaagaaugugacagugacacacucugucaaccugcuugaggacagucacaauggaaaacuaugucuauuaaaaggaauagccccacuacaauuggguaauugcagcguugccggguggaucuuaggaaacccagaaugcgaauuacugauuuccaaggaaucaugguccuacauuguagaaaaaccaaauccugagaauggaacauguuacccagggcauuucgccgacuaugaggaacugagggagcaauugaguucaguaucuucauuugagagguucgaaauauuccccaaagaaagcucauggcccaaccacaccguaaccggaguaucagcaucaugcucccauaaugggaaaagcaguuuuuacaaaaauuugcuauggcugacggggaagaaugguuuguacccaaaccugagcaaguccuaugcaaacaacaaagagaaagaaguccuuguacuaugggguguucaucacccgccaaacauagguguccaaagggcccucuaucauacagaaaaugcuuaugucucuguagugucuucacauuauagcagaaaauucaccccagaaauagccaaaagacccaaaguaagagaucaagaaggaagaaucaacuacuacuggacucugcuugaacccggggauacaauaauauuugaggcaaauggaaaucuaauagcgccaagauaugcuuucgcacugaguagaggcuuuggaucaggaaucaucaacucaaaugcaccaauggaugaaugugaugcgaagugccaaacaccucagggagcuauaaacagcagucuuccuuuccagaauguacacccagucacaauaggagaguguccaaaguaugucaggagugcaaaauuaaggaugguuacaggacuaaggaacaucccauccauucaauccagagguuuguuuggagccauugccgguuucauugaagggggguggacuggaaugguagaugguugguaugguuaucaucaucagaaugagcaaggaucuggcuaugcugcagaucaaaaaagcacacaaaaugccauuaaugggauuacaaacaaggugaauucuguaauugagaaaaugaacacucaauucacagcugugggcaaagaauucaacaaauuggaaagaaggauggaaaacuuaaauaaaaaaguugaugauggguuuauagacauuuggacauauaaugcagaacuguugguucuacuggaaaaugaaaggacuuuggauuuccaugacuccaaugugaagaaucuguaugagaaaguaaaaagccaauuaaagaauaaugccaaagaaauaggaaauggguguuuugaauucuaucacaaguguaacgaugaaugcauggagaguguaaaaaauggaacuuaugacuauccaaaauauuccgaagaaucaaaguuaaacagggagaaaauugauggagugaaauuggaaucaaugggagucuaucagauucuggcgaucuacucaacagucgccaguucucugguucuuuuggucucccugggggcaaucagcuucuggauguguuccaaugggucuuugcaguguagaauaugcaucuaa

SEQ ID NO: 41668 - RNA, 1698 nt, Artificial Sequence
  derived and/or modified CDS sequence (wt) from hemagglutinin__InfluenzaA__AFO66246
augaaaguaaaacuacugguccuguuaugcacauuuacagcuacauaugcagacacaauauguauaggcuaccaugccaacaacucaaccgacacuguugacacaguacuugaaaagaaugugacagugacacacucugucaaccugcuugaggacagucacaauggaaaacuaugucuauuaaaaggaauagccccacuacaauuggguaauugcagcguugccggguggaucuuaggaaacccagaaugcgaauuacugauuuccaaggaaucaugguccuacauuguagaaaaaccaaauccugagaauggaacauguuacccagggcauuucgccgacuaugaggaacugagggagcaauugaguucaguaucuucauuugagagguucgaaauauuccccaaagaaagcucauggcccaaccacaccguaaccggaguaucagcaucaugcucccauaaugggaaaagcaguuuuuacaaaaauuugcuauggcugacggggaagaaugguuuguacccaaaccugagcaaguccuaugcaaacaacaaagagaaagaaguccuuguacuaugggguguucaucacccgccaaacauagguaaccaaagggcccucuaucauacagaaaaugcuuaugucucuguagugucuucacauuauagcagaaaauucaccccagaaauagccaaaagacccaaaguaagagaucaagaaggaagaaucaacuacuacuggacucugcuugaacccggggauacaauaauauuugaggcaaauggaaaucuaauagcgccaagauaugcuuucgcacugaguagaggcuuuggaucaggaaucaucaacucaaaugcaccaauggaugaaugugaugcggagugccaaacaccucagggagcuauaaacagcagucuuccuuuccagaauguacacccagucacaauaggagaguguccaaaguaugucaggagugcaaaauuaaggaugguuacaggacuaaggaacaucccauccauucaauccagagguuuguuuggagccauugccgguuucauugaagggggguggacuggaaugguagaugguugguaugguuaucaucaucagaaugagcaaggaucuggcuaugcugcagaucaaaaaagcacacaaaaugccauuaaugggauuacaaacaaggugaauucuguaauugagaaaaugaacacucaauucacagcugugggcaaagaauucaacaaauuggaaagaaggauggaaaacuuaaauaaaaaaguugaugauggguuuauagacauuuggacauauaaugcagaacuguugguucuacuggaaaaugaaaggacuuuggauuuccaugacuccaaugugaagaaucuguaugagaaaguaaaaagccaauuaaagaauaaugccaaagaaauaggaaauggguguuuugaauucuaucacaaguguaacgaugaaugcauggagaguguaaaaaauggaacuuaugacuauccaaaauauuccgaagaaucaaaguuaaacagggagaaaauugauggagugaaauuggaaucaaugggagucuaucagauucuggcgaucuacucaacagucgccaguucucugguucuuuuggucucccugggggcaaucagcuucuggauguguuccaaugggucuuugcaguguagaauaugcaucuaa

SEQ ID NO: 41669 - RNA, 1701 nt, Artificial Sequence
  derived and/or modified CDS sequence (wt) from hemagglutinin__InfluenzaA__AFP33324
augaaagcaaaacuacuaguucuguuguguacauuuacagcuacauaugcagacacaauauguauaggcuaccaugcgaacaacucaacugacacuguugacacaguacuugagaagaacgugacagugacacacucugucaaccuacuugaggacagucacaacggaaaacuaugccgacuaaaaggaacagccccacuacaauuggguaauugcagcauugccggauggaucuuaggaaauccagaaugcgaaucacuguuuucuaaggaaucauggucuuacauugcagaaacaccaaacccuaaaaauggaacauguuacccaggguauuucgccgacuaugaggaacugagggagcaauugagcucaguaucaucauucgagagauuugaaauauuccccaaggauagcucauggcccaaccacacuguaaccaaaggagugacggcaucaugcucccauaaugggaaaagcagcuuuuacaaaaauuugcuauggcugacggggaagaauggcuuguacccaaaucugagcaaguccuauguaaacaaaaagggaaaagaaguccuugugcuaugggguguucaucacccgucuaacaugggggaccaacgggccaucuaucauaaagaaaaugcuuauguuucuguguugucuucacauuauagcagaagauucaccccagaaauagcaaaaagaccaaaaguaagagaucaagaagggagaauuaacuacuacuggacucugcuggaacccggggacacaauaauauuugaggcaaauggaaaucuaauagcgccgugguacgcuuucgcacugaguagaggcuuugggucaggaaucaucaucucaaaugcaucaaugggugaaugugacgcuaagugucaaacaccccaaggagcuauaaacaguagucuccccuuccagaauguacacccagucacaauaggagaguguccaaaguaugucaggaguacaaaauuaaggaugguuacaggacuaaggaacgucccauccauucaauccagagguuuguuuggagccauugccgguuucauugaaggaggguggacuggaaugauagauggaugguaugguuaucaucaucaaaaugaacaaggaucuggcuaugcugcggaccaaaaaagcacacaaaaugccauuaaugggauuacaaacaaggugaauucuauaaucgagaaaaugaacacucaauucacagcuguaggcaaagaauucaacaaauuagaaagaaggauggaaaacuuaaauaagaaaguugaugauggauuucuggacauuuggacauauaaugcagaauuguuaguucuccuggaaaaugaaaggacuuuggauuuucaugacucaaaugugaagaaccuguaugagaaagugaaaacccaauugaagaauaaugccaaagaaauagggaacggguguuuugaauucuaucacaaguguaacaaugaaugcauggaaagugugaaaaauggaacuuaugacuauccaaaauauuccaaagaaucaaagcuaaacagggaaaaaauugauggagugaaauuggaaucaaugggagucuaucagauucuggcgaucuacucaacugucgccaguucgcuggugcuuuuggucucccugggggcaaucagcuucuggauguguucuaaugggucucugcaguguagaauaugcaucuga

SEQ ID NO: 41670 - RNA, 1698 nt, Artificial Sequence
  derived and/or modified CDS sequence (wt) from hemagglutinin__InfluenzaA__AFP33325
augaaaguaaaacuacugguccuguuauguacauuuacagcuacauaugcagacacaauauguauaggcuaccaugccaacaacucaaccgacacuguugacacaguacuugagaagaaugugacagugacacacucugucaaccuacuugaggacagucacaauggaaaacuaugucuacuaaaaggaauagccccacuacaauuggguaauugcagcguugccggauggaucuuaggaaacccagaaugcgaauuacugauucccaaggaaucaugguccuacauuguagaaacaccaaauccugagaauggaacauguuacccaggguauuucgccgacuaugaggaacugagggagcaauugaguucaguaucuucauuugagagguucgaaauauuccccaaagaaagcucauggcccagccacaccguaaccggaguaucagcaucaugcucucauaaugggaaaagcaguuuuuacagaaauuugcuauggcugacggggaagaaugguuuguacccaaaccugagcaaguccuauucaaacaacaaagagaaagaaguccuuguacuaugggguguucaucacccgccuaacauaggggaccaaagggcccucuaucauacagaaaaugcuuauguuucuguagugucuucacauuauagcagaagauucaccccagaaauagccaaaagacccaaaguaagaggucaggaaggaagaaucaacuacuacuggacucugcuggaacccggggauacaauaauauuugaggcaaauggaaaucuaauagcgccaugguaugcuuucgcacugaguagaggcuuuggaucaggaaucaucaccucaaaugcaccaauggaugaaugugaugcgaagugucaaacaccucagggagcuauaaacagcagucuuccuuuccagaauguacacccagucacaauaggagaguguccaaaguaugucaggagugcaaaauuaaggaugguuacaggacuaaggaacaucccauccauucaauccagagguuuguuuggagccauugccgguuucauugaagggggguggacuggaaugguagaugggugguaugguuaucaucaucagaaugagcaaggaucuggcuaugcugcagaucaaaaaagcacacaaaaugccauuaacgggauuacaaacaaggugaauucuguaauugagaaaaugaacacccaauucacagcugugggcaaagaauucaacaaauuggaaagaaggauggaaaacuuaaauaaaaagguugaugauggguuucuagacauuuggacauauaaugcagaauuguugguucuacuggaaaaugaaaggacuuuggauuuccaugacuccaaugugaagaaucuguaugagaaaguaaaaagccaauuaaagaauaaugccaaagaaauaggaaacggguguuuugaauucuaucacaaguguaacgaugaaugcauggagagugugaaaaauggaacuuaugacuauccaaaauauuccgaagaaucaaaguuaaacagggagaaaauugauggagugaaauuggaaucaaugggagucuaucagauucuggcgaucuacucaacugucgccaguucccugguucuuuuggucucccugggggcaaucagcuucuggauguguuccaaugggucuuugcaguguagaauaugcaucuaa

SEQ ID NO: 41671 - RNA, 1701 nt, Artificial Sequence
  derived and/or modified CDS sequence (wt) from hemagglutinin__InfluenzaA__AFQ32573
augaagacuaucauugcuuugagcuacauucuaugucugguuuucgcucaaaaacuuccuggaaaugacaacagcacggcgacgcugugccuugggcaccaugcagugccaaacggaacgauagugaaaacaaucacgaaugaccaaauugaaguuacuaaugcuacugagcugguucagaguuccucaacaggugaaauaugcaacaguccucaucagauccuugauggagaaaacugcacacuaauagaugcucuauugggagacccucagugugauggcuuccaaaacaagaaaugggaccuuuuuguugaacgaagcaaagcccacagcaacuguuacccuuaugaugugccggauuaugccucccuuaggucacuaguugccucauccggcacacuggaguuuaacaaugaaagcuucaauuggacuggagucacucaaaacggaacaagcucugcuugcauaaggagaucuaauaauaguuucuuuaguagauugaauugguugacccacuuaaacuucaaauacccagcauugaacgugacuaugccaaacaaugaacaauuugacaaauuguacauuugggggguucaccacccggguacggacaaggaccaaaucuuccuguaugcucaagcaucaggaagaaucacaguaucuaccaaaagaagccaacaagcuguaauuccgaauaucggaucuagacccagaguaaggaauaucccuagcagaguaagcaucuauuggacaauaguaaaaccgggagacauacuuuugauuaacagcacagggaaucuaauugcuccuagggguuacuucaaaauacgaagugggaaaagcucaauaaugagaucagaugcacccauuggcaaaugcaauucugcaugcaucacuccaaauggaagcauucccaaugacaaaccauuccaaaauguaaacaggaucacauacggggccugucccagauauguuaagcaaaacacucugaaauuggcaacaggaaugagaaauguaccagagaaacaaacuagaggcauauuuggcgcaauagcggguuucauagaaaaugguugggagggaaugguggaugguugguacgguuucaggcaucaaaauucugagggaaggggacaagcagcagaucucaaaagcacucaagcagcaaucgaucaaaucaaugggaagcugaauagauugaucgggaaaaccaacgagaaauuccaucagauugaaaaagaauucucagaagucgaagggagaauucaggaccuugagaaauauguuggggacacuaaaauagaucucuggucauacaacgcggagcuucuuguugcccuggagaaccaacacacaauugaucuaacugacucagaaaugaacaaacuguuugaaaaaacaaagaaacaacugagggaaaaugcugaggauaugggcaaugguuguuucaaaauauaccacaaaugugacaaugccugcauaggaucaaucagaaauggaacuuaugaccacgauguguacagagaugaagcauuaaacaaccgauuccagaucaagggaguugagcugaagucaggguacaaagauuggauccuauggauuuccuuugccauaucauguuuuuugcuuuguguugcuuuguugggguucaucaugugggccugccaaaaaggcaacauuaggugcaacauuugcauuuga

SEQ ID NO: 41672 - RNA, 1701 nt, Artificial Sequence
  derived and/or modified CDS sequence (wt) from hemagglutinin__InfluenzaA__AFQ37281
augaaggcaauacuaguaguucugcuauauacauuugcaaccacaaaugcagacacauuauguauagguuaucaugcgaacaauucaacagacacuguagacacaguacuagaaaagaauguaacaguaacacacucuguuaaccuucuagaagacaagcauaacgggaaacuaugcaaacuaagaggaguagccccauugcauuuggguaaauguaacauugcuggcuggauccugggaaauccagagugugaaucacucuccacagcaagcucaugguccuacauuguggaaacaucuaguucagacaauggaacguguuacccaggagauuucaucgauuaugaggagcuaagagagcaauugagcucagugucaucauuugaaagguuugagauauuccccaagacaaguucauggcccaaucaugacucgaacaaagguguaacggcagcauguccucaugcuggagcaaaaagcuucuacaaaaauuuaauauggcuaguuaaaaaaggaaauucauacccaaagcucagcaaaucuuauauuaaugauaaagggaaagaaguccucgugcuauggggcauucaccauccaucuacuaguacugaccaacaaagucucuaucagaaugcagaugcauauguuuuuguggggacaucaagauacagcaagaaguucaagccggaaauagcaauaagacccaaagugagggaucgagaagggagaaugaacuauuacuggacacuaguagaaccgggagacaaaauaacauucgaagcaacuggaaaucuagugguaccgagauaugcauucgcgauggaaagaaaugcuggaucugguauuaucauuucagauacaccagcccacgauugcaauacaacuugucagacacccaaaggugcuauaaacaccagccucccauuucagaauguacauccgaucacaauuggaaaauguccaaaauauguaaaaagcacaaaauugagacuggccacaggauugaggaaugucccgucuauucaaucuagaggccuauuuggggccauugccgguuucauugaagggggguggacagggaugguagauggaugguacgguuaucaccaucaaaaugagcaggggucaggauaugcagccgaccugaagagcacacagaaugccauugacaagauuacuaacaaaguaaauucuguuauugaaaagaugaauacacaguucacagcaguagguaaagaguucaaccaccuggaaaaaagaauagagaauuuaaauaaaaaaguugaugaugguuuccuggacauuuggacuuacaaugccgaacuguugguucuauuggaaaaugaaagaacuuuggacuaccacgauucaaaugugaagaacuuauaugaaaagguaagaagccaguuaaaaaacaaugccaaggaaauuggaaacggcugcuuugaauuuuaccacaaaugcgaugacaagugcauggaaagugucaaaaaugggacuuaugacuacccaaaauacucagaggaagcaaaauuaaacagagaagaaauagaugggguaaagcuggaaucaacaaggauuuaccagauuuuggcgaucuauucaacugccgccaguucauugguacugguagucucccugggggcaaucaguuucuggaugugcucuaaugggucucuacaguguagaauauguauuuaa

SEQ ID NO: 41673 - RNA, 1707 nt, Artificial Sequence
  derived and/or modified CDS sequence (wt) from hemagglutinin__InfluenzaA__AFQ55689
augaacacucaaauuuuggcacucauugcuuguaugcugauuggagcuaaaggagauaaaauaugucuugggcaccaugcuguggcaaauggaacaaaagugaacacauuaacagagagaggaaucgaaguaguaaaugccacagaaacgguggagacugcaaauacuaagaaaauaugcacucaggggaaaagaccaacagaucugggacaaugcggacuucuaggaacccuaauaggaccuccccaaugcgaucaauuucuggaauuugacgcugauuuaauaauugaacgaagagaaggaaccgauguguguuaucccgggaaguucacaaaugaagaaucacugaggcaaauccuucgagggucaggaggaauugauaaagagucaauggguuucaccuauaguggaauaagaaccaauggggcgacaagugcuugcagaagaucagguucuuccuucuaugcggagaugaagugguuacugucgaauucagacaaugcggcuuuuccccaaaugacuaagucguacagaaaucccaggaacaaaccagcucugauaauuuggggagugcaucauucuggaucggcuacugagcagaccaaacucuaugggaguggaaacaaguugauaacaguaggaagcucgaaauaccagcagucauucaccccaagcccgggggcacgaccacaggugaaugggcaaucaggaaggauugacuuucacuggcuacuccuugaucccaaugacacagugaccuucacauucaauggggcauucauagcuccugacagagcaaguuucuuuagaggagagucaauaggaguucagagugauguuccuuuggauucugguugugagggggauugcuuccacaauggggguacgauagugaguucccugccauuccagaacaucaacccuagaacagugggaaaaugcccucgauaugucaaacagacaagccuccuuuuggcuacagggaugagaaacgucccagagaaccccaaggauaggaagagccgacaucgaaggaccagaggccuuuuuggagcgauugcuggauucauagagaauggaugggaaggucucauugauggaugguaugguuucagacaucaaaaugcacaaggagaaggaacugcagcugauuacaaaagcacucaaucugcgauagaucagaucacaggcaaauugaaucgucuaauugacaaaacaaaucagcaguuugaacugauagacaacgaauucagugaaauagaacaacaaauugggaaugucauuaacuggacacgagauucaaugacugagguauggucguacaaugcugaauugcugguagcuauggaaaaucagcacacaauagaucuugcagacucagaaaugaacaaacuuuaugagcguguaaggaaacaacugagggagaaugcugaagaggaugggacuggaugcuuugaaauauuucauaagugugaugaucagugcauggagagcaucaggaacaacacuuaugaccauacucaauacagagcggagucauugcagaauagaauacagauagacccagugaaauugaguaguggauacaaagacauaaucuuaugguuuagcuucggggcaucauguuuucuucuucuagccauugcaaugggauugguuuucauuugcauaaagaauggaaacaugcggugcacuauuuguauauag

SEQ ID NO: 41674 - RNA, 1701 nt, Artificial Sequence
  derived and/or modified CDS sequence (wt) from hemagglutinin__InfluenzaA__AFR68153
augaaggcaauacuaguaguucugcuauauacauuugcaaccgcaaaugcagacacauuauguauagguuaccaugcgaacaauucaacagacacuguagacacaguacuagaaaagaauguaacaguaacacacucuguuaaucuucuagaagacaagcauaacgggaaacuaugcaaacuaagagggguagccccauugcauuuggguaaauguaacauugcuggcuggauccugggaaauccagagugugaaacacucuccacagcaagcucaugguccuacauuguggaaacaucuaguucagacaauggaacguguuacccaggagauuucaucgauuaugaggagcuaagagagcaauugagcucagugucaucauuugaaagguuugagauauuccccaagacaaguucauggcccaaucaugacucaaacaaagguguaacggcagcauguccucaugcuggagcaaaaggcuucuacaaaaauuuaauauggcuaguuaaaaaaggaaauucauacccaaagcucagcaaauccuacauuaaugauaaagggaaagaaguccucgugcuauggggcauucaccauccaucuacuacugcugaccaacaaagucucuaucagaaugcagauacauauguuuuuguggggacaucaagauacagcaagaaguucaagccggaaauagcaauaagacccaaagugagggaucaagaagggagaaugaacuauuacuggacacuaguagagccgggagacaaaauaacauucgaagcaacuggaaaucuagugguaccgagauaugcauucgcaauggaaagagaugcuggaucugguauuaucauuucagauacaccaguccacgauugcaauacaacuugucagacacccaagggugcuauaaacaccagccucccauuucagaauauacauccgaucacaauuggaaaauguccaaaauauguaaaaagcacaaaauugagacuggccacaggauugaggaaugucccgucuauucaaucuagaggccuauuuggggccauugccggcuucauugaagggggguggacagggaugguagauggaugguacgguuaucaccaucaaaaugagcaggggucaggauaugcagccgaccugaagagcacacagaaugccauugacaagauuacuaacaaaguaaauucuguuauugaaaaaaugaauacacaguucacagcaguagguaaagaguucaaccaccuggaaaaaagaauagagaauuuaaauaaaaaaguugaugauggguuccuggacauuuggacuuacaaugccgaacuguugguucuauuggaaaaugaaagaacuuuggacuaccacgauucaaaugugaagaacuuauaugaaaagguaagaaaccaguuaaaaaacaaugccaaggaaauuggaaauggcugcuuugaauuuuaccacaaaugcgauaacacguguauggaaagugucaaaaaugggacuuaugacuacccaaaauacucagaggaagcaaaauuaaacagagaagaaauagaugggguaaagcuggaaucaacaaggauuuaccagauuuuggcgaucuauucaacugccgccaguucauugguacugguagucucccugggggcaaucaguuuuuggaugugcucuaaugggucucuacaguguagaauauguauuuaa

SEQ ID NO: 41675 - RNA, 1701 nt, Artificial Sequence
  derived and/or modified CDS sequence (wt) from hemagglutinin__InfluenzaA__AFR68163
augaaggcaacacuaguaguucugcuauauacauuugcaaccgcaaaugcagacacauuauguauagguuaccaugcgaacaauucaacagacacuguagacacaguacuagaaaagaauguaacaguaacacacucugccaaucuucuagaagacaagcauaacggaaaacuaugcaaacuaagagggguagccccauugcauuuggguaaauguaacauugcuggcuggauccugggaaauccagagugugaaacacucuccacagcaagcucaugguccuacauuguggaaacaucuaguucagacaauggaacguguuacccaggagauuucaucgauuaugaggagcuaagagagcaauugagcucagugucaucauuugaaagguuugagauauuccccaagacaaguucauggcccaaucaugacucgaacaaagguguaacggcagcauguccucaugcuggagcaaaaggcuucuacaaaaauuuaauauggcuaguuaaaaaaggaaauucauacccaaagcucagcaaauccuacauuaaugauaaagggaaagaaguccucgugcuauggggcauccaccauccaucuacuacugcugaccaacaaagucucuaucagaaugcagauacauauguuuuuguggggacaucaagauacagcaagaaguucaagccggaaauagcaauaagacccaaagugagggaucaagaagggagaaugaacuauuacuggacacuaguagagccgggagacaaaauaacauucgaagcaacuggaaaucuagugguaccgagauaugcauucgcaauggaaagagaugcuggaucugguauuaucauuucagauacaccaguccacgauugcaauacaacuugucagacacccaagggugcuauaaacaccagccucccauuucagaauauacauccgaucacaauuggaaaauguccaaaauauguaaaaagcacaaaauugagacuggccacaggauugaggaaugucccgucuauucaaucuagaggccuauuuggggccauugccggcuucauugaagggggguggacagggaugguagauggaugguacgguuaucaccaucaaaaugagcaggggucaggauaugcagccgaccugaagagcacacagaaugccauugacaagauuacuaacaaaguaaauucuguuauugaaaaaaugaauacacaguucacagcaguagguaaagaguucaaccaccuggaaaaaagaauagagaauuuaaauaaaaaaguugaugauggguuccuggacauuuggacuuacaaugccgaacuguugguucuauuggaaaaugaaagaacuuuggacuaccacgauucaaaugugaagaacuuauaugaaaagguaagaaaccaguuaaaaaacaaugccaaggaaauuggaaauggcugcuuugaauuuuaccacaaaugcgauaacacguguauggaaagugucaaaaaugggacuuaugacuacccaaaauacucagaggaagcaaaauuaaacagagaagaaauagaugggguaaagcuggaaucaacaaggauuuaccagauuuuggcgaucuauucaacugccgccaguucauugguacugguagucucccugggggcaaucaguuuuuggaugugcucuaaugggucucuacaguguagaauauguauuuaa

SEQ ID NO: 41676 - RNA, 1701 nt, Artificial Sequence
  derived and/or modified CDS sequence (wt) from hemagglutinin__InfluenzaA__AFR68173
augaagacuaucauugcuuugagcuacauucuaugucugguuuucgcccaaaaacuuccuggaaaugacaacagcacggcaacgcugugccuugggcaccaugcaguaccaaacggaacgauagugaaaacaaucacgaaugaccaaauugaaguuacuaaugcuacugagcugguucagaguuccucaacaggugaaauaugcgacaguccucaucagauccuugauggagaaaacugcacacuaauagaugcucuauugggagacccucagugugauggcuuccaaaauaagaaaugggaccuuuuuguugaacgaagcaaagccuacagcaacuguuacccuuaugaugugccggauuaugccucccuuaggucacuaguugccucauccggcacacuggaguuuaacaaugaaagcuucaauuggacuggagucacucaaaacggaacaagcucugcuugcauaaggagaucuaauaguaguuucuuuaguagauugaauugguugacccacuuaaacuucaaauacccagcauugaacgugacuaugccaaacaaugaacaauuugacaaauuguacauuugggggguucaccacccggguacggacaaggaccaaaucuuccuguaugcucaagcaucaggaagaaucacaguaucuaccaaaagaagccaacaaucugugaucccgaauaucggaucuagacccagaauaaggaauaucccuagcagaauaagcaucuauuggacaauaguaaaaccgggagacauacuuuugauuaacagcacagggaaucuaauugcuccuagggguuacuucaaaauacgaagugggaaaagcucaauaaugagaucagaugcacccauuggaaaaugcaauucugaaugcaucacuccaaauggaagcauucccaaugacaaaccauuccaaaauguaaacaggaucacauacggggccuguccuagauauguuaagcaaaacacucugaaauuggcaacaggaaugcgaaauguaccagagaaacaaacuagaggcauauuuggcgcaauagcggguuucauagaaaaugguugggagggaaugguggaugguugguacgguuucaggcaucaaaauucugagggaagaggacaagcagcagaucucaaaagcacucaagcagcaaucgaucaaaucaaugggaagcugaauagauugaucgggaaaaccaacgagaaauuccaucagauugaaaaagaauucucagaagucgaagggagaauucaggaccuugagaaauauguugaggacacuaaaauagaucucuggucauacaacgcggagcuucuuguugcccuggaaaaccaacauacaauugaucuaacugacucagaaaugaacaaacuguuugaaaaaacaaagaagcaacugagagaaaaugcugaagauaugggcaauggcuguuucaaaauauaccacaaaugugacaaugccugcauaggaucaaucagaaauggaacuuauaaccacgauguauacagagaugaagcauuaaacaaccgguuccagaucaagggaguugagcugaagucaggguacaaagauuggauccuauggauuuccuuugccauaucauguuuuuugcuuuguguugcuuuguugggguucaucaugugggccugccaaaaaggcaacauuaggugcaacauuugcauuuga

SEQ ID NO: 41677 - RNA, 1701 nt, Artificial Sequence
  derived and/or modified CDS sequence (wt) from hemagglutinin__InfluenzaA__AFR84675
augaaggcaauacuaguaguucugcuauauacauuugcaaccgcaaaugcagacacauuauguauagguuaucaugcgaacaauucaacagacacuguagacacaguacuagaaaagaauguaacaguaacacacucuguuaaccuucuagaagacaagcauaacgggaaacuaugcaaacuaagagggguagccccauugcauuuggguaaauguaacauugcuggcuggauccugggaaauccagagugugaaucacucuccacagcaagcucaugguccuacauuguggaaacaucuaguucagacaauggaacguguuacccaggagauuucaucgauuaugaggagcuaagagagcaauugagcucagugucaucauuugaaagguuugagauauuccccaagacaaguucauggcccaaucaugacucgaacaaagguguaacggcagcauguccucaugcuggagcaaaaagcuucuacaaaaauuuaauauggcuaguuaaaaaaggaaauucauacccaaagcucagcaaauccuacauuaaugauaaagggaaagaaguccucgugcuauggggcauucaccauccaucuacuagugcugaccaacaaagucucuaucagaaugcagaugcauauguuuuuguggggacaucaagauacagcaagaaguucaagccggaaauagcaauaagacccaaagugagggaucaagaagggagaaugaacuauuacuggacacuaguagagccgggagacaaaauaacauucgaagcaacuggaaaucuagugguaccgagauaugcauucgcaauggaaagaaaugcuggaucugguauuaucauuucagauacaccaguccacgauugcaauacaacuugucagacacccaagggugcuauaaacaccagccucccauuucagaauauacauccgaucacaauuggaaaauguccaaaauauguaaaaagcacaaaauugagacuggccacaggauugagaaaugucccgucuauucaaucuagaggccuauuuggggccauugccgguuucauugaagggggguggacagggaugguagauggaugguacgguuaucaccaucaaaaugagcaggggucaggauaugcagccgaccugaaaagcacacagaaugccauugacgagauuacuaacaaaguaaauucuguuauugaaaagaugaauacacaguucacagcaguagguaaagaguucaaccaccuggaaaaaagaauagagaauuuaaauaaaaaaguugaugaugguuuccuggacauuuggacuuacaaugccgaacuguugguucuauuggaaaaugaaagaacuuuggacuaucacgauucaaaugugaagaacuuauaugaaaagguaagaagccaguuaaaaaacaaugccaaggaaauuggaaacggcugcuuugaauuuuaccacaaaugcgauaacacgugcauggaaagugucaaaaaugggacuuaugacuacccaaaauacucagaggaagcaaaauuaaacagagaagaaauagaugggguaaagcuggaaucaacaaggauuuaccagauuuuggcgaucuauucaacugucgccaguucauugguacugguagucucccugggggcaaucaguuucuggaugugcucuaaugggucucuacaguguagaauauguauuuaa

SEQ ID NO: 41678 - RNA, 1701 nt, Artificial Sequence; identical to SEQ ID NO: 39220
  derived and/or modified CDS sequence (wt) from hemagglutinin__InfluenzaA__AFR84685

SEQ ID NO: 41679 - RNA, 1701 nt, Artificial Sequence; identical to SEQ ID NO: 34898
  derived and/or modified CDS sequence (wt) from hemagglutinin__InfluenzaA__AFR84694

SEQ ID NO: 41680 - RNA, 1701 nt, Artificial Sequence; identical to SEQ ID NO: 34705
  derived and/or modified CDS sequence (wt) from hemagglutinin__InfluenzaA__AFR84704

SEQ ID NO: 41681 - RNA, 1701 nt, Artificial Sequence
  derived and/or modified CDS sequence (wt) from hemagglutinin__InfluenzaA__AFR84714
augaaggcaauacuaguaguucugcuauauacauuugcaaccgcaaaugcagacacauuauguauagguuaucgugcgaacaauucaacagacacuguagacacaguacuagaaaagaauguaacaguaacacacucuguuaacauucuagaagacaagcauaacgggaaacuaugcaaacuaagagggguagccccauugcauuuggguaaauguaacauugcuggcuggauccugggaaauccagagugugaaucacucuccacagcaagcucaugguccuacauuguggaaacaucuaguucagacaauggaacguguuacccaggagauuucaucgauuaugaggagcuaagagagcaauugagcucagugucaucauuugaaagguuugagauauuccccaagacaaguucauggcccaaucaugacucgaacaaagguguaacggcagcauguccucaugcuggagcaaaaagcuucuacaaaaauuuaauauggcuaguuaaaaaaggaaauucauacccaaagcucagcaaauccuacauuaaugauaaagggaaagaaguccucgugcuauggggcauucaccauccaucuacuagugcugaccaacaaagucucuaucagaaugcagaugcauauguuuuuguggggucaucaagauacagcaagaaguucaagccggaaauagcaauaagacccaaagugagggaucaagaagggagaaugaacuauuacuggacacuaguagagccgggagacaaaauaacauucgaagcaacuggaaaucuagugguaccgagauaugcauucgcaauggaaagaaaugcuggaucugguauuaucauuucagauacaccaguccacgauugcaauacaacuugucagacacccaagggugcuauaaacaccagccucccauuucagaauauacauccgaucacaauuggaaaauguccaaaauauguaaaaagcacaaaauugagacuggccacaggauugaggaaugucccgucuauucaaucuagaggccuauuuggggccauugccgguuucauugaagggggguggacagggaugguagauggaugguacgguuaucaccaucaaaaugagcaggggucaggauaugcagccgaccugaagagcacacagaaugccauugacgagauuacuaacaaaguaaauucuguuauugaaaagaugaauacacaguucacagcaguagguaaagaguucaaccaccuggaaaaaagaauagagaauuuaaauaaaaaaguugaugaugguuuccuggacauuuggacuuacaaugccgaacuguugguucuauuggaaaaugaaagaacuuuggacuaccacgauucaaaugugaagaacuuauaugaaaagguaagaagccagcuaaaaaacaaugccaaggaaauuggaaacggcugcuuugaauuuuaccacaaaugcgauaacacgugcauggaaagugucaaaaaugggacuuaugacuacccaaaauacucagaggaagcaaaauuaaacagagaagaaauagaugggguaaagcuggaaucaacaaggauuuaccagauuuuggcgaucuauucaacugucgccaguucauugguacugguagucucccugggggcaaucaguuucuggaugugcucuaaugggucucuacaguguagaauauguauuuaa

SEQ ID NO: 41682 - RNA, 1701 nt, Artificial Sequence; identical to SEQ ID NO: 34898
  derived and/or modified CDS sequence (wt) from hemagglutinin__InfluenzaA__AFR84724

SEQ ID NO: 41683 - RNA, 1701 nt, Artificial Sequence; identical to SEQ ID NO: 34898
  derived and/or modified CDS sequence (wt) from hemagglutinin__InfluenzaA__AFR84734

SEQ ID NO: 41684 - RNA, 1701 nt, Artificial Sequence; identical to SEQ ID NO: 34898
  derived and/or modified CDS sequence (wt) from hemagglutinin__InfluenzaA__AFR84754

SEQ ID NO: 41685 - RNA, 1701 nt, Artificial Sequence; identical to SEQ ID NO: 34898
  derived and/or modified CDS sequence (wt) from hemagglutinin__InfluenzaA__AFR84764

SEQ ID NO: 41686 - RNA, 1701 nt, Artificial Sequence; identical to SEQ ID NO: 34898
  derived and/or modified CDS sequence (wt) from hemagglutinin__InfluenzaA__AFR84774

SEQ ID NO: 41687 - RNA, 1701 nt, Artificial Sequence
  derived and/or modified CDS sequence (wt) from hemagglutinin__InfluenzaA__AFR84784
augaaggcaauacuaguaggucugcuauauacauuugcaaccgcaaaugcagacacauuauguauagguuaucaugcgaacaauucaacagacacuguagacacaguacuagaaaagaauguaacaguaacacacucuguuaacauucuagaagacaagcauaacgggaaacuaugcaaacuaagagggguagccccauugcauuuggguaaauguaacauugcuggcuggauccugggaaauccagagugugaaucacucuccacagcaagcucaugguccuacauuguggaaacaucuaguucagacaauggaacguguuacccaggagauuucaucgauuaugaggagcuaagagagcaauugagcucagugucaucauuugaaagguuugagauauuccccaagacaaguucauggcccaaucaugacucgaacaaagguguaacggcagcauguccucaugcuggagcaaaaagcuucuacaaaaauuuaauauggcuaguuaaaaaaggaaauucauacccaaagcucagcaaauccuacauuaaugauaaagggaaagaaguccucgugcuauggggcauucaccauccaucuacuagugcugaccaacaaagucucuaucagaaugcagaugcauauguuuuuguggggucaucaagauacagcaagaaguucaagccggaaauagcaauaagacccaaagugagggaucaagaagggagaaugaacuauuacuggacacuaguagagccgggagacaaaauaacauucgaagcaacuggaaaucuagugguaccgagauaugcauucgcaauggaaagaaaugcuggaucugguauuaucauuucagauacaccaguccacgauugcaauacaacuugucagacacccaagggugcuauaaacaccagccucccauuucagaauauacauccgaucacaauuggaaaauguccaaaauauguaaaaagcacaaaauugagacuggccacaggauugaggaaugucccgucuauucaaucuagaggccuauuuggggccauugccgguuucauugaagggggguggacagggaugguagauggaugguacgguuaucaccaucaaaaugagcaggggucaggauaugcagccgaccugaagagcacacagaaugccauugacgagauuacuaacaaaguaaauucuguuauugaaaagaugaauacacaguucacagcaguagguaaagaguucaaccaccuggaaaaaagaauagagaauuuaaauaaaaaaguugaugaugguuuccuggacauuuggacuuacaaugccgaacuguugguucuauuggaaaaugaaagaacuuuggacuaccacgauucaaaugugaagaacuuauaugaaaagguaagaagccagcuaaaaaacaaugccaaggaaauuggaaacggcugcuuugaauuuuaccacaaaugcgauaacacgugcauggaaagugucaaaaaugggacuuaugacuacccaaaauauucagaggaagcaaaauuaaacagagaagaaauagaugggguaaagcuggaaucaacaaggauuuaccagauuuuggcgauauauucaacugucgccaguucauuggcacugguagucucccugggggcaaucaguuucuggaugugcucuaaugggucucuacaguguagaauauguauuuaa

SEQ ID NO: 41688 - RNA, 1701 nt, Artificial Sequence; identical to SEQ ID NO: 34898
  derived and/or modified CDS sequence (wt) from hemagglutinin__InfluenzaA__AFR84794

SEQ ID NO: 41689 - RNA, 1701 nt, Artificial Sequence; identical to SEQ ID NO: 34681
  derived and/or modified CDS sequence (wt) from hemagglutinin__InfluenzaA__AFR84804

SEQ ID NO: 41690 - RNA, 1701 nt, Artificial Sequence; identical to SEQ ID NO: 34898
  derived and/or modified CDS sequence (wt) from hemagglutinin__InfluenzaA__AFR84814

SEQ ID NO: 41691 - RNA, 1701 nt, Artificial Sequence; identical to SEQ ID NO: 34681
  derived and/or modified CDS sequence (wt) from hemagglutinin__InfluenzaA__AFR84824

SEQ ID NO: 41692 - RNA, 1701 nt, Artificial Sequence
  derived and/or modified CDS sequence (wt) from hemagglutinin__InfluenzaA__AFR84834
augaaggcaauacuaguaguuaugcuauauacauuugcaaccgcaaaugcagacacauuauguauagguuaucaugcgaacaauucaacagacacuguagacacaguacuagaaaagaauguaacaguaacacacucuguuaaccuucuagaagacaagcauaacgggaaacuaugcaaacuaagagggguagccccauugcauuuggguaaauguaacauugcuggcuggauccugggaaauccagagugugaaucacucuccacagcaagcucaugguccuacauuguggaaacaucuaguucagacaauggaacguguuacccaggagauuucaucgauuaugaggagcuaagagagcaauugagcucagugucaucauuugaaagguuugagauauuccccaagacaaguucauggcccaaucaugacucgaacaaagguguaacggcagcauguccucaugcuggagcaaaaagcuucuacaaaaauuuaauauggcuaguuaaaaaaggaaauucauacccaaagcucagcaaauccuacauuaaugauaaagggaaagaaguccucgugcuauggggcauucaccauccaucuacuagugcugaccaacaaagucucuaucagaaugcagaugcauauguuuuuguggggucaucaagauacagcaagaaguucaagccggaaauagcaauaagacccaaagugagggaucaagaagggagaaugaacuauuacuggacacuaguagagccgggagacaaaauaacauucgaagcaacuggaaaucuagugguaccgagauaugcauucgcaauggaaagaaaugcuggaucugguauuaucauuucagauacaccaguccacgauugcaauacaacuugucaaacacccaagggugcuauaaacaccagccucccauuucagaauauacauccgaucacaauuggaaaauguccaaaauauguaaaaagcacaaaauugagacuggccacaggauugaggaaugucccgucuauucaaucuagaggccuauuuggggccauugccgguuucauugaagggggguggacagggaugguagauggaugguacgguuaucaccaucaaaaugagcaggggucaggauaugcagccgaccugaagagcacacagaaugccauugacgagauuacuaacaaaguaaauucuguuauugaaaagaugaauacacaguucacagcaguagguaaagaguucaaccaccuggaaaaaagaauagagaauuuaaauaaaaaaguugaugaugguuuccuggacauuuggacuuacaaugccgaacuguugguucuauuggaaaaugaaagaacuuuggacuaccacgauucaaaugugaagaacuuauaugaaaagguaagaagccagcuaaaaaacaaugccaaggaaauuggaaacggcugcuuugaauuuuaccacaaaugcgauaacacgugcauggaaagugucaaaaaugggacuuaugacuacccaaaauacucagaggaagcaaaauuaaacagagaagaaauagaugggguaaagcuggaaucaacaaggauuuaccagauuuuggcgaucuauucaacugucgccaguucauugguacugguagucucccugggggcaaucaguuucuggaugugcucuaaugggucucuacaguguagaauauguauuuaa

SEQ ID NO: 41693 - RNA, 1701 nt, Artificial Sequence; identical to SEQ ID NO: 39881
  derived and/or modified CDS sequence (wt) from hemagglutinin__InfluenzaA__AFR84844

SEQ ID NO: 41694 - RNA, 1701 nt, Artificial Sequence; identical to SEQ ID NO: 34965
  derived and/or modified CDS sequence (wt) from hemagglutinin__InfluenzaA__AFR84854

SEQ ID NO: 41695 - RNA, 1701 nt, Artificial Sequence; identical to SEQ ID NO: 34681
  derived and/or modified CDS sequence (wt) from hemagglutinin__InfluenzaA__AFR84864

SEQ ID NO: 41696 - RNA, 1701 nt, Artificial Sequence; identical to SEQ ID NO: 39895
  derived and/or modified CDS sequence (wt) from hemagglutinin__InfluenzaA__AFR84874

SEQ ID NO: 41697 - RNA, 1701 nt, Artificial Sequence; identical to SEQ ID NO: 34676
  derived and/or modified CDS sequence (wt) from hemagglutinin__InfluenzaA__AFR84893

SEQ ID NO: 41698 - RNA, 1701 nt, Artificial Sequence; identical to SEQ ID NO: 34676
  derived and/or modified CDS sequence (wt) from hemagglutinin__InfluenzaA__AFR84903

SEQ ID NO: 41699 - RNA, 1701 nt, Artificial Sequence; identical to SEQ ID NO: 34676
  derived and/or modified CDS sequence (wt) from hemagglutinin__InfluenzaA__AFR84913

SEQ ID NO: 41700 - RNA, 1701 nt, Artificial Sequence; identical to SEQ ID NO: 34676
  derived and/or modified CDS sequence (wt) from hemagglutinin__InfluenzaA__AFR84923

SEQ ID NO: 41701 - RNA, 1689 nt, Artificial Sequence
  derived and/or modified CDS sequence (wt) from hemagglutinin__InfluenzaA__AFV53205
auggccaucauuuaucucauacuccuguucgcaacagugaggggggaccagauaugcauuggauaccaugccaauaauuccacagaaaaggucgacacaauucuagagcggaaugucacugugacucaugccaaggacauccuugagaagacccacaacggaaaacuaugcaaacuaaacggaaucccuccacuugaacuaggggacuguagcauugccggauggcuccuuggaaauccagaaugugauaggcuucuaagggugccagaaugguccuauauaauggagaaagaaaacccaagauacaguuuguguuacccaggcagcuuaaaugacuaugaagaauugaaacaucuccucagcagcguaagacauuucgagaaaguaaggauucugcccaaagauagauggacacagcauacaacaacuggagauucaaaggccugcgcagugucagguaaaccaucauucuucaggaacauggucuggcugacaaagaaaggaccagauuauccgguugccaaaggaucguauaacaauacgagcggagagcaaaugcuaauaauuuggggagugcaccauccuauugaugaagcagaacaaagagaauuguaccagaaagugggaaccuauguuuccgcaagcacaucaacauugaacaaaaggucaaucccugaaauagcagcaaggccugaagugaauggacuuagaaguagaauggaauucucuuggacccucuuggauguaugggacaccauaaauuuugagagcacugguaaucuaauugcaccagaguauggauucaaaauaucaaaaagagguaguucaggaaucaugaagacagaaggaacacuuggaaacugugagaccaaaugccaaacuccuuugggagcaauaaauacaacacuaccuuuucacaauguccacccacugacaauaggugaaugccccaaauauguaaaaucggagaaauuggucuuagcaacaggacuaaggaauguuccccaaauugaaucaagaggauuguuuggggcaauagcugguuuuauagaaggaggauggcaaggaaugguugaugguugguauggauaccaucacagcaaugaccagggaucaggguaugcagcagacaaagaauccacucaaaaggcauuugaugaaaucaccaacaagguaaauucugugauugaaaagaugaacacccaauuugaagcuguugggaaagaauucaauaauuuagagaaaagacuggagaacuugaacaaaaagauggaagauggguuccuagauguguggacauacaaugcugagcuucuaguucugauggaaaaugagaggacacuugacuuccaugauucuaauguaaaaaaccuguaugaaaaagucagaaugcagcugagagacaacgucaaagaacuaggaaauggauguuuugaauuuuaucacaaaugugacgaugaaugcauaaauagugugaaaaacggaacguaugauuaucccaaguaugaagaagaaucuaaacuaaagagaaaugaaaucaaagggguaaaauugagcagcauggggguuuaccaaauucuugccauuuaugcuacaguugcagguucucugucacuggcaaucaugauggcugggaucucuuucuggaugugcuccaacgggucucugcagugcagaaucugcauauga

SEQ ID NO: 41702 - RNA, 1689 nt, Artificial Sequence
  derived and/or modified CDS sequence (wt) from hemagglutinin__InfluenzaA__AFV53216
auggccaucauuuaucucauucuccuguucacagcagugagaggggaccagauaugcauuggauaccaugccaauaauuccacagagaaggucgacacaauucuagagcggaacgucacugugacucaugccaaggacauucuugagaagacccauaacggaaaguuaugcaaacuaaacggaaucccuccacuugaacuaggggacuguagcauugccggauggcuccuuggaaauccagaaugugauaggcuucuaagugugccagaaugguccuauauaauggagaaagaaaacccgagagacgguuuguguuauccaggcagcuucaacgauuaugaagaauugaaacaucuccucagcagcgugaaacauuucgagaaaguaaagauucugcccaaagauagauggacacagcauacaacaacuggagguucacgggccugcgcggugucugguaauccaucauucuucaggaacauggucuggcugacagagaaaggaucaaauuauccgguugccaaaggaucguacaacaauacaagcggagaacaaaugcuaauaauuuggggggugcaccaucccaaugaugagacagaacaaagaacauuguaccagaaugugggaaccuauguuuccguaggcacaucaacauugaacaaaaggucaaccccagacauagcaacaaggccuaaagugaauggacaaggagguagaauggaauucucuuggacccuauuggauaugugggacaccauaaauuuugagaguacugguaaucuaauugcaccagaguauggauucaaaauaucgaaaagagguaguucagggaucaugaaaacagaaggaacacuugggaacugugagaccaaaugccaaacuccuuugggagcaauaaauacaacauugccuuuucacaauguccacccacugacaauaggugagugccccaaauauguaaaaucggagaaguuggucuuagcaacaggacuaaggaauguuccccagauugaaucaagaggauuguuuggggcaauagcugguuuuauagaaggaggauggcaaggaaugguugaugguugguauggauaccaucacagcaaugaccagggaucaggguaugcagcagacaaagaauccacucaaaaggcauuugauggaaucaccaacaagguaaauucugugauugaaaagaugaacacccaauuugaagcuguugagaaagaauucaguaacuuagagagaagacuggagaacuugaacaaaaagauggaagacggguuucuagauguguggacauacaaugcugagcuucuaguucugauggaaaaugagaggacacuugacuuucaugauucuaaugucaagaaucuguaugauaaagucagaaugcagcugagagacaacgucaaagaacuaggaaauggauguuuugaauuuuaucacaaaugugaugaugaaugcaugaauagugugaaaaacgggacguaugauuaucccaaguaugaagaagagucuaaacuaaauagaaaugaaaucaaagggguaaaauugagcagcauggggauuuaucaaauccuugccauuuaugcuacaguagcagguucucugucacuggcaaucaugauggcugggaucucuuucuggaugugcuccaacgggucucugcagugcaggaucugcauauga

SEQ ID NO: 41703 - RNA, 1689 nt, Artificial Sequence
  derived and/or modified CDS sequence (wt) from hemagglutinin__InfluenzaA__AFV53227
augaucaucauuuaucucauacuccuguucacagcagugaggggggaccagauaugcauuggauaccaugccaauaauuccacagaaaaggucgacacaauucuagagcggaaugucacugugacucaugccaaggacauccuugagaagacccauaacggaaagcuaugcaaacuaaacggaaucccuccacuugaacuaggggauuguagcauugccggauggcuccuuggaaauccagaaugugauaggcuucuaagggugccagaaugguccuauauaauggagaaagaaaacccgagauacaguuuguguuauccaggcagcuucaaugacuaugaagaauugaaacaucuccuaaguagcguaaaacacuucgagaaaguaaagauucugccaaaagauggauggacacagcauaagacagauggagguucaaaggccugcgcagugucagguaaagcaucauucuucaggaacauggucuggcugacaaaggaaggaccaaauuaucagguugccaaaagaucguacaacaauacgagcggagagcaaaugcuaauaauuuggggagugcaccauccuaaggaugaggcggaacaaauagcauuguaccagaaagugggaaccuauguuuccgcaagcacaucaacauugaacaaaaggucaaccccagaaauagcagcaaggccugaagugaauggacuagggaguagaauggaauucucuuggacccucuuggaugugugggacaccauaaauuuugagagcacugguaaucuaguugcaccagaguauggauucaaaauaucgaaaagagguagcucagggaucaugaagacagaaggaacacuugggaacugugagaccaaaugccaaacuccuuugggagcaauaaauacaacacuaccuuuucacaauguccacccacugacaauaggugaaugccccaaauauguaaaaucggagaaauuggucuuagcaacaggacuaaggaauguuccccagauugaaucaagaggauuguuuggggcaauagcuggcuuuauagaaggaggauggcaaggaaugguugaugguugguauggauaccaucacagcaaugaccagggaucaggguaugcagcagacaaagaauccacucaaaaggcauuugacagaaucaccaacaagguaaauucugugauugaaaagaugaacauccaauuugaagcuguugggaaagaauucaguaacuuagagaaaagacuggaaaacuugaacaaaaagauggaagacggguuucuagauguguggacauacaaugcugagcuucuaguucugauggaaaaugagaggacacuugacuuucaugauucuaaugucaagaaccuguaugauaaagucagaaugcagcugagagacaaugucaaagaacuaggaaauggauguuuugaauuuuaucauaaaugugacgaugaaugcaugaauagugugaaaaaugggacauaugauuaucccaaguaugaagaagaaucuaagcuaaagagaaaugaaaucaaagggguaaaauugagcagcauggggguuuaccaaauucuugccauuuaugcuacaguugcagguucucugucauuggcaaucaugauagcugggaucucuuucuggauguguuccaacgggucucugcagugcagagucugcauauga

SEQ ID NO: 41704 - RNA, 1689 nt, Artificial Sequence
  derived and/or modified CDS sequence (wt) from hemagglutinin__InfluenzaA__AFV53238
auggccaucauuuaucucauacuccuguucacagcagugaggggggaccagauaugcauuggauaccaugccaauaauuccacagaaaaggucgacacaauucuagagcggaaugucacugugacucaugccaaggacauccuugagaagacccauaacggaaagcuaugcaaacuaaacggaaucccuccacuugaacuaggggacuguagcauugccggauggcuccuuggaaauccagaaugugauaggcuucuaagggugccagaaugguccuauauaauggagaaagaaaacccgagauacaguuuguguuacccaggcagcuucaaugacuaugaagaauugaaacaucuccucagcagcguaaaacauuucgagaaaguaaagauuuugcccaaagauagauggacacagcauacaacaacuggagguucaauggccugcgcggugucagguaaaccaucauucuucaggaacauggucuggcugacaacgaaaggaccaaauuauccgguugcccaaggaucguacaacaauacgagcggagaacaaaugcuaauaauuuggggagugcaccauccuaaugaugaggcagaacaaagagcauuguaccagaaagugggaaccuauguuuccgcaagcacaucaacauuguacaaaaggucaaucccagaaauagcagcaaggccuaaagugaauggacuaggaaguagaauggaauucucuuggacccucuuggauaugugggacaccauaaauuuugagagcacugguaaucuaguugcaccagaguauggguuuaaaauaucgaaaagagguaguucagggaucaugaagacagaaggaacacuugagaacugugaaaccaaaugccaaacuccuuugggagcaauaaauacaacacuaccuuuucacaauguccacccacugacaauaggugaaugccccaaauauguaaaaucggagaaauuggucuuagcaacaggacuaaggaauguuccccagauugaaucaagaggauuguuuggggcaauagcugguuuuauagaaggaggauggcaaggaaugguugaugguugguauggauaccaucacagcaaugaccagggaucaggguaugcagcagacaaagaauccacucaaaaggcauuugauggaaucaccaacaagguaaauucugugauugaaaagaugaacacccaauuugaagcuguugggaaagaauucaguaacuuagagaaaagacuggagaacuugaacaaaaagauggaagacggguuucuagauguguggacauacaaugcagagcuucuaguucugauggaaaaugagaggacacuugacuuucaugauucuaaugucaagaaucuguaugauaaagucagaaugcagcugagagacaacgucaaagaacuaggaaauggauguuuugaauuuuaucacaaaugugacaaugaaugcauggauagugugaaaaacgggacauaugauuaucccaaguaugaagaagaaucuaaacuaaauagaaaugaaaucaaagggguaaaauugagcagcauggggguuuaucaaauccuugccauuuaugcuacaguagcagguucucugucacuggcaaucaugauggcugggaucucuuucuggaugugcuccaacgggucucugcagugcagaaucugcauauga

SEQ ID NO: 41705 - RNA, 1689 nt, Artificial Sequence
  derived and/or modified CDS sequence (wt) from hemagglutinin__InfluenzaA__AFV53249
auggccaucauuuaucucauacuccuguucgcaacagugaggggggaccagauaugcauuggauaccaugccaauaauuccacagaaacggucgacacaauucuagagcggaaugucacugugacucaugccaaggacauccuugagaagacccacaacggaaagcuaugcaaacuaaacggaaucccuccacuugaacuaggggacuguagcauugcaggauggcuccuuggaaauccagaaugugauaggcuucuaagggugccagaaugguccuauauaauggagaaagaaaauccaagauacaguuuguguuacccaggcagcuuaaaugacuaugaagaauugaaacaucuccucagcagcguaaaacauuucgagaaaguaaggauucugcccaaagauagauggacaaaucauacaacaacuggagguucaaaggccugcgcagugucaggugaaccaucauucuucaggaacauggucuggcugacaaagaaaggaccaaauuauccgguugccaaaggaucuuauaacaauacgagcggagagcaaaugcuaauaauuuggggagugcaccauccuaaugaugaggcagaacaaagagcauuguaccagaaagugggaaccuauguuuccgcaagcacaucaacauuguacaaaagaucaaucccugaaauagcagcaaggccuaaagugaauggacuuggaaguagaauggaauucucuuggacccucuugaauguaugggacaccauaaauuuugagagcacugguaauuuaguugcaccagaguauggauucaaaauaucaaaaagagguagaucagggaucaugaaaacagaaggaacacuugggaacugugagaccaaaugccaaacuccuuugggagcaauaaauacaacacuaccuuuucacaauguccacccacugacaauaggugaaugccccaaauauguaaaaucggagaaauugguccuagcaacaggacuaaggaauguuccccaaauugaaucaagaggauuguuuggggcaauagcuggcuuuauagaaggaggauggcaaggaaugguugaugguugguauggauaccaucacagcaaugaccagggaucaggguaugcagcagacaaagaauccacucaaaaggcauuugauggaaucaccaacaaggugaauucugugauugaaaaaaugaacacccaauuugaagccguugggaaagaauucaauaauuuagagaaaagacuggagaacuugaacaaaaagauggaagacggguuccuagauguguggacauacaaugcugagcuucuaguucugauggaaaaugagaggacacuugacuuccaugauucuaauguaaaaaaccuguaugaaaaagucagaaugcagcugagagacaacgucaaagaacuaggaaauggauguuuugaauuuuaucacaaaugugacgaugaaugcaugaauagugugaaaaacggaacguaugauuaucccaaguaugaagaagaaucuaaacuaaagagaaaugaaaucaaagggguaaaauugagcagcauggggguuuaccaaauucuugccauuuaugcuacaguugcagguucucugucacuggcaaucaugguggcugggaucucuuucuggaugugcuccaacgggucucugcagugcagaaucugcauauga

SEQ ID NO: 41706 - RNA, 1698 nt, Artificial Sequence
  derived and/or modified CDS sequence (wt) from hemagglutinin__InfluenzaA__AFV53260
augaaagcaaaacuacugauccuguuaugugcacuuuccgcuacagaugcagacacaauauguauaggcuaccaugcgaacaacucaaccgacacuguugacacaguacucgagaagaaugugacagugacacacucuguaaaccuacucgaagacagccacaaugggaaauuaugcagauuaaaaggaaaagccccacuacaauuggggaacuguaacauugccggaugggucuuaggaaacccagaaugcgaaucauugcucuccaauagaucaugguccuacauugcagaaacaccaaacucugagaaugggacaugcuacccaggggauuucgccgacuaugaggaacugagggagcaauugagcucaguaucaucauucgagagauucgaaauauuccccaaggaaagaucauggcccaaccacacaaccagaggagugacggcagcaugcccccaugcgaugaaaagcaguuuuuacaaaaauuuggucuggcugacggaggcaaauggcucauacccaaaucugagcagguccuaugugaacaaucaagagaaagaaguccuugugcuauggggaguucaucacccgucuaacauagaggaucaaaggacccucuaucggaaagauaaugcuuaugucucuguagugucuucaaauuauaacaggagauucaccccagaaauagcaaaaaggcccaaaguaagaggucaaucagggagaauuaacuauuacuggacuuugcuagaacccggagacacaauaauauuugaggcaacugggaaucuaauagcaccaugguaugcuuucgcacugaguagaggcccuggaucagggaucaucaccucaaacgcaccacuggaugaaugugacacgaagugucaaacaccccagggagcuauaaacaguagucucccuuuucagaauauacacccugucacaauaggagagugcccaaaauacgucaggaguacaaaauugaggaugguuacaggacuaaggaacaucccauccuuucaauccaggggucuguuuggagccauugccgguuucauugaagggggauggacugggaugauggauggaugguaugguuaccaucaucagaacgaacagggaucuggcuaugcugcggaucaaaaaagcacacaaaaugccauuaacgggauuacaaauaaggugaacucuguuaucgagaaaaugaacacucaauucacagcuguggguaaagaauucaacaaauuagaaaaaagaauggaaaacuuaaauaaaaagguugaugauggauuucuggauauuuggacauauaaugcagaauuguugguucuacuggaaaaugaaaggacuuuggauuuucaugacucaaaugugaagaaucuguaugagaaaguaaaaaaccaauuaaggaauaaugcaaaggaacuaggaaauggguguuuugaguucuaccacaagugugacaaugaaugcauggaaaguguaaaaaauggaacuuaugacuacccaaaauauucagaggaaucaaaauuaaacagggaaaagauugauggagugaaauuggaaucaaugggggucuaucggauucuggcgaucuacucaacugucgccaguucacuagugcuucuggucucccugggggcaaucagcuucuggauguguucuaaugggucuuuacagugcagaauaugcaucuga

SEQ ID NO: 41707 - RNA, 1689 nt, Artificial Sequence
  derived and/or modified CDS sequence (wt) from hemagglutinin__InfluenzaA__AFV53271
auggccaucacuuaucucauacuccuguucacagcagugaggggggaccagauaugcauuggauaccaugccaauaauuccacagaaaaggucgacacaauucuagagcggaaugucacugugacucaugccaaggacauccuugagaagacccauaacggaaagcuaugcaaacuaaacggaaucccuccacuugagcuaggggacuguagcauugccggauggcuccuuggaaauccagaaugugauagguuucuaagggugccagaaugguccuauauaauggagaaagaaaacccgagauacaguuuguguuacccaggcagcuucaaugacuaugaagaauugaaacaucuccucagcagcguaaaacauuucgagaaaguaaagauucugcccaaagauggauggacacagcauacaacaacuggagguucaauggccugcgcggugucagguaaaccaucauucuucaggaacauggucuggcugacagagaaaggacaaaauuauccaguugccaaaggaucguacaacaauacgagcggagaacaaaugcuaauaauuuggggagugcaccauccuaaugaugaggcagaacaaagagcauuguaccagaaagugggaaccuauguuuccgcaagcacaucaacauugaacaaaaggucaaccccagaaauagcagcaaggccuaaagugaauggacuaggaaguagaauggaauucucuuggacccucuuggauaugugggacaccauaaauuuugagagcacugguaaucuaguugcaccagaguauggauucaaaauaucgaaaagagguaguucagggaucaugaagacagaaggaacacuugagaacugugaaaccaaaugccaaacuccuuugggagcaauaaauacaacacuaccuuuucacaauguccacccacugacaauaggugaaugccccaaauauguaaaaucggagaaauuggucuuagcaacaggacuaaggaauauuccccagauugaaucaagaggauuguuuggggcaauagcugguuuuauagaaggaggauggcaaggaaugguugaugguugguauggauaccaucacagcaaugaccagggaucaggguaugcagcagacaaagaauccacucaaaaggcauuugauggaaucaccaacaagguaaauucugugauugaaaagaugaacacucaauuugaagcuguugggaaagaauucaguaacuuagagaaaagacuggagaacuugaacaaaaagauggaagacggguuucuagauguguggacauacaaugcugagcuucuaguucugauggaaaaugagaggacacuugacuuucaugauucuaaugucaagaaucuguaugauaaagucagaaugcagcugagagacaacgucaaagaacuaggaaauggauguuuugaauuuuaucacaaaugugacaaugaaugcauggauagugugaaaaacgggacguaugauuaucccaaguaugaagaagaaucuaaacuaaauagaaaugaaaucaaagggguaaaguugagcagcauggggguuuaucagauccuugccauuuaugcuacaguggcagguucucugucacuggcaaucaugauggcugggaucucuuucuggaugugcuccaacgggucucugcagugcagaaucugcauauga

SEQ ID NO: 41708 - RNA, 1689 nt, Artificial Sequence
  derived and/or modified CDS sequence (wt) from hemagglutinin__InfluenzaA__AFV53282
auggccaucauuuaucucauucuccuguucacagcagugagaggggaccagauaugcauuggauaccaugccaauaauuccacagagaaggucgacacaauucuagagcggaacgucacugugacucaugccaaggacauucuugagaagacccauaacggaaaguuaugcaaacuaaacggaaucccuccacuugaacuaggggacuguagcauugccggauggcuccuuggaaauccagaaugugauaggcuucuaagugugccagaaugguccuauauaauggagaaagaaaacccgagagacgguuuguguuauccaggcagcuucaaugauuaugaagaauugaaacaucuccucagcagcgugaaacauuucgagaaaguaaagauucugcccaaagauagauggacacagcauacaacaacuggagguucacgggccugcgcggugucugguaauccaucauucuucaggaacauggucuggcugacaaagaaaggaacaaauuauccgguugccaaaggaucguacaacaauacaagcggagaacaaaugcuaauaauuuggggggugcaccaucccaaugaugagacagaacaaagaacauuguaccagaaugugggaaccuauguuuccguaggcacaucaacauugaacaaaaggucaaccccagaaauagcaacaaggccuaaagugaauggacuaggaaguagaauggaauucucuuggacccucuuggauaugugggacaccauaaauuuugagaguacugguaaucuaauugcaccagaguauggauucaaaauaucgaaaagagguaguucagggaucaugaaaacagaaggaacacuugagaacugugagaccaaaugccaaacuccuuuaggagcaauaaauacaacauugccuuuucacaauguccacccacugacaauaggugagugccccaaauauguaaaauuggagaaguuggucuuagcaacaggacuaaggaauguuccccagauugaaucaagaggauuguuuggggcaauagcugguuuuauagaaggaggauggcaaggaaugguugaugguugguauggauaccaucacagcaaugaccagggaucaggguaugcagcagacaaagaauccacucaaaaggcauuugauguaaucaccaacaagguaaauucugugauugaaaagaugaacacccaauuugaagcuguugggaaagaauucaguaacuuagagagaagacuggagaacuugaacaaaaagauggaagacggguuucuagauguguggacauacaaugcugagcuucuaguucugauggaaaaugagaggacacuugacuuucaugauucuaaugucaagaaucuguaugauaaagucagaaugcagcugagagacaacgucaaagaacuaggaaauggauguuuugaauuuuaucacaaaugugaugaugaaugcaugaauagugugaaaaacgggacguaugauuaucccaaguaugaagaagagucuaaacuaaauagaaaugaaaucaaagggguaaaauugagcagcauggggguuuaucaaauccuugccauuuaugcuacaguagcagguucucugucacuggcaaucaugauggcugggaucucuuucuggaugugcuccaacgggucucugcagugcaggaucugcauauga

SEQ ID NO: 41709 - RNA, 1689 nt, Artificial Sequence
  derived and/or modified CDS sequence (wt) from hemagglutinin__InfluenzaA__AFV53293
auggccaucauuuaucucauacuccuguucacaucagugaggggggaccagauaugcauuggauaccaugccaauaauuccacagaaaaggucgacacaauucuagagcggaaugucacugugacucaugccaagaacauccuugagaagacccauaacggaaagcuaugcaaacuaaacggaaucccuccacuugaacuaggggacuguagcauugccggauggcuccuuggaaauccagaaugugauaggcuucuaagggugccagaaugguccuauauaauggagaaagaaaacccgaaauacaguuuguguuacccaggcagcuucaaugacuaugaagaauugaaacaucuccucagcagcguaaaacauuucgagaaaguaaagauucugcccaaagauggauggacacagcauacaacaaauggagguucaagggccugcgcggugucagguaacccaucauucuucaggaacauggucuggcugacaaagaaaggaccaaauuauccgguugccaaaggaucguacaacaauacgagcggagaacaaaugcuaauaauuuggggagugcaccauccuaaugaugaggcagaacaaagagcauuguaccaggaagugggaaccuauguuucugcaagcacaucaacauugaacaaaaggucaaccccagaaauagcagcaaggccuaaagugaauggacuaggaaguagaauggaauucucuuggacccucuuggauaugugggacaccauaaauuuugagagcacugguaaucuaguugcaccagaguauggauucaaaauaucgaaaagagguaguucaggggucaugaagacagaaggaacacuugagaacugugagaccaaaugccaaacuccuuugggagcaauaaauacaacacuaccuuuucacaauguccacccacugacaauaggugaaugccccaaauauguaaaaucagagaaauuggucuuagcaacaggacuaaggaauguuccccagauugaaucaagaggauuguuuggggcaauagcugguuuuauagaaggaggauggcaaggaaugguugaugguugguauggauaccaucacagcaaugaccagggaucaggguaugcagcagacaaagaauccacucaaaaggcauuugauggaaucaccaacaagguaaauucugugauugaaaagaugaacacccaauuugaagcuguugggaaagaauucagcaacuuagagaaaagacuggagaacuugaacaaaaagauggaagacggguuucuagauguguggacauacaaugcugagcuucuaguucugauggaaaaugagaggacacuugacuuucaugauucuaaugucaagaaucuguaugauaaagucagaaugcagcugagagacaacgucaaagaacuaggaaauggauguuuugaauuuuaucacaaaugugacgaugaaugcauggauagugugaaaaacgggacauaugauuaucccaaguaugaagaagaaucuaaacuaaauagaaaugaaaucaaagggguaaaauugagcagcauggggguuuaucaaauccuugccauuuaugcuacaguagcagguucucugucacuggcaaucaugauggcugggaucucuuucuggaugugcuccaacgggucucugcagugcagaaucugcauauga

SEQ ID NO: 41710 - RNA, 1689 nt, Artificial Sequence
  derived and/or modified CDS sequence (wt) from hemagglutinin__InfluenzaA__AFV53304
auggccaucauuuaucucauucuccuguucacagcagugagaggggaccagauaugcauuggauaccaugccaauaauuccacagagaaggucgacacaauucuagagcagaacgucacugugacucaugccaaggacauucuugagaagacccauaacggaaaguuaugcaaacuaaacggaaucccuccacuugaacuaggggacuguagcauugccggauggcuccuuggaaauccagaaugugauaggcuucuaagugugccagaaugguccuauauaauggagaaagaaaacccgagagacgguuuguguuauccaggcagcuucaaugauuaugaagaauugaaacaucuccucagcagcgugaaacauuucgagaaaguaaagauucugcccaaagauagauggacacagcauacaacaacuggagguucacgggccugcgcggugucugguaauccaucauucuucaggaacauggucuggcugacaaagaaagaaucaaauuauccgguugccaaaggaucguacaacaauacaagcggagaacaaaugcuaauaauuuggggggugcaccaucccaaugaugagacagaacaaagaacauuguaccagaaugugggaaccuauguuuccguaggcacaucaacauugaacaaaaggucaaccccaaacauagcaacaaggccuaaagugaauggacuaggaaguagaauggaauucucuuggacccuauuggauaugugggacaccauaaauuuugagaguacugguaaucuaauugcaccagaguauggauucaaaauaucgaaaagagguaguucagggaucaugaaaacagaaggaacacuugagaacugugagaccaaaugccaaacuccuuugggagcaauaaauacaacauugccuuuucacaauguccacccacugacaauaggugagugccccaaauauguaaaaucggagaaguuggucuuagcaacaggacuaaggaauguuccccagauugaaucaagaggauuguuuggggcaauagcugguuuuauagaaggaggauggcaaggaaugguugaugguugguauggauaccaucacagcaaugaccagggaucaggguaugcagcagacaaagaauccacucaaaaggcauuugauggaaucaccaacaagguaaauucugugauugaaaagaugaacacccaauuugaagcuguugggaaagaauucaguaacuuagagagaagacuggagaacuugaacaaaaagauggaagacggguuucuagauguguggacauacaaugcugagcuucuaguucugauggaaaaugagaggacacuugacuuucaugauucuaaugucaagaaucuguaugauaaagucagaaugcagcugagagacaacgucaaagaacuaggaaauggauguuuugaauuuuaucacaaaugugaugaugaaugcaugaauagugugaaaaacgggacguaugauuaucccaaguaugaagaagagucuaaacuaaauagaaaugaaaucaaagggguaaaauugagcagcauggggguuuaucaaauccuugccauuuaugcuacaguagcagguucucugucacuggcaaucaugauggcugggaucucuuucuggaugugcuccaacgggucucugcagugcagaaucugcauauga

SEQ ID NO: 41711 - RNA, 1689 nt, Artificial Sequence
  derived and/or modified CDS sequence (wt) from hemagglutinin__InfluenzaA__AFV53314
auggccaucauuuaucucauucuccuguucacagcagugagaggggacaagauaugcauuggauaccaugccaauaauuccacagagacggucgacacaauucuagagcggaacgucacugugacucaugccaaggacauucuugagaagacccauaacggaaaguuaugcaaacuaaacggaaucccuccacuugaacuaggggacuguagcauugccggauggcuccuuggaaauccagaaugugauaggcuucuaagugugccagaaugguccuauauaauggagaaagaaaacccgagaaacgguuuguguuauccaggcaacuucaaugauuaugaagaauugaaacaucuccucagcagcgugaaacauuucgagaaaguaaagauucugcccaaagauagauggacacagcauacaacaacuggagguucacaggccugcgcggugucugguaauccaucauucuucaggaacauggucuggcugacagagaaagaaucaaauuauccgguugccaaaggaucguacaacaauacaagcggagaacaaaugcuaauaauuuggggggugcaccaucccauugaugagacagaacaaagaacauuguaccagaaugugggaaccuauguuuccguaggcacaucaacauugaacaaaaggucaaccccagaaauagcaaaaaggccuaaagugaauggacuaggaaguagaauggaauucucuuggacccucuuggauaugugggacaccauaacuuuugagaguacugguaaucuaauugcaccagaguauggauucaaaauaucgaaaagagguaguucugggaucaugaaaacagaaggaacacuugagaacugugagaccaaaugccaaacuccuuugggagcaauaaauacaacauugccuuuucacaauguccacccacugacaauaggugagugccccaaauauguaaaaucggagaaguuggucuuagcaacaggacuaaggaauguuccccagauugaaucaagaggauuguuuggggcaauagcugguuuuauagaaggaggauggcaaggaaugguugaugguugguauggauaccaucacagcaaugaccagggaucaggguaugcagcagacaaagaauccacucaaaaggcauuugauggaaucaccaacaagguaaaugcugugauugaaaagauaaacacccaauuugaagcuguugggaaagaauucaguaacuuagagagaagacuggagaacuugaacaaaaagauggaagacggguuucuagauguguggacauacaaugcugagcuucuaguucugauggaaaaugagaggacacuugacuuucaugauucuaaugucaagaaucuguaugauaaagucagaaugcagcugagagacaacgucaaagaacuaggaaauggauguuuugaauuuuaucacaaaugugaugaugaaugcaugaauagugugaaaaacgggacguaugauuaucccaaguaugaagaagagucuaaacuaaauagaaaugaaaucaaagggguaaaauugagcagcauggggguuuaucaaauccuugccauuuaugcuacaguagcagguucucugucacuggcaaucaugauggcugggaucucuuucuggaugugcuccaacgggucucugcagugcaggaucugcauauga

SEQ ID NO: 41712 - RNA, 1689 nt, Artificial Sequence
  derived and/or modified CDS sequence (wt) from hemagglutinin__InfluenzaA__AFV53325
auggccaucauuuaucucauucuccuguucacagcagugagaggggaccaaauaugcauuggauaccaugccaauaauuccacagagaaggucgacacaauucuagagcggaacgucacugugacucaugccaaggacauucuugagaagacccauaacggaaaguuaugcaaacuaaacggaaucccuccacuugaacuaggggacuguagcauugccggauggcuccuuggaaauccagaaugugauaggcuucuaagugugccagaaugguccuauauaauggagaaagaaaacccgagagacgguuuguguuauccaggcagcuucaaugauuaugaagaauugaaacaucuccucagcagcgugaaacauuucgagaaaguaaagauucugcccaaagauagauggacacagcauacaacaacuggagguucacgggccugcgcggugucugguaauccaucauucuucaggaacauggucuggcugacaaagaaaggaucaaauuauacgguugccaaaggaucguacaacaauacaagcggagaacaaaugcuaauaauuuggggggugcaccaucccaaugaugagacagaacaaagaacauuguaccagaaugugggaaccuauguuuccguaagcacaucaacauugaacaaaaggucaaccccagaaauagcaacaaggccuaaagugaauggacuaggaaguagaauggaauucucuuggacccucuuggauaugugggacaccauaaauuuugagaguacugguaaucuaauugcuccagaguauggauucaaaauaucgaaaagagguaguucagggaucaugaaaacagaaggaacacuugagaacugugagaccaaaugccaaacuccuuugggagcaauaaauacaacauugccuuuucacaauguccacccacugacaauaggugagugccccaaauauguaaaaucggagaaguuggucuuagcaacaggacuaaggaauguuccccagauugaaucaagaggauuguuuggggcaauagcuggcuuuauagaaggaggauggcaaggaaugguugaugguugguauggauaccaucacagcaaugaccagggaucaggguaugcagcagacaaagaauccacucaaaaggcauuugauggaaucaccaacaagguaaauucugugauugaaaagaugaacacccaauuugaagcuguugggaaagaauucaguaacuuagagagaagacuggagaacuugaacaaaaagauggaagacggguuucuagauguguggacauacaaugcugagcuucuaguucugauggaaaaugagaggacacuugacuuucaugauucuaaugucaagaaucuguaugauaaagucagaaugcagcugagagacaacgucaaagaacuaggaaauggauguuuugaauuuuaucacaaaugugaugaugagugcaugaauagugugaaaaacgggacguaugauuaucccaaguaugaagaagagucuaaacuaaauagaaaugaaaucaaagggguaaaauugagcagcauggggguuuaucaaauccuugccauuuaugcuacaguagcagguucucugucacuggcaaucaugauggcugggaucucuuucuggaugugcuccaacgggucucugcagugcaggaucugcauauga

SEQ ID NO: 41713 - RNA, 1689 nt, Artificial Sequence
  derived and/or modified CDS sequence (wt) from hemagglutinin__InfluenzaA__AFV53336
auggccaucauuuaucucauacuccuguucacagcagugaggggggaccagauaugcauuggauaccaugccaauaauuccacagaaaaggucgacacaauucuagagcggaaugucacugugacucaugccaaggacauccuugagaagacccauaacggaaagcuaugcaaacuaaacggaauuccuccacuugaacuaggggauuguagcauugccggauggcuccuuggaaauccagaaugugauaggcuucuaagggugccagaaugguccuauauaauggagaaagaaaacccgagauacaguuuguguuauccaggcagcuucaaugacuaugaagaauugaaacaucuccucaguagcguaaaacaccucgagaaaguaaagauucugccaaaagauggauggacacagcaugagacagauggagguucaaaggccugcgcagugucagguaaaccaucauucuucaggaacauggucuggcugacaaagaaaggaccuaauuauccgguugccaaaagaucguacaacaauacgagcggagagcaaaugcuaauaauuuggggagugcaccauccuaaugaugaggcagaacaaagagcauuguaccagaaagugggaaccuauguuuccgcaagcacaucaacauugaacaaaaggucaaccccagaaauagcagcaaggccugaagugaguggacuaggaaguagaauggaauucucuuggacccucuuggaugugugggacaccauaaguuuugagagcacugguaaucuaguugcaccagaguauggauucaaaauaucgaaaagagguaguucagggaucaugaagacagaaggaacacuugggaacugugagaccaaaugccaaacuccuuugggagcaauaaauacaacacuaccuuuucacaauguccacccacugacaauaggugaaugccccaaauauguaaaaucggagaaauuggucuuagcaacaggacuaaggaauguuccccagauugaaucaagaggauuguuuggggcaauagcuggcuuuauagaaggaggauggcaaggaaugguugaugguugguauggauaccaucacagcaaugaccagggaucaggguaugcagcagacaaagaauccacucaaaaggcauuugacagaaucaccaacaagguaaauucugugauugaaaagaugaacacccaauuugaagcuguugggaaagaauucaguaacuuagagaaaagacuggaaaacuugaacaaaaagauggaagacggguuucuagauguguggacauacaaugcugagcuucuaguucugauggaaaaugagaggauacuugacuuucaugauucuaaugucaagaaccuguaugauaaagucagaaugcagcugagagacaacgucaaagaacuaggaaauggauguuuugaauuuuaucauaaaugugacgaugaaugcaugaauagugugaaaaaugggacguaugauuaucccaaguaugaagaagaaucuaaacuaaagagaaaugaaaucaaaggggugaaauugagcagcauggggguuuaccaaauucuugccauuuaugcuacaguugcagguucucugucacuggcaaucaugauagcugggaucucuuucuggaugugcuccaacgggucucugcagugcagaaucugcauauga

SEQ ID NO: 41714 - RNA, 1701 nt, Artificial Sequence
  derived and/or modified CDS sequence (wt) from hemagglutinin__InfluenzaA__AFV68720
augaagacuaucauugcuuugagcuacauucuaugucugguuuucgcucaaaaacuuccuggaaaugacaacagcacggcaacgcugugccuugggcaccaugcaguaccaaacggaacgauagugaaaacaaucacgaaugaccaaauugaaguuacuaaugcuacugagcugguucagaguucuucaacaggugaaauaugcgacaguccucaucagauccuugauggagaaaacugcacacuaauagaugcucuauugggagacccucagugugauggcuuccaaaauaagaaaugggaccuuuuuguugaacgaagcaaagccuacagcaacuguuacccuuaugaugugccggauuaugccucccuuaggucacuaguugccucauccggcacacuggaguuuaacaaugaaagcuucaauuggacuggagucacucaaaacggaacaagcucugcuugcauaaggagaucugauaguaguuucuuuaguagauugaauugguugacccacuuaaacuucaaauacccagcauugaacgugacuaugccaaacaaugaacaauuugacaaauuguacauuugggggguucaccacccggguacggacaaggaccaaaucuuccuguaugcucaagcaucaggaagaaucacaguaucuaccaaaagaagccaacaagcugugaucccgaauaucggaucuagacccagaauaaggaauaucccuagcagaauaagcaucuauuggacaauaguaaaaccgggagacauacuuuugauuaacagcacaggaaaucuaauugcuccuagggguuacuucaaaauacgaaguggaaaaagcucaauaaugagaucagaugcacccauuggcaaaugcaauucugaaugcaucacuccaaauggaagcauucccaaugacaaaccauuccaaaauguaaacaggaucacauacggggccugucccagauauguuaagcaaaacacucugaaauuggcaacaggaaugcgaaauguaccagaaaaacaaacuagaggcauauuuggcgcaauagcggguuucauagaaaaugguugggagggaaugguggaugguugguacgguuucaggcaucaaaauucugagggaagaggacaagcagcagaucucaaaagcacucaagcagcaaucgaucaaaucaaugggaagcugaauagauugaucgggaaaaccaacgagaaauuccaucagauugaaaaagaauucucagaagucgaagggagaauucaggaccuugagaaauauguugaggacacuaaaauagaucucuggucauacaacgcggagcuucuuguugcccuggaaaaccaacauacaauugaucuaacugacucagaaaugaacaaacuguuugaaaaaacaaagaagcaacugagggaaaaugcugaggauaugggcaauggcuguuucaaaauauaccacaaaugugacaaugccugcauaggaucaaucagaaauggaacuuauaaccacgauguauacagagaugaagcauuaaacaaccgguuccagaucaagggaguugagcugaaaucaggguacaaagauuggauccuauggauuuccuuugccauaucauguuuuuugcuuuguguugcuuuguugggguucaucaugugggccugccaaaaaggcaacauuaggugcaacauuugcauuuga

SEQ ID NO: 41715 - RNA, 1701 nt, Artificial Sequence
  derived and/or modified CDS sequence (wt) from hemagglutinin__InfluenzaA__AFX96347
augaaggcaauacuaguaguucugcuauauacauuugcaaccgcaaaugcagacacauuauguauagguuaucaugcgaacaauucaacagacacuguagacacaguacuagaaaagaauguaacaguaacacacucuguuaaccuucuagaagacaagcauaacgggaaacuaugcaaacuaagagggguagccccauugcauuuggguaaauguaacauugcuggcuggauccugggaaauccagagugugaaucacucuccacagcaagcucaugguccuacauuguggaaacaucuaguucagacaauggaacguguuacccaggagauuucaucgauuaugaggagcuaagagagcaauugagcucagugucaucauuugaaagguuugagauauuccccaagacaaguucauggcccaaucaugacucgaacaaagguguaacggcagcauguccucaugcuggagcaaaaagcuucuacaaaaauuuaauauggcuaguuaaaaaaggaaauucauacccaaagcucagcaaauccuacauuaaugauaaagggaaagaaguccucgugcuauggggcauucaccauccaucuacuagugcugaccaacaaagucucuaucagaaugcagaugcauauguuuuuguggggacaucaagauacagcaagaaguucaagccggaaauagcaauaagacccaaagugagggaucaagaagggagaaugaacuauuacuggacacuaguagagccgggagacaaaauaacauucgaagcaacuggaaaucuagugguaccgagauaugcauucgcaauggaaagaaaugcuggaucugguauuaucauuucagauacaccaguccacgauugcaauacaacuugucagacacccaagggugcuauaaacaccagccucccauuucagaauauacauccaaucacaauuggaaaauguccaaaauauguaaaaagcacaaaauugagacuggccacaggauugaggaaugucccgucuauucaaucuagaggccuauuuggggccauugccgguuucauugaagggggguggacagggaugguagauggaugguacgguuaucaccaucaaaaugagcaggggucaggauaugcagccgaccugaagagcacacagaaugccauugacgagauuacuaacaaaguaaauucuguuauugaaaagaugaauacacaguucacagcaguagguaaagaguucaaccaccuggaaaaaagaauagagaauuuaaauaaaaaaguugaugaugguuuccuggacauuuggacuuacaaugccgaacuguugguucuauuggaaaaugaaagaacuuuggacuaccacgauucaaaugugaagaacuuauaugaaaagguaagaagccaguuaaaaaacaaugccaaggaaauuggaaacggcugcuuugaauuuuaccacaaaugcgauaacacgugcauggaaagugucaaaaaugggacuuaugacuacccaaaauacucagaggaagcaaaauuaaacagagaagaaauagaugggguaaagcuggaaucaacaaggauuuaccagauuuuggcgaucuauucaacugucgccaguucauugguacugguagucucccugggggcaaucaguuucuggaugugcucuaaugggucucuacaguguagaauauguauuuaa

SEQ ID NO: 41716 - RNA, 1701 nt, Artificial Sequence
  derived and/or modified CDS sequence (wt) from hemagglutinin__InfluenzaA__AFX96359
augaaggcaauacuaguaguucugcuguauacauuugcaaccgcaaaugcagacacauuauguauagguuaucaugcgaacaauucaacagacacuguagacacaguacuagaaaagaauguaacaguaacacacucuguuaaccuucuagaagacaagcauaacgggaaacuaugcaaacuaagagggguagccccauugcauuuggguaaauguaacauugcuggcuggauccugggaaauccagagugugaaucacucuccacagcaagcucaugguccuacauuguggaaacaucuaguucagacaauggaacguguuacccaggagauuucaucgauuaugaggagcuaagagagcaauugagcucagugucaucauuugaaagguuugagauauuccccaagacaaguucauggcccaaucaugacucgaacaaagguguaacggcagcauguccucaugcuggagcaaaaagcuucuacaaaaauuuaauauggcuaguuaaaaaaggaaauucauacccaaagcucagcaaauccuacauuaaugauaaagggaaagaaguccucgugcuauggggcauucaccauccaucuacuagugcugaccaacaaagucucuaucagaaugcagauacauauguuuuuguggggacaucaagauacagcaagaaguucaagccggaaauagcaauaagacccaaagugagggaucaagaagggagaaugaacuauuacuggacacuaguagagccgggagacaaaauaacauucgaagcaacuggaaaucuagugguaccgagauaugcauucgcaauggaaagaaaugcuggaucugguauuaucauuucagauacaccaguccacgauugcaauacaacuugucagacacccaagggugcuauaaacaccagccucccauuucagaauauacauccgaucacaauuggaaaauguccaaaauauguaaaaagcacaaaauugagacuggccacaggauugaggaaugucccgucuauucaaucuagaggccuauuuggggccauugccgguuucauugaagggggguggacagggaugguagauggaugguacgguuaucaccaucaaaaugagcaggggucaggauaugcagccgaccugaagagcacacagaaugccauugacgagauuacuaacaaaguaaauucuguuauugaaaagaugaauacacaguucacagcaguagguaaagaguucaaccaccuggaaaaaagaauagagaauuuaaauaaaaaaauugaugaugguuuccuggacauuuggacuuacaaugccgaacuguugguucuauuggaaaaugaaagaacuuuggacuaccacgauucaaaugugaagaacuuauaugaaaagguaagaagccaguuaaaaaacaaugccaaggaaauuggaaacggcugcuuugaauuuuaccacaaaugcgauaacacgugcauggaaagugucaaaaaugggacuuaugacuacccaaaauacucagaggaagcaaaauuaaacagagaagaaauaaaugggguaaagcuggaaucaacaaggauuuaccagauuuuggcgaucuauucaacugucgccaguucauugguacugguagucucccugggggcaaucaguuucuggaugugcucuaaugggucucuacaguguagaauauguauuuaa

SEQ ID NO: 41717 - RNA, 1701 nt, Artificial Sequence
  derived and/or modified CDS sequence (wt) from hemagglutinin__InfluenzaA__AFX96366
augaaggcaauacuaguaguucugcuauauacauuugcaaccgcaaaugcagacacauuauguauagguuaucaugcgaacaauucaacagacacuguagacacaguacuagaaaagaauguaacaguaacacacucuguuaaccuucuagaagacaagcauaacgggaaacuaugcaaacuaagagggguagccccauugcauuuggguaaauguaacauugcuggcuggauccugggaaauccagagugugaaucacucuccacagcaagcucaugguccuacauuguggaaacaucuaguucagacaauggaacguguuacccaggagauuucaucgauuaugaggagcuaagagagcaauugagcucagugucaucauuugaaagguuugagauauuccccaagacaaguucauggcccaaucaugacucgaacaaagguguaacggcagcauguccucaugcuggagcaaaaagcuucuacaaaaauuuaauauggcuaguuaaaaaaggaaauucauacccaaagcucagcaaauccuacauuaaugauagagggaaagaaguccucgugcuauggggcauucaccauccaucuacuagugcugaccaacaaagucucuaucagaaugcagaugcauauguuuuuguggggacaucaagauacagcaagaaguucaagccggaaauagcaauaagacccaaagugagggaucaagaagggagaaugaacuauuacuggacacuaguagagccgggagacaaaauaacauucgaagcaacuggaaaucuagugguaccgagauaugcauucgcaauggaaagaaaugcuggaucugguauuaucauuucagauacaccaguccacgauugcaauacaacuugucagacacccaagggugcuauaaacaccagccucccauuucagaauauacauccgaucacaauuggaaaauguccaaaauauguaaaaagcacaaaauugagacuggccacaggauugaggaaugucccgucuauucaaucuagaggccuauuuggggccauugccgguuucauugaagggggguggacagggaugguagauggaugguacgguuaucaccaucaaaaugagcaggggucaggauaugcagccgaccugaagagcacacagaaugccauugacaagauuacuaacaaaguaaauucuguuauugaaaagaugaauacacaguucacagcaguagguaaagaguucaaccaacuggaaaaaagaauagagaauuuaaauaaaaagguugaugaugguuuccuggacauuuggacuuacaaugccgaacuguugguucuauuggaaaaugaaagaacuuuggacuaccacgauucaaaugugaagaacuuauaugaaaagguaagaagccaguuaaaaaacaaugccaaggaaauuggaaacggcugcuuugaauuuuaccacaaaugcgauaacacgugcauggaaagugucaaaaaugggacuuaugacuacccaaaauacucagaggaagcaaaauuaaacagagaggaaauagaugggguaaagcuggaaucaacaaggauuuaccagauuuuggcgaucuauucaacugucgccaguucauugguacugguagucucccugggggcaaucaguuucuggaugugcucuaaugggucucuacaguguagaauauguauuuaa

SEQ ID NO: 41718 - RNA, 1701 nt, Artificial Sequence
  derived and/or modified CDS sequence (wt) from hemagglutinin__InfluenzaA__AFX96383
augaaggcaauacuaguaguucugcuauauacauuugcaaccgcaaaugcagacacauuauguauagguuaucaugcgaacaauucaacagacacuguagacacaguacuagaaaagaauguaacaguaacacacucuguuaaccuucuagaagacaagcauaacgggaaacuaugcaaacuaagagggguagccccauugcauuuggguaaauguaacauugcuggcuggauccugggaaauccagagugugaaucacucuccacagcaagcucaugguccuacauuguggaaacaucuaguucagacaauggaacguguuacccaggagauuucaucgauuaugaggagcuaagagagcaauugagcucagugucaucauuugaaagguuugagauauuccccaagacaaguucauggcccaaucaugacucgaacaaagguguaacggcagcauguccucaugcuggagcaaaaagcuucuacaaaaauuuaauauggcuaguuaaaaaaggaaauucauacccaaagcucagcaaauccuacauuaaugauaaagggaaagaaguccucgugcuauggggcauucaccauccaucuacuagugcugaccaacaaagucucuaucagaaugcagauacauauguuuuuguggggacaucaagauacagcaagaaguucaagccggaaauagcaauaagacccaaagugagggaucaagaagggagaaugaacuauuacuggacacuaguagagccgggagacaaaauaacauucgaagcaacuggaaaucuagugguaccgagauaugcauucgcaauggaaagaaaugcuggaucugguauuaucauuucagauacaccaguccacgauugcaauacaacuugucagacacccaagggugcuauaaacaccagccucccauuucagaauauacauccgaucacaauuggaaaauguccaaaauauguaaaaagcacaaaauugagacuggccacaggauugaggaaugucccgucuauucaaucuagaggccuauuuggggccauugccgguuucauugaagggggguggacagggaugguagauggaugguacgguuaucaccaucaaaaugagcaggggucaggauaugcagccgaccugaagagcacacagaaugccauugacgagauuacuaacaaaguaaauucuguuauugaaaagaugaauacacaguucacagcaguagguaaagaguucaaccaccuggaaaaaagaauagagaauuuaaauaaaaaaauugaugaugguuuccuggacauuuggacuuacaaugccgaacuguugguucuauuggaaaaugaaagaacuuuggacuaccacgauucaaaugugaagaacuuauaugaaaagguaagaagccaguuaaaaaacaaugccaaggaaauuggaaacggcugcuuugaauuuuaccacaaaugcgauaacacgugcauggaaagugucaaaaaugggacuuaugacuacccaaaauacucagaggaagcaaaauuaaacagagaagaaauagaugggguaaagcuggaaucuacaaggauuuaccagauuuuggcgaucuauucaacugucgccaguucauugguacugguagucucccugggggcaaucaguuucuggaugugcucuaaugggucucuacaguguagaauauguauuuaa

SEQ ID NO: 41719 - RNA, 1701 nt, Artificial Sequence; identical to SEQ ID NO: 41715
  derived and/or modified CDS sequence (wt) from hemagglutinin__InfluenzaA__AFX96398

SEQ ID NO: 41720 - RNA, 1701 nt, Artificial Sequence; identical to SEQ ID NO: 41715
  derived and/or modified CDS sequence (wt) from hemagglutinin__InfluenzaA__AFX96408

SEQ ID NO: 41721 - RNA, 1701 nt, Artificial Sequence; identical to SEQ ID NO: 41715
  derived and/or modified CDS sequence (wt) from hemagglutinin__InfluenzaA__AFX96418

SEQ ID NO: 41722 - RNA, 1701 nt, Artificial Sequence; identical to SEQ ID NO: 41715
  derived and/or modified CDS sequence (wt) from hemagglutinin__InfluenzaA__AFX96428

SEQ ID NO: 41723 - RNA, 1701 nt, Artificial Sequence; identical to SEQ ID NO: 41715
  derived and/or modified CDS sequence (wt) from hemagglutinin__InfluenzaA__AFX96438

SEQ ID NO: 41724 - RNA, 1701 nt, Artificial Sequence; identical to SEQ ID NO: 41715
  derived and/or modified CDS sequence (wt) from hemagglutinin__InfluenzaA__AFX96448

SEQ ID NO: 41725 - RNA, 1701 nt, Artificial Sequence; identical to SEQ ID NO: 41715
  derived and/or modified CDS sequence (wt) from hemagglutinin__InfluenzaA__AFX96458

SEQ ID NO: 41726 - RNA, 1701 nt, Artificial Sequence; identical to SEQ ID NO: 34714
  derived and/or modified CDS sequence (wt) from hemagglutinin__InfluenzaA__AFX96468

SEQ ID NO: 41727 - RNA, 1701 nt, Artificial Sequence; identical to SEQ ID NO: 34681
  derived and/or modified CDS sequence (wt) from hemagglutinin__InfluenzaA__AFX96478

SEQ ID NO: 41728 - RNA, 1701 nt, Artificial Sequence; identical to SEQ ID NO: 34714
  derived and/or modified CDS sequence (wt) from hemagglutinin__InfluenzaA__AFX96488

SEQ ID NO: 41729 - RNA, 1701 nt, Artificial Sequence
  derived and/or modified CDS sequence (wt) from hemagglutinin__InfluenzaA__AFX96498
augaaggcaauacuaguaguucugcuauauacauuugcaaccgcaaaugcagacacauuauguauagguuaucaugcgaacaauucaacagacacuguagacacaguacuagaaaagaauguaacaguaacacacucuguuaaccuucuagaagacaagcauaacgggaaacuaugcaaacuaagagggguagccccauugcauuuggguaaauguaacauugcuggcuggauccugggaaauccagagugugaaucacucuccacagcaagcucaugguccuacauuguggaaacaucuaguucagacaauggaacguguuacccaggagauuucaucgauuaugaggagcuaagagagcaauugagcucagugucaucauuugaaagguuugagauauuccccaagacaaguucauggcccaaucaugacucgaacaaagguguaacggcagcauguccucaugcuggagcaaaaagcuucuacaaaaauuuaauauggcuaguuaaaaaaggaaauucauacccaaagaucagcaaauccuacauuaaugauaaagggaaagaaguccucgugcuauggggcauucaccauccaucuacuagugcugaccaacaaagucucuaucagaaugcagaugcauauguuuuuguggggacaucaagauacagcaagaaguucaagccggaaauagcaauaagacccaaagugagggaucaagaagggagaaugaacuauuacuggacacuaguagagccgggagacaaaauaacauucgaagcaacuggaaaucuagugguaccgagauaugcauucgcaauggaaagaaaugcuggaucugguauuaucauuucagauacaccaguccacgauugcaauacaacuugucagacacccaagggugcuauaaacaccagccucccauuucagaauauacauccgaucacaauuggaaaauguccaaaauauguaaaaagcacaaaauugagacuggccacaggauugaggaaugucccgucuauucaaucuagaggccuauuuggggccauugccgguuucauugaagggggguggacagggaugguagauggaugguacgguuaucaccaucaaaaugagcaggggucaggauaugcagccgaccugaagagcacacagaaugccauugacgagauuacuaacaaaguaaauucuguuauugaaaagaugaauacacaguucacagcaguagguaaagaguucaaccaccuggaaaaaagaauagagaauuuaaauaaaaagguugaugaugguuuccuggacauuuggacuuacaaugccgaacuguugguucuauuggaaaaugaaagaacuuuggacuaccacgauucaaaugugaagaacuuauaugaaaagguaagaagccaguuaaaaaacaaugccaaggaaauuggaaacggcugcuuugaauuuuaccacaaaugcgauaacacgugcauggaaagugucaaaaaugggacuuaugacuacccaaaauacucagaggaagcaaaauuaaacagagaagaaauagaugggguaaagcuggaaucaacaaggauuuaccagauuuuggcgaucuauucaacugucgccaguucauugguacugguagucucccugggggcaaucaguuucuggaugugcucuaaugggucucuacaguguagaauauguauuuaa

SEQ ID NO: 41730 - RNA, 1701 nt, Artificial Sequence
  derived and/or modified CDS sequence (wt) from hemagglutinin__InfluenzaA__AFX96508
augaaggcaauacuaguaguucugcuauauacauuugcaaccgcaaaugcagacacauuauguauagguuaucaugcgaacaauucaacagacacuguagacacaguacuagaaaagaauguaacaguaacacacucuguuaaccuucuagaagacaagcauaacgggaaacuaugcaaacuaagagggguagccccauugcauuuggguaaauguaacauugcuggcuggauccugggaaauccagagugugaaucacucuccacagcaagcucaugguccuacauuguggaaacaucuaguucagacaauggaacguguuacccaggagauuucaucgauuaugaggagcuaagagagcaauugagcucagugucaucauuugaaagguuugagauauuccccaagacaaguucauggcccaaucaugacucgaacaaagguguaacggcagcauguccucaugcuggagcaaaaagcuucuacaaaaauuuaauauggcuaguuaaaaaaggaaauucauacccaaagcucagcaaauccuacauuaaugauaaagggaaagaaguccucgugcuauggggcauucaccauccaucuacuagugcugaccaacaaagucucuaucagaaugcagaugcauauguuuuuguggggacaucaagauacagcaagaaguucaagccggaaauagcaauaagacccaaagugagggaucaagaagggagaaugaacuauuacuggacacuaguagagccgggagacaaaauaacauucgaagcaacuggaaaucuagugguaccgagauaugcauucgcaauggaaagaaaugcuggaucugguauuaucauuucagauacaccaguccacgauugcaauacaacuugucagacacccaagggugcuauaaacaccagccucccauuucagaauauacauccgaucacaauuggaaaauguccaaaauauguaaaaagcacaaaauugagacuggccacaggauugaggaaugucccgucuauucaaucuagaggccuauuuggggccauugccgguuucauugaagggggguggacagggaugguagauggaugguacgguuaucaccaucaaaaugagcaggggucaggauaugcagccgaccugaagagcacacagaaugccauugacgagauuacuaacaaaguaaauucuguuauugaaaagaugaauacacaguucacagcaguagguaaagaguucaaccaccuggaaaaaagaauagagaauuuaaauaaaaagguugaugaugguuuccuggacauuuggacuuacaaugccgaacuguugguucuauuggaaaaugaaagaacuuuggacuaccacgauucaaaugugaagaacuuauaugaaaagguaagaagccaguuaaaaaacaaugcuaaggaaauuggaaacggcugcuuugaauuuuaccacaaaugcgauaacacgugcauggaaagugucaaaaaugggacuuaugacuacccaaaauacucagaggaagcaaaauuaaacagagaagaaauagaugggguaaagcuggaaucaacaaggauuuaccagauuuuggcgaucuauucaacugucgccaguucauugguacugguagucucccugggggcaaucaguuucuggaugugcucuaaugggucucuacaguguagaauauguauuuaa

SEQ ID NO: 41731 - RNA, 1701 nt, Artificial Sequence; identical to SEQ ID NO: 36181
  derived and/or modified CDS sequence (wt) from hemagglutinin__InfluenzaA__AFX96518

SEQ ID NO: 41732 - RNA, 1701 nt, Artificial Sequence; identical to SEQ ID NO: 34714
  derived and/or modified CDS sequence (wt) from hemagglutinin__InfluenzaA__AFX96528

SEQ ID NO: 41733 - RNA, 1701 nt, Artificial Sequence; identical to SEQ ID NO: 36181
  derived and/or modified CDS sequence (wt) from hemagglutinin__InfluenzaA__AFX96538

SEQ ID NO: 41734 - RNA, 1701 nt, Artificial Sequence
  derived and/or modified CDS sequence (wt) from hemagglutinin__InfluenzaA__AFX96548
augaaggcaauacuaguaguucugcuauauacauuugcaaccgcaaaugcagacacauuauguauagguuaucaugcgaacaauucaacagacacuguagacacaguacuagaaaagaauguaacaguaacacacucuguuaaccuucuagaagacaagcauaacgggaaacuaugcaaacuaagagggguagccccauugcauuuggguaaauguaacauugcuggcuggauccugggaaauccagagugugaaucacucuccacagcaagcucaugguccuacauuguggaaacaucuaguucagacaauggaacguguuacccaggagauuucaucgauuaugaggagcuaagagagcaauugagcucagugucaucauuugaaagguuugagauauuccccaagacaaguucauggcccaaucaugacucgaacaaagguguaacggcagcauguccucaugcuggagcaaaaagcuucuacaaaaauuuaauauggcuaguuaaaaaaggaaauucauacccaaagcucagcaaauccuacauuaaugauaaagggaaagaaguccucgugcuauggggcauucaccauccaucuacuagugcugaccaacaaagucucuaucagaaugcagauacauauguuuuuguggggacaucaagauacagcaagaaguucaagccggaaauagcaauaagacccaaagugagggaucaagaagggagaaugaacuauuacuggacacuaguagagccgggagacaaaauaacauucgaagcaacuggaaaucuagugguaccgagauaugcauucgcaauggaaagaaaugcuggaucugguauuaucauuucagauacaccaguccacgauugcaauacaacuugucagacacccaagggugcuauaaacaccagccucccauuucagaauauacauccgaucacaauuggaaaauguccaaaauauguaaaaagcacaaaauugagacuggccacaggauugaggaaugucccgucuauucaaucuagaggccuauuuggggccauugccgguuucauugaagggggguggacagggaugguagauggaugguacgguuaucaccaucaaaaugagcaggggucaggauaugcagccgaccugaagagcacacagaaugccauugacaagauuacuaacaaaguaaauucuguuauugaaaagaugaauacacaguucacagcaguagguaaagaguucaaccaccuggaaaaaagaauagagaauuuaaauaaaaaaauugaugaugguuuccuggacauuuggacuuacaaugccgaacuguugguucuauuggaaaaugaaagaacuuuggacuaccacgauucaaaugugaagaacuuauaugaaaagguaagaagccaguuaaaaaacaaugccaaggaaauuggaaacggcugcuuugaauuuuaccacaaaugcgauaacacgugcauggaaagugucaaaaaugggacuuaugacuacccaaaauacucagaggaagcaaaauuaaacagagaagaaauagaugggguaaagcuggaaucaacaaggauuuaccagauuuuggcgaucuauucaacugucgccaguucauugguacugguagucucccugggggcaaucaguuucuggaugugcucuaaugggucucuacaguguagaauauguauuuaa

SEQ ID NO: 41735 - RNA, 1701 nt, Artificial Sequence; identical to SEQ ID NO: 34714
  derived and/or modified CDS sequence (wt) from hemagglutinin__InfluenzaA__AFX96558

SEQ ID NO: 41736 - RNA, 1701 nt, Artificial Sequence; identical to SEQ ID NO: 36025
  derived and/or modified CDS sequence (wt) from hemagglutinin__InfluenzaA__AFX96568

SEQ ID NO: 41737 - RNA, 1701 nt, Artificial Sequence
  derived and/or modified CDS sequence (wt) from hemagglutinin__InfluenzaA__AFX96578
augaaggcaauacuaguaguucugcuauauacauuugcaaccgcaaaugcagacacauuauguauagguuaucaugcgaacaauucaacagacacuguagacacaguacuagaaaagaauguaacaguaacacacucuguuaaccuucuagaagacaagcauaacgggaaacuaugcaaacuaagagggguagccccauugcauuuggguaaauguaacauugcuggcuggauccugggaaauccagagugugaaucacucuccacagcaagcucaugguccuacauuguggaaacaucuaguucagacaauggaacauguuacccaggagauuucaucgauuaugaggagcuaagagagcaauugagcucagugucaucauuugaaagguuugagauguuccccaagacaaguucauggcccaaucaugacucgaacaaagguguaacggcagcauguccucaugcuggagcaaaaagcuucuacaaaaauuuaauauggcuaguuaaaaaaggaaauucauacccaaagcucagcaaauccuacauuaaugauaaagggaaagaaguccucgugcuauggggcauucaccauccauccacuagugcugaccaacaaagucucuaucagaaugcagaugcauauguuuuuguggggacaucaagauacagcaagaaguucaagccggaaauagcaauaagacccaaagugagggaucaagaagggagaaugaacuauuacuggacacuaguagagccgggagacaaaauaacauucgaagcaacuggaaaucuagugguaccgagauacgcauucgcaauggaaagaaaugcuggaucugguauuaucauuucagauacaccaguccacgauugcaauacaacuugucagacacccaagggugcuauaaacaccagccucccauuucagaauauacauccgaucacaauuggaaaauguccaaaauauguaaaaagcacaaaauugagacuggccacaggauugaggaaugucccgucuauucaaucuagaggccuauuuggggccauugccgguuucauugaagggggguggacagggaugguagauggaugguacgguuaucaccaucaaaaugagcaggggucaggauaugcagccgaccugaagagcacacagaaugccauugacgagauuacuaacaaaguaaauucuguuauugaaaagaugaauacacaguucacagcaguagguaaagaauucaaccaccuggaaaaaagaauagagaauuuaaauaaaaaaguugaugaugguuuccuggacauuuggacuuacaaugccgaacuguugguucuauuggaaaaugaaagaacuuuggacuaccacgauucaaaugugaagaacuuauaugaaaagguaagaagccaguuaaaaaacaaugccaaggaaauuggaaacggcugcuuugaauuuuaccacaaaugcgauaacacgugcauggaaagugucaaaaaugggacuuaugacuacccaaaauacucagaggaagcaaaauuaaacagagaagaaauagaugggguaaagcuggaaucaacaaggauuuaccagauuuuggcgaucuauucaacugucgccaguucauugguacugguagucucccugggggcaaucaguuucuggaugugcucuaaugggucucuacaguguagaauauguauuuaa

SEQ ID NO: 41738 - RNA, 1701 nt, Artificial Sequence; identical to SEQ ID NO: 34714
  derived and/or modified CDS sequence (wt) from hemagglutinin__InfluenzaA__AFX96588

SEQ ID NO: 41739 - RNA, 1701 nt, Artificial Sequence; identical to SEQ ID NO: 34714
  derived and/or modified CDS sequence (wt) from hemagglutinin__InfluenzaA__AFX96598

SEQ ID NO: 41740 - RNA, 1701 nt, Artificial Sequence
  derived and/or modified CDS sequence (wt) from hemagglutinin__InfluenzaA__AFX96608
augaaggcaauacuaguaguucugcuauauacauuugcaaccgcaaaugcagacacauuauguauagguuaucaugcgaacaauucaacagacacuguagacacaguacuagaaaagaauguaacaguaacacacucuguuaaccuucuagaagacaagcauaacgggaaacuaugcaaacuaagagggguagccccauugcauuuggguaaauguaacauugcuggcuggauccugggaaauccagagugugaaucacucuccacagcaagcucaugguccuacauuguggaaacaucuaguucagacaauggaacguguuacccaggagauuucaucgauuaugaggagcuaagagagcaauugagcucagugucaucauuugaaagguuugagauauuccccaagacaaguucauggcccaaucaugacucgaacaaagguguaacggcagcauguccucaugcuggagcaaaaagcuucuacaaaaauuuaauauggcuaguuaaaaaaggaaauucauacccaaagcucagcaaauccuacauuaaugauaaagggaaagaaguccucgugcuauggggcauucaccauccaucuacuagugcugaccaacaaagucucuaucagaaugcagaugcauauguuuuuguggggacaucaagauacagcaagaaguucaagccggaaauagcaauaagacccaaagugagggaucaagaagggagaaugaacuauuacuggacacuaguagagccgggagacaaaauaacauucgaagcaacuggaaaucuagugguaccgagauaugcauucgcaauggaaagaaaugcuggaucugguauuaucauuucagauacaccaguccacgauugcaauacaacuugucagacacccaagggugcuauaaacaccagccucccauuucagaauauacauccgaucacaauuggaaaauguccaaaauauguaaaaagcacaaaauugagacuggccacaggauugaggaaugucccgucuauucaaucuagaggccuauuuggggccauugccgguuucauugaagggggguggacagggaugguagauggaugguacgguuaucaccaucaaaaugagcaggggucaggauaugcagccgaccugaagagcacacagaaugccauugacgagauuacuaacaaaguaaauucuguuauugaaaagaugaauacacaguucacagcaguagguaaagaguucaaccaccuggaaaaaagaauagagaauuuaaauaaaaaaguugaugaugguuuccuggacauuuggacuuacaaugccgaacuguugguucuauuggaaaaugaaagaacuuuggacuaccacgauucaaaugugaagaacuuauaugaaaagguaagaagccaguuaaaaaacaaugccaaggaaauuggaaacggcugcuuugaauuuuaccacaaaugcgauaacacgugcauggaaagugucaaaaaugggacuuaugacuacccaaaauacucagaggaagcaaaauuaaacagagaaaaaauagaugggguaaagcuggaaucaacaaggauuuaccagauuuuggcgaucuauucaacucucgccaguucauuggugcugguagucucccugggggcaaucaguuucuggaugugcucuaaugggucucuacaguguagaauauguauuuaa

SEQ ID NO: 41741 - RNA, 1701 nt, Artificial Sequence
  derived and/or modified CDS sequence (wt) from hemagglutinin__InfluenzaA__AFX96618
augaaggcaauacuaguaguucugcuauauacauuugcaaccgcaaaugcagacacauuauguauagguuaucaugcgaacaauucaacagacacuguagacacaguacuagaaaagaauguaacaguaacacacucuguuaaccuucuagaagacaagcauaacgggaaacuaugcaaacuaagagggguagccccauugcauuuggguaaaugcaacauugcuggcuggauccugggaaauccagagugugaaucacucuccacagcaagcucaugguccuacauuguggaaacaucuaguucagacaauggaacguguuacccaggagauuucaucgauuaugaggagcuaagagagcaauugagcucagugucaucauuugaaagguuugagauauuccccaagacaaguucauggcccaaucaugacucgaacaaagguguaacggcagcauguccucaugcuggagcaaaaagcuucuacaaaaauuuaauauggcuaguuaaaaaaggaaauucauacccaaagcucagcaaauccuacauuaaugauaaagggaaagaaguccucgugcuauggggcauucaccauccaucuacuagugcugaccaacaaagucucuaucagaaugcagaugcauauguuuuuguggggacaucaagauacagcaagaaguucaagccggaaauagcaauaagacccaaagugagggaucaagaagggagaaugaacuauuacuggacacuaguagagccgggagacaaaauaacauucgaagcaacuggaaaucuagugguaccgagauaugcauucgcaauggaaagaaaugcuggaucugguauuaucauuucagauacaccaguccacgauugcaauacaacuugucagacacccaagggugcuauaaacaccagccucccauuucagaauauacauccgaucacaauuggaaaauguccaaaauauguaaaaagcacaaaauugagacuggccacaggauugaggaaugucccgucuauucaaucuagaggccuauuuggggccauugccgguuucauugaagggggguggacagggaugguagauggaugguacgguuaucaccaucaaaaugagcaggggucaggauaugcagccgaccugaagagcacacagaaugccauugacgagauuacuaacaaaguaaauucuguuauugaaaagaugaauacacaguucacagcaguagguaaagaguucaaccaccuggaaaaaagaauagagaauuuaaauaaaaagguugaugaugguuuccuggacauuuggacuuacaaugccgaacuguugguucuauuggaaaaugaaagaacuuuggacuaccacgauucaaaugugaagaacuuauaugaaaagguaagaagccaguuaaaaaacaaugccaaggaaauuggaaacggcugcuuugaauuuuaccacaaaugcgauaacacgugcauggaaagugucaaaaaugggacuuaugacuacccaaaauacucagaggaagcaaaauuaaacagagaagaaauagaugggguaaagcuggaaucaacaaggauuuaccagauuuuggcgaucuauucaacugucgccaguucauugguacugguagucucccugggggcaaucaguuucuggaugugcucuaaugggucucuacaguguagaauauguauuuaa

SEQ ID NO: 41742 - RNA, 1701 nt, Artificial Sequence
  derived and/or modified CDS sequence (wt) from hemagglutinin__InfluenzaA__AFX96628
augaaggcaauacuaguaguucugcuauauacauuugcaaccgcaaaugcagacacauuaugcauagguuaucaugcgaacaauucaacagacacuguagacacaguacuagaaaagaauguaacaguaacacacucuguuaaccuucuagaagacaagcauaacgggaaacuaugcaaacuaagagggguagccccauugcauuuggguaaauguaacauugcuggcuggauccugggaaauccagagugugaaucacucuccacagcaagcucaugguccuacauuguggaaacaucuaguucagacaauggaacauguuacccaggagauuucaucgauuaugaggagcuaagagagcaauugagcucagugucaucauuugaaagguuugagauguuccccaagacaaguucauggcccaaucaugacucgaacaaagguguaacggcagcauguccucaugcuggagcaaaaagcuucuacaaaaauuuaauauggcuaguuaaaaaaggaaacucauacccaaagcucagcaaauccuacauuaaugauaaagggaaagaaguccucgugcuauggggcauucaccauccauccacuagugcugaccaacaaagucucuaucagaaugcagaugcauauguuuuuguggggacaucaagauacagcaagaaguucaagccggaaauagcaauaagacccaaagugagggaucaagaagggagaaugaacuauuacuggacacuaguagagccgggagacaaaauaacauucgaagcaacuggaaaucuagugguaccgagauacgcauucgcaauggaaagaaaugcuggaucugguauuaucauuucagauacaccaguccacgauugcaauacaacuugucagacacccaagggugcuauaaacaccagccucccauuucagaauauacauccgaucacaauuggaaaauguccaaaauauguaaaaagcacaaaauugagacuggccacaggauugaggaaugucccgucuauucaaucuagaggccuauuuggggccauugccgguuucauugaagggggguggacagggaugguagauggaugguacgguuaucaccaucaaaaugagcaggggucaggauaugcagccgaccugaagagcacacagaaugccauugacgagauuacuaacaaaguaaauucuguuauugaaaagaugaauacacaguucacagcaguagguaaagaguucaaccaccuggaaaaaagaauagagaauuuaaauaaaaaaguugaugaugguuuccuggacauuuggacuuacaaugccgaacuguugguucuauuggaaaaugaaagaacuuuggacuaccacgauucaaaugugaagaacuuauaugaaaagguaagaagccaguuaaaaaacaaugccaaggaaauuggaaacggcugcuuugaauuuuaccacaaaugcgauaacacgugcauggaaagugucaaaaaugggacuuaugacuacccaaaauacucagaggaagcaaaauuaaacagagaagaaauagaugggguaaagcuggaaucaacaaggauuuaccagauuuuggcgaucuauucaacugucgccaguucauugguacugguagucucccugggggcaaucaguuucuggaugugcucuaaugggucucuacaguguagaauauguauuuaa

SEQ ID NO: 41743 - RNA, 1701 nt, Artificial Sequence
  derived and/or modified CDS sequence (wt) from hemagglutinin__InfluenzaA__AFX96638
augaaggcaauacuaguaguucugcuauauacauuugcaaccgcaaaugcagacacauuauguauagguuaucaugcgaacaauucaacagacacuguagacacaguacuagaaaagaauguaacaguaacacacucuguuaaccuucuagaagacaagcauaacgggaaacuaugcaaacuaagagggguagccccauugcauuuggguaaauguaacauugcuggcuggauccugggaaauccagagugugaaucacucuccacagcaagcucaugguccuacauuguggaaacaucuaguucagacaauggaacguguuacccaggagauuucaucaauuaugaggagcuaagagagcaauugagcucagugucaucauuugaaagguuugagauauuccccaagacaaguucauggcccaaucaugacucgaacaaagguguaacggcagcauguccucaugcuggagcaaaaagcuucuacaaaaauuuaguauggcuaguuaaaaaaggaaauucauacccaaagcucagcaaauccuacauuaaugauaaagggaaagaaguccucgugcuauggggcauucaccauccaucuacuagugcugaccaacaaagucucuaccagaaugcagaugcauauguuuuuguggggacaucaagauacagcaagaaguucaagccggaaauagcaauaagacccaaagugagggaucaagaagggagaaugaacuauuacuggacacuaguagagccgggagacaaaauaacauucgaagcaacuggaaaucuaaugguaccgagauaugcauucgcaauggaaagaaaugcuggaucugguauuaucauuucagauacaccaguccacgauugcaauacaacuugucagacacccaagggugcuauaaacaccagccucccauuucagaauauacauccgaucacaauuggaaaauguccaaaauauguaaaaagcacaaaauugagacuggccacaggauugaggaaugucccgucuauucaaucuagaggccuauuuggggccauugccgguuucauugaagggggguggacagggaugguagauggaugguacgguuaucaccaucaaaaugagcaggggucaggauaugcagccgaccugaagagcacacagaaugccauugacgagauuacuaacaaaguaaauucuguuauugaaaagaugaauacacaguucacagcaguagguaaagaguucaaccaccuggaaaaaagaauagaaaauuuaaauaaaaagguugaugaugguuuccuggacauuuggacuuacaaugccgaacuguugguucuauuggaaaaugaaagaacuuuggacuaccacgauucaaaugugaagaacuuauaugaaaagguaagaagccaguuaaaaaacaaugccaaggaaauuggaaacggcuguuuugaauucuaccacaaaugcgauaacacgugcauggaaagugucaaaaaugggacuuaugacuacccaaaauacucagaggaagcaaaauuaaacagagaagaaauagaugggguaaagcuggaaucaacaaggauuuaccagauuuuggcgaucuauucaacugucgccaguucauugguacugguagucucccugggggcaaucaguuucuggaugugcucuaaugggucucuacaguguagaauauguauuuaa

SEQ ID NO: 41744 - RNA, 1701 nt, Artificial Sequence
  derived and/or modified CDS sequence (wt) from hemagglutinin__InfluenzaA__AFX96648
augaaggcaauacuaguaguucugcuauauacauuugcaaccgcaaaugcagacacauuauguauagguuaucaugcgaacaauucaacagacacuguagacacaguacuagaaaagaauguaacaguaacacacucuguuaaccuucuagaagacaagcauaacgggaaacuaugcaaacuaagagggguagccccauugcauuuggguaaauguaacauugcuggcuggauccugggaaauccagagugugaaucacucuccacagcaagcucaugguccuacauuguggaaacaucuaguucagacaauggaacguguuacccaggagauuucaucgauuaugaggagcuaagagagcaauugagcucagugucaucauuugaaagguuugagauauuccccaagacaaguucauggcccaaucaugacucgaacaaagguguaacggcagcauguccucaugcuggagcaaaaagcuucuacaaaaauuuaauauggcuaguuaaaaaaggaaauucauacccaaagcucagcaaauccuacauuaaugauaaagggaaagaaguucucguucuauggggcauucaccauccaucuacuagugcugaccaacaaagucucuaccagaaugcagaugcauauguuuuuguggggacaucaagauacagcaagaaguucaagccggaaauagcaauaagacccaaagugagggaucaagaagggagaaugaacuauuacuggacacuaguagagccgggagacaaaauaacauucgaagcaacuggaaaucuagugguaccgagauaugcauucgcaauggaaagaaaugcuggaucugguauuaucauuucagauacaccaguccacgauugcaauacaacuugucagacacccaagggugcuauaaacaccagccucccauuucagaauauacauccgaucacaauuggaaaauguccaaaauauguaaaaagcacaaaauugagacuggccacaggauugaggaaugucccgucuauucaaucuagaggccuauuuggggccauugccgguuucauugaagggggguggacagggaugguagauggaugguacgguuaucaccaucaaaaugagcaggggucaggauaugcagccgaccugaagagcacacagaaugccauugacgagauuacuaacaaaguaaauucuguuauugaaaagaugaauacacaguucacagcaguagguaaagaguucaaccaccuggaaaaaagaauagagaauuuaaauaaaaagguugaugaugguuuccuggacauuuggacuuacaaugccgaacuguugguucuauuggaaaaugaaagaacuuuggacuaccacgauucaaaugugaagaacuuauaugaaaagguaagaagccaguuaaaaaacaaugccaaggaaauuggaaacggcugcuuugaauuuuaccacaaaugcgauaacacgugcauggaaagugucaaaaaugggacuuaugacuacccaaaauacucagaggaagcaaaauuaaacagagaagaaauagaugggguaaagcuggaaucaacaaggauuuaccagauuuuggcgaucuauucaacugucgccaguucauugguacugguagucucccugggggcaaucaguuucuggaugugcucuaaugggucucuacaguguagaauauguauuuaa

SEQ ID NO: 41745 - RNA, 1701 nt, Artificial Sequence; identical to SEQ ID NO: 36025
  derived and/or modified CDS sequence (wt) from hemagglutinin__InfluenzaA__AFX96658

SEQ ID NO: 41746 - RNA, 1701 nt, Artificial Sequence
  derived and/or modified CDS sequence (wt) from hemagglutinin__InfluenzaA__AFX96668
augaaggcaauacuaguaguucugcuauauacauuugcaaccgcaaaugcagacacauuauguauagguuaucaugcgaacaauucaacagacacuguagacacaguacuagaaaagaauguaacaguaacacacucuguuaaccuucuagaagacaagcauaacgggaaacuaugcaaacuaagagggguagccccauugcauuuggguaaauguaacauugcuggcuggauccugggaaauccagagugugaaucacucuccacagcaagcucaugguccuacauuguggaaacaucuaguucagacaauggaacguguuacccaggagauuucaucgauuaugaggagcuaagagagcaauugagcucagugucaucauuugaaagguuugagauauuccccaagacaaguucauggcccaaucaugacucgaacaaagguguaacggcagcauguccucaugcuggagcaaaaagcuucuacaaaaauuuaauauggcuaguuaaaaaaggaaauucauacccaaagcucagcaaauccuacauuaaugauaaagggaaagaaguccucgugcuauggggcauucaccauccaucuacuagugcugaccaacaaagucucuaucagaaugcagaugcauauguuuuuguggggacaucaagauacagcaagaaguucaagccggaaauagcaauaagacccaaagugagggaucaagaagggagaaugaacuauuacuggacacuaguagagccgggagacaaaauaacauucgaagcaacuggaaaucuagugguaccgagauaugcauucgcaauggaaagaaaugcuggaucugguauuaucauuucagauacaccaguccacgauugcaauacaacuugucagacacccaagggugcuauaaacaccagccucccauuucagaauauacauccgaucacaauuggaaaauguucaaaauauguaaaaagcacaaaauugagacuggccacaggauugaggaaugucccgucuauucaaucuagaggccuauuuggggccauugccgguuucauugaagggggguggacagggaugguagauggaugguacgguuaucaccaucaaaaugagcaggggucaggauaugcagccgaccugaagagcacacagaaugccauugacgagauuacuaacaaaguaaauucuguuauugaaaagaugaauacacaguucacagcaguagguaaagaguucaaccaccuggaaaaaagaauagagaauuuaaauaaaaagguugaugaugguuuccuggacauuuggacuuacaaugccgaacuguugguucuauuggaaaaugaaagaacuuuggacuaccacgauucaaaugugaagaacuuauaugaaaagguaagaagccaguuaaaaaacaaugccaaggaaauuggaaacggcugcuuugaauuuuaccacaaaugcgauaacacgugcauggaaagugucaaaaaugggacuuaugacuacccaaaauacucagaggaagcaaaguuaaacagagaagaaauagaugggguaaagcuggaaucaacaaggauuuaccagauuuuggcgaucuauucaacugucgccaguucauugguacugguagucucccugggggcaaucaguuucuggaugugcucuaaugggucucuacaguguagaauauguauuuaa

SEQ ID NO: 41747 - RNA, 1701 nt, Artificial Sequence
  derived and/or modified CDS sequence (wt) from hemagglutinin__InfluenzaA__AFX96678
augaaggcaauacuaguaguucugcuauauacauuugcaaccgcaaaugcagacacauuauguauagguuaucaugcgaacaauucaacagacacuguagacacaguacuagaaaagaauguaacaguaacacacucuguuaaccuucuagaagacaagcauaaugggaaacuaugcaaacuaagagggguagccccauugcauuuggguaaauguaacauugcuggcuggauccugggaaauccagagugugaaucacucuccacagcaagcucaugguccuacauuguggaaacaucuaguucagacaauggaacguguuacccaggagauuucaucgauuaugaggagcuaagagagcaauugagcucagugucaucauuugaaagguuugagauauuccccaagacaaguucauggcccaaucaugacucgaacaaagguguaacggcagcauguucucaugcuggagcaaaaagcuucuacaaaaauuuaauauggcuaguuaaaaaaggaaauucauacccaaagcucagcaaauccuacauuaaugauaaagggaaagaaguccucgugcuauggggcauucaccauccaucuacuagugcugaccaacaaagucucuaucagaaugcagaugcauauguuuuuguggggacaucaagauacagcaagaaguucaagccggaaauagcaauaagacccaaagugagggaucaagaagggagaaugaacuauuacuggacacuaguagagccgggagacaaaauaacauucgaagcaacuggaaaucuagugguaccgagauaugcauucgcaauggaaagaaaugcuggaucugguauuaucauuucagauacaccaguccacgauugcaauacaacuugucagacacccaagggugcuauaaacaccagccucccauuucagaauauacauccgaucacaauuggaaaauguccaaaauauguaaaaagcacaaaauugagacuggccacaggauugaggaaugucccgucuauucaaucuagaggccuauuuggggccauugccgguuucauugaagggggguggacagggaugguagauggaugguacgguuaucaccaucaaaaugagcaggggucaggauaugcagccgaccugaagagcacacagaaugccauugacgagauuacuaacaaaguaaauucuguuauugaaaagaugaauacacaguucacagcaguagguaaagaguucaaccaccuggaaaaaagaauagagaauuuaaauaaaaagguugaugaugguuuccuggacauuuggacuuacaaugccgaacuguugguucuauuggaaaaugaaagaacuuuggacuaccacgauucaaaugugaagaacuuauaugaaaagguaagaagccaguuaaaaaacaaugccaaggaaauuggaaacggcugcuuugaauuuuaccacaaaugcgauaacacgugcauggaaagugucaaaaaugggacuuaugacuacccaaaauacucagaggaagcaaaauuaaacagagaagaaauagaugggguaaagcuggaaucaacaaggauuuaccagauuuuggcgaucuauucaacugucgccaguucauugguacugguagucucccugggggcaaucaguuucuggaugugcucuaaugggucucuacaguguagaauauguauuuaa

SEQ ID NO: 41748 - RNA, 1701 nt, Artificial Sequence
  derived and/or modified CDS sequence (wt) from hemagglutinin__InfluenzaA__AFX96688
augaaggcaauacuaguaguucugcuauauacauuugcaaccgcaaaugcagacacauuauguauagguuaucaugcgaacaauucaacagacacuguagacacaguacuagaaaagaauguaacaguaacacacucuguuaaccuucuagaagacaagcauaacgggaaacuaugcaaacuaagagggguagccccauugcauuuggguaaauguaacauugcuggcuggauccugggaaauccagauugugaaucacucuccacagcaagcucaugguccuacauuguggaaacaucuaguucagacaauggaacauguuacccaggagauuucaucgauuaugaggagcuaagagagcaauugagcucagugucaucauuugaaagguuugagauguuccccaagacaaguucauggcccaaucaugacucgaacaaagguguaacggcagcauguccucaugcuggagcaaaaagcuucuacaaaaauuuaauauggcuaguuaaaaaaggaaauucauacccaaagcucagcaaauccuacauuaaugauaaagggaaagaaguccucgugcuauggggcauucaccauccauccacuagugcugaccaacaaagucucuaucagaaugcagaugcauauguuuuuguggggacaucaagauacagcaagaaguucaagccggaaauagcaauaagacccaaagugagggaucaagaagggagaaugaacuauuacuggacacuaguagagccgggagacaaaauaacauucgaagcuacuggaaaucuagugguaccgagauacgcauucgcaauggaaagaaaugauggaucugguauuaucauuucagauacaccaguccacgauugcaauacaacuugucagacacccaagggugcuauaaacaccagccucccauuucagaauauacauccgaucacaauuggaaaauguccaaaauauguaaaaagcacaaaauugagacuggccacaggauugaggaaugucccgucuauucaaucuagaggccuauuuggggccauugccgguuucauugaagggggguggacagggaugguagauggaugguacgguuaucaccaucaaaaugagcaggggucaggauaugcagccgaccugaagagcacacagaaugccauugacgagauuacuaacaaaguaaauucuguuauugaaaagaugaauacacaguucacagcaguagguaaagaguucaaccaccuggaaaaaagaauagagaauuuaaauaaaaaaguugaugaugguuuccuggacauuuggacuuacaaugccgaacuguugguucuauuggaaaaugaaagaacuuuggacuaccacgauucaaaugugaagaacuuauaugaaaagguaagaagccaguuaaaaaacaaugccaaggaaauuggaaacggcugcuuugaauuuuaccacaaaugcgauaacacgugcauggaaagugucaaaaaugggacuuaugacuacccaaaauacucagaggaagcaaaauuaaacagagaagaaauagaugggguaaagcuggaaucaacaaggauuuaccagauuuuggcgaucuauucaacugucgccaguucauugguacugguagucucccugggggcaaucaguuucuggaugugcucuaaugggucucuacaguguagaauauguauuuaa

SEQ ID NO: 41749 - RNA, 1701 nt, Artificial Sequence
  derived and/or modified CDS sequence (wt) from hemagglutinin__InfluenzaA__AFX96698
augaaggcaauacuaguaguucugcuauauacauuugcaaccgcaaaugcagacacauuauguauagguuaucaugcgaacaauucaacagacacuguagacacaguacuagaaaagaauguaacaguaacacacucuguuaaccuucuagaagacaagcauaacgggaaacuaugcaaacuaagagggguagccccauugcauuuggguaaauguaacauugcuggcuggauccugggaaauccagagugugaaucacucuccacagcaagcucauggucauacauuguggaaacaucuaguucagacaauggaacguguuacccaggagauuucaucgauuaugaggagcuaagagagcaauugagcucagugucaucauuugaaagguuugaaauauuccccaagacaaguucauggcccaaucaugacucgaacaaagguguaacggcagcauguccucaugcuggagcaaaaagcuucuacaaaaauuuaauauggcuaguuaaaaaaggaaauucauacccaaagcucagcaaauccuacauuaaugauaaagggaaagaaguccucgugcuauggggcauucaccauccaucuacuagugcugaccaacaaagucucuaucagaaugcagaugcauauguuuuuguggggacaucaagauacagcaagaaguucaagccggaaauagcaauaagacccaaagugagggaucaagaagggagaaugaacuauuacuggacacuaguagagccgggagacaaaauaacauucgaagcaacuggaaaucuagugguaccgagauaugcauucgcaauggaaagaaaugcuggaucugguauuaucauuucagauacaccaguccacgauugcaauacaacuugucagacacccaagggugcuauaaacaccagccucccauuucagaauauacauccgaucacaauuggaaaauguccaaaauauguaaaaagcacaaaauugagacuggccacaggguugaggaaugucccgucuauucaaucuagaggccuauuuggggccauugccgguuucauugaagggggguggacagggaugguagauggaugguacgguuaucaccaucaaaaugagcaggggucaggauaugcagccgaccugaagagcacacagaaugccauugacgagauuacuaacaaaguaaauucuguuauugaaaagaugaauacacaguucacagcaguagguaaagaguucaaccaccuggaaaaaagaauagagaauuuaaauaaaaagguugaugaugguuuccuggacauuuggacuuacaaugccgaacuguugguucuauuggaaaaugaaagaacuuuggacuaccacgauucaaaugugaagaacuuauaugaaaagguaagaagccaguuaaaaaacaaugccaaggaaauuggaaacggcugcuuugaauuuuaccacaaaugcgauaacacgugcauggaaagugucaaaaaugggacuuaugacuacccaaaauacucagaggaagcaaaauuaaacagagaagaaauagaugggguaaagcuggaaucaacaaggauuuaccagauuuuggcgaucuauucaacugucgccaguucauugguacugguagucucccugggggcaaucaguuucuggaugugcucuaaugggucucuacaguguagaauauguauuuaa

SEQ ID NO: 41750 - RNA, 1701 nt, Artificial Sequence
  derived and/or modified CDS sequence (wt) from hemagglutinin__InfluenzaA__AFX96718
augaaggcaauacuaguaguucugcuauauacauuugcaaccgcaaaugcagacacauuauguauagguuaucaugcgaacaauucaacagacacuguagacacaguacuagaaaagaauguaacaguaacacacucuguuaaccuucuagaagacaagcauaacgggaaacuaugcaaacuaagagggguagccccauugcauuuggguaaauguaacauugcuggcuggauccugggaaauccagagugugaaucacucuccacagcaagcucaugguccuacauuguggaaacaucuaguucagacaauggaacguguuacccaggagauuucaucgauuaugaggagcuaagagagcaauugagcucagugucaucauuugaaagguuugagauauuccccaagacaaguucauggcccaaucaugacucgaacaaagguguaacggcagcauguccucaugcuggagcaaaaagcuucuacaaaaauuuaauauggcuaguuaaaaaaggaaauucauacccaaagaucagcaaauccuacauuaaugauaaagggaaagaaguccucgugcuauggggcauucaccauccaucuacuagugcugaccaacaaagucucuaucagaaugcagauacauauguuuuuguggggacaucaagauacagcaagaaguucaagccggaaauagcaauaagacccaaagugagggaucaagaagggagaaugaacuauuacuggacacuaguagagccgggagacaaaauaacauucgaagcaacuggaaaucuagugguaccgagauaugcauucgcaauggaaagaaaugcuggaucugguauuaucauuucagauacaccaguccacgauugcaauacaacuugucagacacccaagggugcuauaaacaccagccucccauuucagaauauacauccgaucacaauuggaaaauguccaaaauauguaaaaagcacaaaauugagacuggccacaggauugaggaaugucccgucuauucaaucuagaggccuauuuggggccauugccgguuucauugaagggggguggacagggaugguagauggaugguacgguuaucaccaucaaaaugagcaggggucaggauaugcagccgaccugaagagcacacagaaagccauugacgagauuacuaacaaaguaaauucuguuauugaaaagaugaauacacaguucacagcaguagguaaagaguucaaccaccuggaaaaaagaauagagaauuuaaauaaaaaaauugaugaugguuuccuggacauuuggacuuacaaugccgaacuguugguucuauuggaaaaugaaagaacuuuggacuaccacgauucaaaugugaagaacuuauaugaaaagguaagaagccaguuaaaaaacaaugccaaggaaauuggaaacggcugcuuugaauuuuaccacaaaugcgauaacacgugcauggaaagugucaaaaaugggacuuaugacuacccaaaauacucagaggaagcaaaauuaaacagagaagaaauagaugggguaaagcuggaaucaacaaggauuuaccagauuuuggcgaucuauucaacugucgccaguucauugguacugguagucucccugggggcaaucaguuucuggaugugcucuaaugggucucuacaguguagaauauguauuuaa

SEQ ID NO: 41751 - RNA, 1701 nt, Artificial Sequence; identical to SEQ ID NO: 41750
  derived and/or modified CDS sequence (wt) from hemagglutinin__InfluenzaA__AFX96728

SEQ ID NO: 41752 - RNA, 1701 nt, Artificial Sequence; identical to SEQ ID NO: 40224
  derived and/or modified CDS sequence (wt) from hemagglutinin__InfluenzaA__AFX96738

SEQ ID NO: 41753 - RNA, 1701 nt, Artificial Sequence
  derived and/or modified CDS sequence (wt) from hemagglutinin__InfluenzaA__AFX96748
augaaggcaauacuaguaguucugcuauauacaauugcaaccgcaaaugcagacacauuauguauagguuaucaugcgaacaauucaacagacacuguagacacaguaauagaaaagaauguaacaguaacacacucuguuaaccuuuuagaagacaagcauaacgggaaacuaugcaaacuaagagggguagccccauugcauuuggguaaauguaacauugcuggcuggauccugggaaauccagagugugaaucacucuccacagcaagcucaugguccuacauuguggaaacaucuaguucagacaauggaacauguuacccaggagauuucaucgauuaugaggagcuaagagaacaauugagcucagugucaucauuugaaagguuugagauguuccccaagacaaguucauggcccaaucaugacucgaacaaagguguaacggcagcauguccucaugcuggagcaaaaagcuucuacaaaaauuuaauauggcuaguuaaaaaaggaaauucauacccaaagcucagcaaauccuacauuaaugauaaagggaaagaaguccucgugcuauggggcauucaccauccauccacuagugcugaccaacaaagucucuaucagaaugcagaugcauauguuuuuguggggacaucaagauacagcaagaaguucaagccggaaauagcaauaagacccaaagugagggaucaagaagggagaaugaacuauuacuggacacuaguagagccgggagacaaaauaacauucgaagcaacuggaaaucuagugguaccgagauacgcauucgcaauggaaagaaaugcuggaucugguauuaucauuucagauacaccaguccacgauugcaauacaacuugucagacacccaagggugcuauaaacaccagccucccauuucagaauauacauccgaucacaauuggaaaauguccaaaauauguaaaaagcacaaaauugagacuggccacaggauugaggaaugucccgucuauucaaucuagaggccuauuuggggccauugccgguuucauugaagggggguggacagggaugguagauggaugguacgguuaucaccaucaaaaugagcaggggucaggauaugcagccgaccugaagagcacacagaaugccauugacgagauuacuaacaaaguaaauucuguuauugaaaagaugaacacacaguucacagcaguagguaaagaguucaaccaccuggaaaaaagaauagagaauuuaaauaaaaaaguugaugaugguuuccuggacauuuggacuuacaaugccgaacuguugguucuauuggaaaaugaaagaacuuuggacuaccacgauucaaaugugaagaacuuauaugaaaagguaagaagccaguuaaaaaacaaugccaaggaaauuggaaacggcugcuuugaauuuuaccacaaaugcgauaacacgugcauggaaagugucaaaaaugggacuuaugacuacccaaaauacucagaggaagcaaaauuaaacagagaagaaauagaugggguaaagcuggaaucaacaaggauuuaccagauuuuggcgaucuauucaacugucgccaguucauugguacugguagucucccugggggcaaucaguuucuggaugugcucuaaugggucucuacaguguagaauauguauuuaa

SEQ ID NO: 41754 - RNA, 1701 nt, Artificial Sequence
  derived and/or modified CDS sequence (wt) from hemagglutinin__InfluenzaA__AFX96758
augaaggcaauacuaguaguucugcuauauacauuugcaaccgcaaaugcagacacauuauguauagguuaucaugcgaacaauucaacagacacuguagacacaguacuagaaaagaauguaacaguaacacacucuguuaaccuucuagaagacaagcauaacgggaaacuaugcaaacuaagagggguagccccauugcauuuggguaaauguaacauugcuggcuggauccugggaaauccagagugugaaucacucuccacagcaagcucaugguccuacauuguggaaacaucuaguucagacaauggaacguguuacccaggagauuucaucgauuaugaggagcuaagagagcaauugagcucagugucaucauuugaaagguuugagauguuccccaagacaaguucauggcccaaucaugacucgaacaaagguguaacggcagcauguccucaugcuggagcaaaaagcuucuacaaaaauuuaauauggcuaguuaaaaaaggaaauucauacccaaagcucagcaaauccuacauuaaugauaaagggaaagaaguccucgugcuauggggcauucaccauccaucuacuagugcugaccaacaaagucucuaucagaaugcagauacauauguuuuuguggggacaucaagauacagcaagaaguucaagccggaaauagcaauaagacccaaagugagggaucaagaagggagaaugaacuauuacuggacacuaguagagccgggagacaaaauaacauucgaagcaacuggaaaucuagugguaccgagauaugcauucgcaauggaaagaaaugcuggaucugguauuaucauuucagauacaccaguccacgauugcaauacaacuugucagacacccaagggugcuauaaacaccagccucccauuucagaauauacauccgaucacaauuggaaaauguccaaaauauguaaaaagcacaaaauugagacuggccacaggauugaggaaugucccgucuauucaaucuagaggccuauuuggggccauugccgguuucauugaagggggguggacagggaugguagauggaugguacgguuaucaccaucaaaaugagcaggggucaggauaugcagccgaccugaagagcacacagaaugccauugacgagauuacuaacaaaguaaauucuguuauugaaaagaugaauacacaguucacagcaguagguaaagaguucaaccaccuggaaaaaagaauagagaauuuaaauaaaaaaauugaugaugguuuccuggacauuuggacuuacaaugccgaacuguugguucuauuggaaaaugaaagaacuuuggacuaccacgauucaaaugugaagaacuuauaugaaaagguaagaagccaguuaaaaaacaaugccaaggaaauuggaaacggcugcuuugaauuuuaccacaaaugcgauaacacgugcauggaaagugucaaaaaugggacuuaugacuacccaaaauacucagaggaagcaaaauuaaacagagaagaaauagaugggguaaagcuggaaucaacaaggauuuaccagauuuuggcgaucuauucaacugucgccaguucauugguacugguagucucccugggggcaaucaguuucuggaugugcucuaaugggucucuacaguguagaauauguauuuaa

SEQ ID NO: 41755 - RNA, 1701 nt, Artificial Sequence
  derived and/or modified CDS sequence (wt) from hemagglutinin__InfluenzaA__AFX96768
augaaggcaauacuaguaguucugcuauauacauuugcaaccgcaaaugcagacacauuauguauagguuaucaugcaaacaauucaacggacacuguagacacaguacuagaaaagaauguaacaguaacacacucuguuaaccuucuagaagacaagcauaacgggaaacuaugcaaacuaagagggguagccccauugcauuuggguaaauguaacauugcuggcuggauccugggaaauccagagugugaaucacucuccacagcaaucucaugguccuacauuguggaaacaucuaguucagacaauggaacguguuacccaggagauuucaucgauuaugaggagcuaagagagcaauugagcucagugucaucauuugaaagguuugagauauuccccaagacaaguucauggcccaaucaugacucgaacaaagguguaacggcagcauguccucaugcuggagcaaaaagcuucuacaaaaauuuaauauggcuaguuaaaaaaggaaauucauacccaaagcucagcaaauccuacauuaaugauaaagggaaagaaguccucgugcuauggggcauucaccauccaucuacuagugcugaccaacaaagucucuaucagaaugcagaugcauauguuuuuguggggacaucaagauacagcaagaaguucaagccggaaauagcaauaagacccaaagugagggaucaagaagggagaaugaacuauuacuggacacuaguagagccgggagacaaaauaacauucgaagcaacuggaaaucuagugguaccgagauaugcauucgcaauggaaagaaaugcuggaucugguauuaucauuucagauacaccaguccacgauugcaauacaacgugucagacacccaagggugcuauaaacaccagccucccauuucagaauauacauccgaucacaauuggaaaauguccaaaauauguaaaaagcacaaaauugagacuggccacaggauugaggaaugucccgucuauucaaucuagaggccuauuuggggccauugccgguuucauugaagggggguggacagggaugguagauggaugguacgguuaucaccaucaaaaugagcaggggucaggauaugcagccgaccugaagagcacacagaaugccauugacgagauuacuaacaaaguaaauucuguuauugaaaagaugaauacacaguucacagcaguagguaaagaguucaaccaccuggaaaaaagaauagagaauuuaaauaaaaaaguugaugaugguuuccuggacauuuggacuuacaaugccgaacuguugguucuauuggaaaaugaaagaacuuuggacuaccacgauucaaaugugaagaacuuauaugaaaagguaagaagccaguuaaaaaacaaugccaaggaaauuggaaacggcugcuuugaauuuuaccacaaaugcgauaacacgugcauggaaagugucaaaaaugggacuuaugacuacccaaaauacucagaggaagcaaaauuaaacagagaagaaauagaugggguaaagcuggaaucaacaaagauuuaccagauuuuggcgaucuauucaacugucgccaguucauuggugcugguagucucccugggggcaaucaguuucuggaugugcucuaaugggucucuacaguguagaauauguauuuaa

SEQ ID NO: 41756 - RNA, 1701 nt, Artificial Sequence
  derived and/or modified CDS sequence (wt) from hemagglutinin__InfluenzaA__AFX96778
augaaggcaauacuaguaauucugcuauauacauuugcaaccgcaaaugcagacacauuauguauagguuaucaugcgaacaauucaacagacacuguagacacaauacuagaaaagaauguaacaguaacacacucuguuaaccuucuagaagacaagcauaacgggaaacuaugcaaacuaagagggguagccccauugcauuuggguaaauguaacauugcuggcuggauccugggaaauccagagugugaaucacucuccacagcaagcucaugguccuacauuguggaaacaucuaguucagacaauggaacguguuacccaggagauuucaucgauuaugaggagcuaagagagcaauugagcucagugucaucauuugaaagguuugagauauucccaaagacaaguucauggcccaaucaugacucgaacaaagguguaacggcagcauguccucaugcuggagcaaaaagcuucuacaaaaauuuaauauggcuaguuaaaaaaggaaauucauacccaaagcucagcaaauccuacauuaaugauaaagggaaagaaguccucgugcuauggggcauucaccauccaucuacuagugcugaccaacaaagucucuaucagaaugcagaugcauauguuuuuguggggacaucaagauacagcaagaaguucaagccggaaauagcaauaagacccaaagugagggaucaagaagggagaaugaacuauuacuggacacuaguagagccgggagacaaaauaacauucgaagcaacuggaaaucuagugguaccgagauaugcauucgcaauggaaagaaaugcuggaucugguauuaucauuucagauacaccaguccacgauugcaauacaacuugucagacacccaagggugcuauaaacaccagccucccauuucagaauauacauccgaucacaauuggaaaauguccaaaauauguaaaaagcacaaaauugagacuggccacaggauugaggaaugucccgucuauucaaucuagaggccuauuuggggccauugccgguuucauugaagggggguggacagggaugguagauggaugguacgguuaucaccaucaaaaugagcaggggucaggauaugcagccgaccugaagagcacacagaaugccauugacgagauuacuaacaaaguaaauucuguuauugaaaagaugaauacacaguucacagcaguagguaaagaguucaaccaccuggaaaaaagaauagagaauuuaaauaaaaagguugaugaugguuuccuggacauuuggacuuacaaugccgaacuguugguucuauuggaaaaugaaagaacuuuggacuaccacgauucaaaugugaagaacuuauaugaaaagguaagaagccaguuaaaaaacaaugccaaggaaauuggaaacggcugcuuugaauuuuaccacaaaugcgauaacacgugcauggaaagugucaaaaaugggacuuaugacuacccaaaauacucagaggaagcaaaauuaaacagagaagaaauagaugggguaaagcuggaaucaacaaggauuuaccagauuuuggcgaucuauucaacugucgccaguucauugguacugguagucucccugggggcaaucaguuucuggaugugcucuaaugggucucuacaguguagaauauguauuuaa

SEQ ID NO: 41757 - RNA, 1701 nt, Artificial Sequence
  derived and/or modified CDS sequence (wt) from hemagglutinin__InfluenzaA__AFX96788
augaaggcaauacuaguaguucugcuauauacauuugcaaccgcaaaugcagacacauuauguauagguuaucaugcgaacaauucaacagacacuguagacacaguacuagaaaagaauguaacaguaacacacucuguuaaccuucuagaagacaagcauaacgggaaacuaugcaaacuaagagggguagccccauugcauuuggguaaauguaacauugcuggcuggauccugggaaauccagagugugaaucacucuccacagcaagcucaugguccuacauuguggaaacaucuaguucagacaauggaacguguuacccaggagauuucaucgauuaugaggagcuaagagagcaauugagcucagugucaucauuugaaagguuugagauauuccccaagacaaguucauggcccaaucaugacucgaacaaagguguaacggcagcauguccucaugcuggagcaaaaagcuucuacaaaaauuuaauauggcuaguuaaaaaaggaaauucauacccaaagcucagcaaauccuacauuaaugauaaagggaaagaaguccucgugcuauggggcauucaccauccaucuacuagugcugaccaacaaagucucuaucagaaugcagaugcauauguuuuuguggggacaucaagauacagcaagaaguucaagccggaaauagcaauaagacccaaagugagggaucaagaagggagaaugaacuauuacuggacacuaguagagccgggagacaaaauaacauucgaagcaacuggaaaucuagugguaccgagauaugcauucgcaauggaaaaaaaugcuggaucugguauuaucauuucagauacaccaguccacgauugcaauacaacuugucagacacccaagggugcuauaaacaccagccucccauuucagaauauacauccgaucacaauuggaaaauguccaaaauauguaaaaagcacaaaauugagacuggccacaggauugaggaaugucccgucuauucaaucuagaggccuauuuggggccauugccgguuucauugaagggggguggacagggaugguagauggaugguacgguuaucaccaucaaaaugagcaggggucaggauaugcagccgaccugaagagcacacagaaugccauugacaagauuacuaacaaaguaaauucugucauugaaaagaugaauacacaguucacagcaguagguaaagaguucaaccaccuggaaaaaagaauagagaauuuaaauaaaaaaguugaugaugguuuccuggacauuuggacuuacaaugccgaacuguugguucuauuggaaaaugaaagaacuuuggacuaccacgauucaaaugugaagaacuuauaugaaaagguaagaagccaauuaaaaaacaaugccaaggaaauuggaaacggcugcuuugaauuuuaccacaaaugcgauaacacgugcauggaaagugucaaaaaugggacuuaugacuacccaaaauacucagaggaagcaaaauuaaacagagaagaaauagaugggguaaagcuggaaucaacaaggauuuaccagauuuuggcgaucuauucaacugucgccaguucauugguacugguagucucccugggggcaaucaguuucuggaugugcucuaaugggucucuacaguguagaauauguauuuaa

SEQ ID NO: 41758 - RNA, 1701 nt, Artificial Sequence
  derived and/or modified CDS sequence (wt) from hemagglutinin__InfluenzaA__AFX96798
augaaggcaauacuaguaguucugcuauauacauuugcaaccgcaaaugcagacacauuauguauagguuaucaugcgaacaauucaacagacacuguagacacaguacuagaaaagaauguaacaguaacacacucuguuaaccuucuagaagacaagcauaacgggaaacuaugcaaacuaagagggguagccccauugcauuuggguaaauguaacauugcuggcuggauccugggaaauccggagugugaaucacucuccacagcaagcucaugguccuacauuguggaaacaucuaguucagacaauggaacguguuacccaggagauuucaucgauuaugaggagcuaagagagcaauugagcucagugucaucauuugaaagguuugagauauuccccaagacaaguucauggcccaaucaugacucgaacaaagguguaacggcagcauguccucaugcuggagcaaaaaguuucuacaaaaauuuaauauggcuaguuaaaaaaggaaauucauacccaaagcucagcaaauccuacauuaaugauaaagggaaagaaguccucgugcuauggggcauucaccauccaucuacuagugcugaccaacaaagucucuaucagaaugcagaugcauauguuuuuguggggacaucaagauacagcaagaaguucaagccggaaauagcaauaagacccaaagugagggaucaagaagggagaaugaacuauuacuggacacuaguagagccgggagacaaaauaacauucgaagcaacuggaaaucuagugguaccgagauaugcauucgcaauggaaaaaaaugcuggaucugguauuaucauuucagauacaccaguccacgauugcaauacaacuugucagacacccaagggugcuauaaacaccagccucccauuucagaauauacauccgaucacaauuggaaaauguccaaaauauguaaaaagcacaaaauugagacuggccacaggauugaggaaugucccgucuauucaaucuagaggccuauuuggggccauugccgguuucauugaagggggguggacagggaugguagauggaugguacgguuaucaccaucaaaaugagcaggggucaggauaugcagccgaccugaagagcacacagaaugccauugacaagauuacuaacaaaguaaauucuguuauugaaaagaugaauacacaguucacagcaguagguaaagaguucaaccaccuggaaaaaagaauagagaauuuaaauaaaaaaguugaugaugguuuccuggacauuuggacuuacaaugccgaacuguugguucuauuggaaaaugaaagaacuuuggacuaccacgauucaaaugugaagaacuuauaugaaaagguaagaagccaauuaaaaaacaaugccaaggaaauuggaaacggcugcuuugaauuuuaccacaaaugcgauaacacgugcauggaaagugucaaaaaugggacuuaugacuacccaaaauacucagaggaagcaaaauuaaacagagaagaaauagaugggguaaagcuggaaucaacaaggauuuaccagauuuuggcgaucuauucaacugucgccaguucauugguacugguagucucccugggggcaaucaguuucuggaugugcucuaaugggucucuacaguguagaauauguauuuaa

SEQ ID NO: 41759 - RNA, 1701 nt, Artificial Sequence
  derived and/or modified CDS sequence (wt) from hemagglutinin__InfluenzaA__AFX96808
augaaggcaauacuaguaguucugcuauauacauuugcaaccgcaaaugcagacacauuauguauagguuaucaugcgaacaauucaacagacacuguagacacaguacuagaaaagaauguaacaguaacacacucuguuaaccuucuagaagacaagcauaacgggaaacuaugcaaacuaagagggguagccccauugcauuuggguaaauguaacauugcuggcuggauccugggaaauccagagugugaaucacucuccacagcaagcucaugguccuacauuguggaaacaucuaguucagacaauggaacguguuacccaggagauuucaucgauuaugaggagcuaagagagcaauugagcucagugucaucauuugaaagguuugagauguucccaaagacaaguucauggcccaaucaugacucgaacaaagguguaacggcagcauguccucaugcuggagcaaaaagcuucuacaaaaauuuaauauggcuaguuaaaaaaggaaauucauacccaaagcucagcaaauccuacauuaaugauaaagggaaagaaguccucgugcuauggggcauucaccauccaucuacuagugcugaccaacaaagucucuaucagaaugcagaugcauauguuuuuguggggacaucaagauacagcaagaaguucaagccggaaauagcaauaagacccaaagugagggaucaagaagggagaaugaacuauuacuggacacuaguagagccgggagacaaaauaacauucgaagcaacuggaaaucuagugguaccgagauaugcauucgcaauggaaagaaaugcuggaucugguauuaucauuucagauacaccaguccacgauugcaauacaacuugucagacacccaagggugcuauaaacaccagccucccauuucagaauauacauccgaucacaauuggaaaauguccaaaauaugucaaaagcacaaaauugagacuggccacaggauugagaaaugucccgucuauucaaucuagaggccuauuuggggccauugccgguuucauugaagggggguggacagggaugguagauggaugguacgguuaucaccaucaaaaugagcaggggucaggauaugcagccgaccugaagagcacacagaaugccauugacgagauuacuaacaaaguaaauucuguuauugaaaagaugaauacacaguucacagcaguagguaaagaguucaaccaccuggaaaaaagaauagagaauuuaaauaaaaagguugaugaugguuuccuggacauuuggacuuacaaugccgaacuguugguucuauuggaaaaugaaagaacuuuggacuaccacgauucaaaugugaagaacuuauaugaaaagguaagaagccaguuaaaaaacaaugccaaggaaauuggaaacggcugcuuugaauuuuaccacaaaugcgauaacacgugcauggaaagugucaaaaaugggacuuaugacuacccaaaauacucagaggaagcaaaauuaaacagagaagaaauagaugggguaaagcuggaaucaacaaggauuuaccagauuuuggcgaucuauucaacugucgccaguucauugguacugguagucucccugggggcaaucaguuucuggaugugcucuaaugggucucuacaguguagaauauguauuuaa

SEQ ID NO: 41760 - RNA, 1701 nt, Artificial Sequence
  derived and/or modified CDS sequence (wt) from hemagglutinin__InfluenzaA__AFX96818
augaaggcaauacuaguaguucugcuauauacauuugcaaccgcaaaugcagacacauuauguauagguuaucaugcgaacaauucaacagacacuguagacacaguacuagaaaagaauguaacaguaacacacucuguuaaccuucuagaagacaagcauaacgggaaacuaugcaaacuaagagggguagccccauugcauuuggguaaauguaacauugcuggcuggauccugggaaauccagagugugaaucacucuccacagcaagcucaugguccuacauuguggaaacaucuaguucagacaauggaacguguuacccaggagauuucaucgauuaugaggagcuaagagagcaauugagcucagugucaucauuugaaagguuugagauauuccccaagacaaguucauggcccaaucaugacucgaacaaagguguaacgacagcauguccucaugcuggagcaaaaagcuucuacaaaaauuuaauauggcuaguuaaaaaaggaaauucauacccaaagcucagcaaauccuacauuaaugauaaagggaaagaaguccucgugcuauggggcauucaccauccaccuacuagugcugaccaacaaagucucuaucagaaugcagaugcauauguuuuuguggggacaucaagauacagcaagaaguucaagccggaaauagcaauaagacccaaagugagggaucaagaagggagaaugaacuauuacuggacacuaguagagccgggagacaaaauaacauucgaagcaacuggaaaucuagugguaccgagauaugcauucgcaauggaaagaaaugcuggaucugguauuaucauuucagauacaccaguccacgauugcaauacaacuugucagacacccaagggugcuauaaacaccagccucccauuucagaauauacauccgaucacaauuggaaaauguccaaaauauguaaaaagcacaaaauugagacuggccacaggauugaggaaugucccgucuauucaaucuagaggccuauuuggggccauugccgguuucauugaagggggguggacagggaugguagauggaugguacgguuaccaccaucaaaaugagcaggggucaggauaugcagccgaccugaagagcacacagaaugccauugacgagauuacuaacaaaguaaauucuguuauugaaaagaugaauacacaguucacagcaguagguaaagaguucaaccaccuggaaaaaagaauagagaauuuaaauaaaaagguugaugaugguuuccuggacauuuggacuuacaaugccgaacuguugguucuauuggaaaaugaaagaacuuuggacuaccacgauucaaaugugaagaacuuauaugaaaagguaagaagccaguuaaaaaacaaugccaaggaaauuggaaacggcugcuuugaauuuuaccacaaaugcgauaacacgugcauggaaagugucaaaaaugggacuuaugacuacccaaaauacucagaggaagcaaaauuaaacagagaagaaauagaugggguaaagcuggaaucaacaaggauuuaccagauuuuggcgaucuauucaacugucgccaguucauugguacugguagucucccugggggcaaucaguuucuggaugugcucuaaugggucucuacaguguagaauauguauuuaa

SEQ ID NO: 41761 - RNA, 1701 nt, Artificial Sequence
  derived and/or modified CDS sequence (wt) from hemagglutinin__InfluenzaA__AFX96828
augaaggcaauacuaguaguucugcuauauacauuugcaaccgcaaaugcagacacauuauguauagguuaucaugcgaacaauucaacagacacuguagacacaguacuagaaaagaauguaacaguaacgcacucuguuaaccuucuagaagacaagcauaacgggaaacuaugcaaacuaagagggguagccccauugcauuuggguaaauguaacauugcuggcuggauccugggaaauccagagugugaaucacucuccacagcaagcucaugguccuacauuguggaaacaucuaguucagacaauggaacguguuacccaggagauuucaucgauuaugaggagcuaagagagcaauugagcucagugucaucauuugaaagguuugagauauuccccaagacaaguucauggcccaaucaugacucgaacaaagguguaacggcagcauguccucaugcgggagcaaaaagcuucuacaaaaauuuaauauggcuaguuaaaaaaggaaauucauacccaaagcucagcaaauccuacauuaaugauaaagggaaagaaguccucgugcuauggggcauucaccauccaucuacuagugcugaccaacaaagucucuaucagaaugcagaugcauauguuuuuguggggacaucaagauacagcaagaaguucaagccggaaauagcaauaagacccaaagugagggaucaagaagggagaaugaacuauuacuggacacuaguagagccgggagacaaaauaacauucgaagcaacuggaaaucuagugguaccgagauaugcauucgcaauggaaaaaaaugcuggaucugguauuaucauuucagauacaccaguccacgauugcaauacaacuugucagacacccaagggugcuauaaacaccagccucccauuucagaauauacauccgaucacaauuggaaaauguccaaaauauguaaaaagcacaaaauugagacuggccacaggauugaggaaugucccgucuauucaaucuagaggccuauuuggggccauugccgguuucauugaagggggguggacagggaugguagauggaugguacgguuaucaccaucaaaaugagcaggggucaggauaugcagccgaccugaagagcacacagaaugccauugacaagauuacuaacaaaguaaauucuguuauugaaaagaugaauacacaguucacagcaguagguaaagaguucaaccaccuggaaaaaagaauagagaauuuaaauaaaaaaguugaugaugguuuccuggacauuuggacuuacaaugccgaacuguugguucuauuggaaaaugaaagaacuuuggacuaccacgauucaaaugugaagaacuuauaugaaaagguaagaagccaauuaaaaaacaaugccaaggaaauuggaaacggcugcuuugaauuuuaccacaaaugcgauaacacgugcauggaaagugucaaaaaugggacuuaugacuacccaaaauacucagaggaagcaaaauuaaacagagaagaaauagaugggguaaagcuggaaucaacaaggauuuaccagauuuuggcgaucuauucaacugucgccaguucauugguacugguagucucccugggggcaaucaguuucuggaugugcucuaaugggucucuacaguguagaauauguauuuaa

SEQ ID NO: 41762 - RNA, 1701 nt, Artificial Sequence
  derived and/or modified CDS sequence (wt) from hemagglutinin__InfluenzaA__AFX96838
augaaggcaauacuaguaguucugcuauauacauuugcaaccgcaaaugcagacacauuauguauagguuaucaugcgaacaauucaacagacacuguagacacaguacuagaaaagaauguaacaguaacacacucuguuaaccuucuagaagacaagcauaacgggaaacuaugcaaacuaagagggguagccccauugcauuuggguaaauguaacauugcuggcuggauccugggaaauccagagugugaaucacucuccacagcaagcucaugguccuacauuguggaaacaucuaguucagacaauggaacguguuacccaggagauuucaucgauuaugaggagcuaagagagcaauugagcucagugucaucauuugaaagguuugagauauucccaaagacaaguucauggcccaaucaugacucgaacaaagguguaacggcagcauguccucaugcuggagcaaaaagcuucuacaaaaauuuaauauggcuaguuaaaaaaggaaauucauacccaaagcucagcaaauccuacauuaaugauaaagggaaagaaguccucgugcuauggggcauucaccauccaucuacuagugcugaccaacaaagucucuaucagaaugcagaugcauauguuuuuguggggacaucaagauacagcaagaaguucaagccggaaauagcaauaagacccaaagugagggaucaagaagggagaaugaacuauuacuggacacuaguagagccgggagacaaaauaacauucgaagcaacuggaaaucuagugguaccgagauaugcauucgcaauggaaagaaaugcuggaucugguauuaucauuucagauacaccaguccacgauugcaauacaacuugucagacacccaagggugcuauaaacaccagccucccauuucagaauauacauccaaucacaauuggaaaauguccaaaauauguaaaaagcacaaaauugagacuggccacaggauugaggaaugucccgucuauucaaucuagaggccuauuuggggccauugccgguuucauugaagggggguggacagggaugguagauggaugguacgguuaucaccaucaaaaugagcaggggucaggauaugcagccgaccugaagagcacacagaaugccauugacgagauuacuaacaaaguaaauucuguuauugaaaagaugaauacacaguucacagcaguagguaaagaguucaaccaccuggaaaaaagaauagagaauuuaaauaaaaagguugaugaugguuuccuggacauuuggacuuacaaugccgaacucuugguucuauuggaaaaugaaagaacuuuggacuaccacgauucaaaugugaagaaauuauaugaaaagguaagaagccaguuaaaaaacaaugccaaggaaauuggaaacggcugcuuugaauuuuaccacaaaugcgauaacacgugcauggaaagugucaaaaaugggacuuaugacuacccaaaauacucagaggaagcaaaauuaaacagagaagaaauagaugggguaaagcuggaaucaacaaggauuuaccagauuuuggcgaucuauucaacugucgccaguucauugguauugguagucucccugggggcaaucaguuucuggaugugcucuaaugggucucuacaguguagaauauguauuuaa

SEQ ID NO: 41763 - RNA, 1701 nt, Artificial Sequence
  derived and/or modified CDS sequence (wt) from hemagglutinin__InfluenzaA__AFX96856
augaaggcaauacuaguaguucugcuauauacauuugcaaccgcaaaugcagacacauuauguauagguuaucaugcgaacaauucaacagacacuguagacacaguacuagaaaagaauguaacaguaacacacucuguuaaccuucuagaagacaagcauaacgggaaacuaugcaaacuaagagggguagccccauugcauuuggguaaauguaacauugcuggcuggauccugggaaauccagagugugaaucacucuccacagcaagcucaugguccuacauuguggaaacaucuaguucagacaauggaacguguuacccaggagauuucaucgauuaugaggagcuaagagagcaauugagcucagugucaucauuugaaagguuugagauauuccccaagacaaguucauggcccaaucaugacucgaacaaagguguaacggcagcauguacucaugcuggagcaaaaagcuucuacaaaaauuuaauauggcuaguuaaaaaaggaaauucauacccaaagcucagcaaauccuacauuaaugauaaagggaaagaaguccucgugcuauggggcauucaccauccaucuacuagugcugaccaacaaagucucuaccagaaugcagaugcauauguuuuuguggggacaucaagauacagcaagaaguucaagccggaaauagcaauaagacccaaagugagggaucaagaagggagaaugaacuauuacuggacacuaguagagccgggagacaaaauaacauucgaggcaacuggaaaucuagugguaccgagauaugcauucgcaauggaaagaaaugcuggaucugguauuaucauuucagauacaccaguccacgauugcaauacaacuugucagacacccaagggugcuauaaacaccagccucccauuucagaauauacauccgaucacaauuggaaaauguccaaaauauguaaaaagcacaaaauugagacuggccacaggauugaggaaugucccgucuauucaaucuagaggccuauuuggggccauugccgguuucauugaagggggguggacagggaugguagauggaugguacgguuaucaccaucaaaaugagcaggggucaggauaugcagccgaccugaagagcacacagaaugccauugacgagauuacuaacaaaguaaauucuguuauugaaaagaugaauacacaguucacagcaguagguaaagaguucaaccaccuggaaaaaagaauagagaauuuaaauaaaaagguugaugaugguuuccuggacauuuggacuuacaaugccgaacuguugguucuauuggaaaaugaaagaacuuuggacuaccacgauucaaaugugaagaacuuauaugaaaagguaagaagccaguuaaaaaacaaugccaaggaaauuggaaacggcugcuuugaauuuuaccacaaaugcgauaacacgugcauggaaagugucaaaaaugggacuuaugacuacccaaaauacucagaggaagcaaaauuaaacagagaagaaauagaugggguaaagcuggaaucaacaaggauuuaccagauuuuggcgaucuauucaacugucgccaguucauugguacugguagucucccugggggcaaucaguuucuggaugugcucuaaugggucucuacaguguagaauauguauuuaa

SEQ ID NO: 41764 - RNA, 1701 nt, Artificial Sequence
  derived and/or modified CDS sequence (wt) from hemagglutinin__InfluenzaA__AFX96904
augaaggcaauacuaguaguucugcuauauacauuugcaaccgcaaaugcagacacauuauguauagguuaucaugcgaacaauucaacagacacuguagacacaguacuagaaaagaauguaacaguaacacacucuguuaaccuucuagaagacaagcauaacgggaaacuaugcaaacuaagagggguagccccauugcauuuggguaaauguaacauugcuggcuggauccugggaaauccagagugugaaucacucuccacagcaagcucaugguccuacauuguggaaacaucuaguucagacaauggaacguguuacccaggagauuucaucgauuaugaggagcuaagagagcaauugagcucagugucaucauuugaaagguuugagauauuccccaagacaaguucauggcccaaucaugacucgaacaaagguguaacggcagcauguccucaugcuggagcaaaaagcuucuacaaaaauuuaauauggcuaguuaaaaaaggaaauucauacccaaagcucagcaaauccuacauuaaugauaaagggaaagaaguccucgugcuauggggcauucaccauccaucuacuagugcugaccaacaaagucucuaucagaaugcagaugcauauguuuuuguggggacaucaagauacagcaagaaguucaagccggaaauagcaauaagacccaaagugagggaucaagaagggagaaugaacuauuacuggacacuaguagagccgggagacaaaauaacauucgaagcaacuggaaaucuagugguaccgagauaugcauucgcaauggaaagaaaugcuggaucugguauuaucauuucagauacaccaguccacgauugcaauacaacuugucagacacccaagggugcuauaaacaccagccucccauuucagaauauacauccgaucacaauuggaaaauguucaaaauauguaaaaagcacaaaauugagacuggccacaggauugaggaaugucccgucuauucaaucuagaggccuauuuggggccauugccgguuucauugaagggggguggacagggaugguagauggaugguacgguuaucaccaucaaaaugagcaggggucaggauaugcagccgaccugaagagcacacagaaugccauugacgagauuacuaacaaaguaaauucuguuauugaaaagaugaauacacaguucacagcaguagguaaagaguucaaccaccuggaaaaaagaauagagaauuuaaauaaaaagguugaugaugguuuucuggacauuuggacuuacaaugccgaacuguugguucuauuggaaaaugaaagaacuuuggacuaccacgauucaaaugugaagaacuuauaugaaaagguaagaagccaguuaaaaaacaaugccaaggaaauuggaaacggcugcuuugaauuuuaccacaaaugcgauaacacgugcauggaaagugucaaaaaugggacuuaugacuacccaaaauacucagaggaagcaaaauuaaacagagaagaaauagaugggguaaagcuggaaucaacaaggauuuaccagauuuuggcgaucuauucaacugucgccaguucauugguacugguagucucccugggggcaaucaguuucuggaugugcucuaaugggucucuacaguguagaauauguauuuaa

SEQ ID NO: 41765 - RNA, 1701 nt, Artificial Sequence
  derived and/or modified CDS sequence (wt) from hemagglutinin__InfluenzaA__AFX96914
augaaggcaauacuaguaguucugcuauauacauuugcaaccgcaaaugcagacacauuauguauagguuaucaugcgaacaauucaacagacacuguagacacaguacuagaaaagaauguaacaguaacacacucuguuaaccuucuagaagacaagcauaacgggaaacuaugcaaacuaagagggguagccccauugcauuuggguaaauguaacauugcuggcuggauccugggaaauccagagugugaaucacucuccacagcaagcucaugguccuacauuguggaaacaucuaguucagacaauggaacauguuacccaggagauuucaucgauuaugaggagcuaagagagcaauugagcucagugucaucauuugaaagguuugagauauuccccaagacaaguucauggcccaaucaugacucgaacaaagguguaacggcagcauguccucaugcuggagcaaaaagcuucuacaaaaauuuaauauggcuaguuaaaaaaggaaauucauacccaaagcucagcaaauccuacauuaaugauaaagggaaagaaguccucgugcuauggggcauucaccauccaucuacuagugcugaccaacaaagucucuaucagaaugcagauacauauguuuuuguggggacaucaagauacagcaagaaguucaagccggaaauagcaauaagacccaaagugagggaucaagaagggagaaugaacuauuacuggacacuaguagagccgggagacaaaauaacauucgaagcaacuggaaaucuagugguaccgagauaugcauucgcaauggaaagaaaugcuggaucugguauuaucauuucagauacaccaguccacgauugcaauacaacuugucagacacccaagggugcuauaaacaccagccucccauuucagaauauacauccgaucacaauuggaaaauguccaaaauauguaaaaagcacaaaauugagacuggccacaggauugaggaaugucccgucuauucaaucuagaggccuauuuggggccauugccgguuucauugaagggggguggacagggaugguagauggaugguacgguuaucaccaucaaaaugagcaggggucaggauaugcagccgaccugaagagcacacagaaugccauugacgagauuacuaacaaaguaaauucuguuauugaaaagaugaauacacaguucacagcaguagguaaagaguucaaccaccuggaaaaaagaauagagaauuuaaauaaaaaaauugaugaugguuuccuggacauuuggacuuacaaugccgaacuguugguucuauuggaaaaugaaagaacuuuggacuaccacgauucaaaugugaagaacuuauaugaaaagguaagaagccaguuaaaaaacaaugccaaggaaauuggaaacggcugcuuugaauuuuaccacaaaugcgauaacacgugcauggaaagugucaaaaaugggacuuaugacuacccaaaauacucagaggaagcaaaauuaaacagagaagaaauagaugggguaaagcuggaaucaacaaggauuuaccagauuuuggcgaucuauucaacugucgccaguucauugguacugguagucucccugggggcaaucaguuucuggaugugcucuaaugggucucuacaguguagaauauguauuuaa

SEQ ID NO: 41766 - RNA, 1701 nt, Artificial Sequence
  derived and/or modified CDS sequence (wt) from hemagglutinin__InfluenzaA__AFX96924
augaaggcaauacuaguaguucugcuauauacauuugcaaccgcaaaugcagacacauuauguauagguuaucaugcgaacaauucaacagacacuguagacacaguacuagaaaagaauguaacaguaacacacucuguuaaccuucuagaagacaagcauaacgggaaacuaugcaaacuaagagggguagccccauugcauuuggguaaauguaacauugcuggcuggauccugggaaauccagagugugaaucacucuccacagcaagcucaugguccuacauuguggaaacaucuaguucagacaauggaacguguuacccaggagauuucaucgauuaugaggagcuaagagagcaauugagcucagugucaucauuugaaagguuugagauauuccccaagacaaguucauggcccaaucaugacucgaacaaagguguaacggcagcauguccucaugcuggagcaaaaagcuucuacaaaaauuuaauauggcuaguuaaaaaaggaaauucauacccaaagcucagcaaauccuacauuaaugauaaagggaaagaaguccucgugcuauggggcauucaccauccaucuacuagugcugaccaacaaagucucuaucagaaugcagaugcauauguuuuuguggggacaucaagauacagcaagagguucaagccggaaauagcaauaagacccaaagugagggaucaagaagggagaaugaacuauuacuggacacuaguagagccgggagacaaaauaacauucgaagcaacuggaaaucuagugguaccgagauaugcauucgcaauggaaagaaaugcuggaucugguauuaucauuucagauacaccaguccacgauugcaauacaacuugucagacacccaagggugcuauaaacaccagccucccauuucagaauauacauccgaucacaauuggaaaauguccaaaauauguaaaaagcacaaaauugagacuggccacaggauugaggaaugucccgucuauucaaucuagaggccuauuuggggccauugccgguuucauugaagggggguggacagggaugguagauggaugguacgguuaucaccaucaaaaugagcaggggucaggauaugcagccgaccugaagagcacacagaaugccauugacgagauuacuaacaaaguaaauucuguuauugaaaagaugaauacacaguucacagcaguagguaaagaguucaaccaccuggaaaaaagaauagagaauuuaaauaaaaagguugaugaugguuuccuggacauuuggacuuacaaugccgaacuguugguucuauuggaaaaugaaagaacuuuggacuaccacgauucaaaugugaagaacuuauaugaaaagguaagaagccaguuaaaaaacaaugccaaggaaauuggaaacggcugcuuugaauuuuaccacaaaugcgauaacacgugcauggaaagugucaaaaaugggacuuaugacuacccaaaauacucagaggaagcaaaauuaaacagagaggaaauagaugggguaaagcuggaaucaacaaggauuuaccagauuuuggcgaucuauucaacugucgccaguucauugguacugguagucucccugggggcaaucaguuucuggaugugcucuaaugggucucuacaguguagaauauguauuuaa

SEQ ID NO: 41767 - RNA, 1701 nt, Artificial Sequence
  derived and/or modified CDS sequence (wt) from hemagglutinin__InfluenzaA__AFX96934
augaaggcaauacuaguaguucugcuauauacauuugcaaccgcaaaugcagacacauuauguauagguuaucaugcgaacaauucaacagacacuguagacacaguacuagaaaagaauguaacaguaacacacucuguuaaccuucuagaagacaagcauaacgggaaacuaugcaaacuaagagggguagccccauugcauuuggguaaauguaacauugcuggcuggauccugggaaauccagagugugaaucacucuccacagcaagcucaugguccuacauuguggaaacaucuaguucagacaauggaacguguuacccaggagauuucaucgauuaugaggagcuaagagagcaauugagcucagugucaucauuugaaagguuugagauauuccccaagacaaguucauggcccaaucaugacucgaacaaagguguaacggcagcauguccucaugcuggagcaaaaagcuucuacaaaaauuuaauauggcuaguuaaaaaaggaaauucauacccaaagcucagcaaauccuacauuaaugauaaagggaaagaaguccucgugcuauggggcauucaccauccaucuacuagugcugaccaacaaagucucuaucagaaugcagaugcauauguuuuuguggggacaucaagauacagcaagaaguucaagccggaaauagcaauaagacccaaagugagggaucaagaagggagaaugaacuauuacuggacacuaguagagccgggagacaaaauaacauucgaagcaacuggaaaucuagugguaccgagauaugcauucgcaauggaaagaaaugcuggaucugguauuaucauuucagauacaccaguccacgauugcaauacaacuugucagacacccaagggugcuauaaacaccagccucccauuucagaauauacauccgaucacaauuggaaaauguccaaaauauguaaaaagcacaaaauugagacuggccacaggauugaggaaugucccgucuauucaaucuagaggccuauuuggggccauugccgguuucauugaagggggguggacagggaugguagauggaugguacgguuaucaccaucaaaaugagcaggggucaggauaugcagccgaccugaagagcacacagaaugccauugacgagauuacuaacaaaguaaauucuguuauugaaaagaugaauacacaguucacagcaguagguaaagaguucaaccaccuggaaaaaagaauagagaauuuaaauaaaaaaguugaugaugguuuccuggacauuuggacuuacaaugccgaacuauugguucuauuggaaaaugaaagaacuuuggacuaccacgauucaaaugugaagaacuuauaugaaaagguaagaagccaguuaaaaaacaaugccaaggaaauuggaaacggcugcuuugaauuuuaccacaaaugcgauaacacgugcauggaaagugucaaaaaugggacuuaugacuacccaaaauacucagaggaagcaaaauuaaacagagaagaaauagaugggguaaagcuggaaucaacaaggauuuaccagauuuuggcgaucuauucaacugucgccaguucauugguacugguagucucccugggggcaaucaguuucuggaugugcucuaaugggucucuacaguguagaauauguauuuaa

SEQ ID NO: 41768 - RNA, 1701 nt, Artificial Sequence
  derived and/or modified CDS sequence (wt) from hemagglutinin__InfluenzaA__AFY24097
augaaggcaauacuaguaguucugcuauauacauuugcaaccgcaaaugcagacacauuauguauagguuaucaugcggacaauucaacagacacuguagacacaguacuagaaaagaauguaacaguaacacacucuguugaccuucuagaagacaagcauaacgggaaacuaugcaaacuaagagggguagccccauugcauuuggguaaauguaacauugcuggcuggauccugggaaauccagagugugaaucacucuccacagcaagcucaugguccuacauuguggaaacaucuaguucagacaauggaacguguuacccaggagauuucaucgauuaugaggagcuaagagagcaauugagcucagugucaucauuugaaagguuugagauauuccccaagacaaguucauggcccaaucaugacucgaacaaagguguaacggcagcauguccucaugcuggagcaaaaagcuucuacaaaaauuuaauauggcuaguuaaaaaaggaaauucauacccaaagcucaacaaauccuacauuaaugauaaagggaaagaaguccucgugcuauggggcauucaccauccaucuacuaguacugaccaacaaagucucuaucagaaugcagaugcauauguuuuuguggggacaucaagauacagcaagaaguuuaagccggaaauagcaauaagacccaaagugagggaucaagaagggagaaugaacuauuacuggacacuaguagagccgggagacaaaauaacauucgaagcaacuggaaaucuagugguaccgagauaugcauucgcaauggaaagaaaugcuggaucugguauuaucauuucagauacaccaguccacgauugcaauacaacuugucagacacccaagggugcuauaaacaccagccucccauuucagaauauacauccgaucacaauuggaaaguguccaaaauauguaaaaagcacaaaauugagacuggccacaggauugaggaaugucccgucuauucaaucuagaggccuauuuggggccauugccgguuucauugaagggggguggacaggaaugguagauggaugguacgguuaucaccaucaaaaugagcaggggucaggauaugcagccgaccugaagagcacacagaaugccauugacgagauuacuaacaaaguaaauucuguuauugaaaagaugaauacacaguucacagcaguagguaaagaguucaaccaccuggaaaaaagaauagagaauuuaaauaaaaaaguugaugaugguuuccuggacauuuggacuuacaaugccgaacuguugguucuauuggaaaaugaaagaacuuuggacuaccacgauucaaaugugaagaacuuauaugaaaagguaagaagccaguuaaaaaacaaugccaaggaaauuggaaacggcugcuuugaauuuuaccacaaaugcgauaacacgugcauggaaagugucaaaaaugggacuuaugacuacccaaaauacucagaggaagcaaaauuaaacagagaagaaauagaugggguaaagcuggaaucaaccaggauuuaccagauuuuggcgaucuauucaacugucgccaguucauugguacugguagucucccugggggcaaucaguuucuggaugugcucuaaugggucucuacaguguagaauauguauuuaa

SEQ ID NO: 41769 - RNA, 1701 nt, Artificial Sequence
  derived and/or modified CDS sequence (wt) from hemagglutinin__InfluenzaA__AFY24162
augaagacuaucauugcuuugagcuacauucuaugucugguuuucgcucaaaaacuucccggaaaugacaacagcacggcaacgcugugccuugggcaccaugcaguaccaaacggaacgauagugaaaacaaucacgaaugaccaaauugaaguuacuaaugcuacugagcugguucagaguuccucaacagguggaauaugcgacaguccucaucagauccuugauggagaaaacugcacacuaauagaugcucuauugggagacccucagugugauggcuuccaaaauaagaaaugggaccuuuuuguugaacgcagcaaagccuacagcaacuguuacccuuaugaugugccggauuaugccucccuuaggucacuaguugccucauccggcacacuggaguuuaacaaugaaagcuucaauuggacuggagucacucaaaauggaacaagcucugcuugcaaaaggagaucuaauaacaguuucuuuaguagauugaauugguugacccacuuaaaauucaaauacccagcauugaacgugacuaugccaaacaaugaaaaauuugacaaauuguacauuugggggguucaccacccggguacggacaaugaccaaaucuuccuguaugcucaagcaucaggaagaaucacagucucuaccaaaagaagccaacaaacuguaaucccgaauaucggaucuagacccaggguaaggaauauccccagcagaauaagcaucuauuggacaauaguaaaaccgggagacauacuuuugauuaacagcacagggaaucuaauugcuccuagggguuacuucaaaauacgaagugggaaaagcucaauaaugagaucagaugcacccauuggcaaaugcaauucugaaugcaucacuccaaauggaagcauucccaaugacaaaccguuucaaaauguaaacaggaucacauauggggccugucccagauauguuaagcaaaacacucugaaauuggcaacagggaugcgaaauguaccagagaaacaaacuagaggcauauuuggcgcaaucgcggguuucauagaaaaugguugggagggaaugguggaugguugguacgguuucaggcaucaaaauucugagggaauaggacaagcagcagaucucaaaagcacucaagcagcaaucaaucaaaucaaugggaagcugaauagguugaucgggaaaaccaacgagaaauuccaucagauugaaaaagaauucucagaaguagaagggagaauucaggaccucgagaaauauguugaggacacuaaaauagaucucuggucauacaaugcggagcuucuuguugcccuggagaaccaacauacaauugaucuaacugacucagaaaugaacaaacuguuugaaagaacaaagaagcaacugagggaaaaugcugaggauaugggcaaugguuguuucaaaauauaccacaaaugugacaaugccugcauaggaucaaucagaaauggaacuuaugaccaugauguauacagagaugaagcauuaaacaaccgguuccagaucaaaggcguugagcugaagucaggauacaaagauuggauccuauggauuuccuuugccauaucauguuuuuugcuuuguguugcuuuguugggguucaucaugugggccugccaaaaaggcaacauuaggugcaacauuugcauuuga

SEQ ID NO: 41770 - RNA, 1701 nt, Artificial Sequence
  derived and/or modified CDS sequence (wt) from hemagglutinin__InfluenzaA__AFY24195
augaagacuaucauugcuuugagcuacauucuaugucugguuuucgcucaaaaacuucccggaaaugacaacagcacggcaacgcugugccuugggcaccaugcaguaccaaacggaacgauagugaaaacaaucacgaaugaccaaauugaaguuacuaaugcuacugagcugguucagaguuccucaacagguggaauaugcgacaguccucaucagauccuugauggagaaaacugcacacuaauagaugcucuauugggagacccucagugugauggcuuccaaaauaagaaaugggaccuuuuuguugaacgcagcaaagccuacagcaacuguuacccuuaugaugugccggauuaugccucccuuaggucacuaguugccucauccggcacacuggaguuuaacaaugaaagcuucaauuggacuggagucacucaaaauggaacaagcucugcuugcaaaaggagaucuaauaacaguuucuuuaguagauugaauugguugacccacuuaaaauucaaauacccagcauugaacgugacuaugccaaacaaugaaaaauuugacaaauuguacauuugggggguucaccacccggguacggacaaugaccaaaucuuccuguaugcucaagcaucaggaagaaucacagucucuaccaaaagaagccaacaaacuguaaucccgaauaucggaucuagacccaggauaaggaauauccccagcagaauaagcaucuauuggacaauaguaaaaccgggagacauacuuuugauuaacagcacagggaaucuaauugcuccuagggguuacuucaaaauacgaagugggaaaagcucaauaaugagaucagaugcacccauuggcaaaugcaauucugaaugcaucacuccaaauggaagcauucccaaugacaaaccauuucaaaauguaaacaggaucacauauggggccugucccagauauguuaagcaaaacacucugaaauuggcaacagggaugcgaaauguaccagagaaacaaacuagaggcauauuuggcgcaaucgcggguuucauagaaaaugguugggagggaaugguggaugguugguacgguuucaggcaucaaaauucugagggaauaggacaagcagcagaucucaaaagcacucaagcagcaaucaaucaaaucaaugggaagcugaauagguugaucgggaaaaccaacgagaaauuccaucagauugaaaaagaauucucagaaguagaagggagaauucaggaccucgagaaauauguugaggacacuaaaauagaucucuggucauacaacgcggagcuucuuguugcccuggagaaccaacauacaauugaucuaacugacucagaaaugaacaaacuguuugaaagaacaaagaagcaacugagggaaaaugcugaggauaugggcaaugguuguuucaaaauauaccacaaaugugacaaugccugcauaggaucaaucagaaauggaacuuaugaccaugauguauacagagaugaagcauuaaacaaccgguuccagaucaaaggcguugagcugaagucaggauacaaagauuggauccuauggauuuccuuugccauaucauguuuuuugcuuuguguugcuuuguugggguucaucaugugggccugccaaaaaggcaacauuaggugcaacauuugcauuuga

SEQ ID NO: 41771 - RNA, 1701 nt, Artificial Sequence
  derived and/or modified CDS sequence (wt) from hemagglutinin__InfluenzaA__AFY24217
augaagacuaucauugcuuugagcuacauucuaugucugguuuuugcucaaaagcuucccggaaaugacaacagcacggcaacgcugugccuugggcaccaugcaguaccaaacggaacgauagugaaaacaaucacgaaugaccaaauugaaguuacuaaugcuacugagcugguucagaguuccucaacagguggaauaugcgacaguccucaucagauccuugauggagaaaacugcacacuaauagaugcucuauugggagacccucagugugauggcuuccaaaauaagaaaugggaccuuuuuguugaacgcagcaaagccuacagcaacuguuacccuuaugaugugccggauuaugccucccuuaggucacuaguugccucauccggcacacuggaguuuaacaaugaaagcuucaauuggacuggagucacucagaauggaacaagcucugcuugcaaaaggagaucuaauaaaaguuucuuuaguagauugaauugguugacccacuuaaaauacaaauacccagcauugaacgugacuaugccaaacaaugaaaaauuugacaaauuguacauuugggggguucaccacccggguacggacagugaccaaaucagccuauaugcucaagcaucaggaagaaucacagucucuaccaaaagaagccaacaaacuguaaucccgaauaucggaucuagacccaggguaagggaugucuccagcagaauaagcaucuauuggacaauaguaaaaccgggagacauacuuuugauuaacagcacagggaaucuaauugcuccucgggguuacuucaaaauccgaagugggaaaagcucaauaaugagaucagaugcacccauuggcaaaugcaauucugaaugcaucacuccaaauggaagcauucccaaugacaaaccauuucaaaauguaaacaggaucacauauggggccugucccagauauguuaagcaaaacacucugaaauuggcaacagggaugcgaaauguaccagagaaacaaacuagaggcauauuuggcgcaaucgcggguuucauagaaaaugguugggagggaaugguggacgguugguacgguuucaggcaucaaaauucugagggcacaggacaagcagcagaucucaaaagcacucaagcagcaaucaaccaaaucaaugggaaacugaacagguuaaucgggaaaacaaacgagaaauuccaucagauugaaaaagaauucucagaaguagaaggaagaauucaggaccucgagaaauauguugaggacacuaaaauagaucucuggucauacaacgcggagcuucuuguugcccuggagaaccaacauacaauugaucuaacugacucagaaaugaacaaacuguuugaaagaacaaagaagcaacugagggaaaaugcugaggauaugggcaaugguuguuucaaaauauaccacaaaugugacaaugccugcauagagucaaucagaaauggaacuuaugaccaugauguauacagagaugaagcauuaaacaaccgguuccagaucaaagguguugagcugaagucaggauacaaagauuggauccuauggauuuccuuugccauaucauguuuuuugcuuuguguugcuuuguugggguucaucaugugggccugccaaaaaggcaacauuaggugcaacauuugcauuuga

SEQ ID NO: 41772 - RNA, 1701 nt, Artificial Sequence
  derived and/or modified CDS sequence (wt) from hemagglutinin__InfluenzaA__AGB08294
augaaggcaauacuaguaguucugcuauauacauuugcaaccgcaaaugcagacacauuauguauagguuaucaugcgaacaauucaacagacacuguagacacaguacuagaaaagaauguaacaguaacacacucuguuaaccuucuagaagacaagcauaacgggaaacuaugcaaacugagagggguggccccauugcauuuggguaaauguaacauugcuggcuggauccugggaaauccagagugugaaucacucuccacagcaagcucaugguccuacaucguggaaacaucuaguucagacaauggaacgugcuacccaggagauuucaucaauuaugaggagcuaagagagcaauugagcucagugucaucauuugaaagguuugagauauuccccaagacaaguucauggcccaaucaugacucgaacaaagguguaacggcagcauguccucaagcuggagcaaaaagcuucuacaaaaauuuaauauggcuaguuaaaaaaggaaauucauacccaaagcucaucaaauccuacauuaacgauaaagggaaagaaguccucgugcuauggggcauucaccauccaucuacuagugcugaccaacaaagucucuaucagaaugcagaugcauauguuuuuguggggacaucaaaauacagcaagaaguucaagccggaaauagcaguaagacccaaagugagggaucaagaagggagaaugaacuauuacuggacauuaguagagccgggagacaaaauaacauucgaagcaacuggaaaucuauugguaccaagauaugcauucguaauggaaagaaaugcuggaucugguauuaucauuucagauacaccaguccacgauugcaauacaacuugucagacacccaagggugcuauaaacaccagccucccauuucagaauauacauccgaucacaauuggaaaaugucccaaauauguaaaaagcacaaaauugagacuggccacaggauugaggaauaucccgucuauucaaucuagaggccuauuuggggccauugccgguuucauugaagggggguggacagggaugguagauggaugguacgguuaucaccaucaaaaugcgcaggggucaggauaugcagccgaccugaagagcacacagaaugccauugacaagauuacuaacaaaguaaauucuguuauugaaaagaugaauacacaguucacagcaguagguaaagaguucaaccaccuggaaaaaagaauagagaauuuaaauaaaaaaguugaugaugguuuccuggacauuuggacuuacaaugccgagcuguugguucuauuggaaaaugaaagaacuuuggacuaucacgauucaaaugugaaaaacuuauaugaaaagguaagaagccaguuaaaaaacaaugccaaggaaauuggaaacggcugcuuugaauuuuaccacaaaugcgauaacacgugcauggaaagugucaaaaaugggacuuaugacuacccaagauacucagaggaagcaaaauuaaacagagaagaaauagaugggguaaagcuagaaucaacaaggauuuaccagauuuuggcgaucuauucaacugucgccaguucauugguacugguagucucccugggggcaaucaguuucuggaugugcucuaaugggucucuacaguguagaauauguauuuaa

SEQ ID NO: 41773 - RNA, 1701 nt, Artificial Sequence
  derived and/or modified CDS sequence (wt) from hemagglutinin__InfluenzaA__AGB08295
augaaggcaauacuaguaguucugcuauauacauuugcaaccgcaaaugcagacacauuauguauagguuaucaugcgaacaauucaacagacacuguagacacaguaauagaaaagaauguaacaguaacacacucuguuaaccuucuagaagacaagcauaaugggaaacuaugcaaacuaagagggguagccccauugcauuuggguaaauguaacauugcuggcuggauccugggaaauccagagugugaaucacucuccacagcaagcucaugguccuacauuguggaaacaucuaguucagacaauggaacguguuauccaggagauuucaucaauuaugaggagcuaagagagcaauugagcucagugucaucauuugaaagguuugagauauuccccaagacaaguucauggcccaaucaugacucgaacaaagguguaacggcagcauguccucaugcuggagcaaaaagcuucuacaaaaauuuaauauggcuaguuaaaaaaggaaauucauacccaaagcucagcaaauccuacauuaaugauaaaaggaaagaaguccucgugcuguggggcauucaccauccaucuacuacugcugaccaacaaagucucuaucagaaugcagaugcauauguuuuuguggggacaucaagauacagcaagaaauucaagccggaaauagcaauaagacccaaagugagggaucaagaagggagaaugaacuauuacuggacacuaguagagccgggagacaaaauaacauucgaagcaacuggaaaucuagugguaccgagauaugcauucgcaauggaaagaacugcuggaucugguauuaucauuucagauacaccaguccacgauugcaauacaacuugucagacacccaagggugcuauaaacaccagccucccauuucagaauauacauccgaucacaauuggaaaauguccaaaguauguaaaaagcacaaaauugagacuggccacaggauugaggaauaucccgucuauucaaucuagaggccuauuuggggccauugccggcuucauugaagggggguggacagggaugguagauggaugguacgguuaucaccaucaaaaugagcaggggucaggauaugcagccgaccugaagagcacacagaaugccauugacaagauuacuaacaaaguaaauucuguuauugaaaagaugaauacacaguucacagcaguagguaaagaguucaaccaccuggaaaaaagaauagagaauuuaaauaaaaaaguugaugaugguuuccuggacauuuggacuuacaaugccgaacuguugguucuauuggaaaaugaaagaacuuuggacuaccacgauucaaaugugaagaacuuguaugaaaagguaagaaaccaguuaaaaaacaaugccaaggaaauugggaacggcugcuuugaauuuuaccacaaaugcgauaacacgugcauggaaagugucaagaaugggacuuaugacuacccaaaauacucagaggaagcaaaauuaaacagagaagaaauagaugggguaaagcuggaaucaacaaggauuuaccagauuuuggcgaucuauucaacugucgccaguucauugguacugguagucucccugggggcaaucaguuucuggaugugcucuaaugggucucuacaguguagaauauguauuuaa

SEQ ID NO: 41774 - RNA, 1701 nt, Artificial Sequence
  derived and/or modified CDS sequence (wt) from hemagglutinin__InfluenzaA__AGB08296
augaaggcaauacuaguaguucugcuauauacauuugcaaccgcaaaugcagacacauuauguauagguuaucaugcgaacaauucaacagacacuguagacacaguacuagaaaagaauguaacaguaacacacucuguuaaccuucuagaagacaagcauaaugggaaacuaugcaaacuaagagggguagccccauugcauuuggguaaauguaacauugcuggcuggauccugggaaauccagagugugaaucacucuccacagcaagcucaugguccuacauuguggaaacaucuaguucagacaauggaacguguuacccaggagauuucaucaauuaugaggagcuaagagagcaauugagcucagugucaucauuugaaagguuugagauauuccccaagacaaguucauggcccaaucaugacucgaacaaagguguaacggcagcauguccucaugcuggagcaaaaagcuucuacaaaaauuuaauauggcuaguuaaaaaaggaaauucauacccaaagcucagcaaauccuacauuaaugauaaagggaaagaaguccucgugcuguggggcauucaccauccaucuacuacugcugaccaacaaagucucuaucagaaugcagaugcauauguuuuuguggggacaucaagauacagcaagaaauucaagccggaaauagcaauaagacccaaggugaggggucaagaagggagaaugaacuauuacuggacacuaguagagccgggagacaaaauaacauucgaagcaacuggaaaucuagugguaccgagauaugcauucgcaauggaaagaacugcuggaucugguauuaucauuucagauacaccaguccacgauugcaauacaacuugucagacacccaagggugcuauaaacaccagccucccauuucagaauauacauccgaucacaauuggaaaauguccaaaguauguaaaaagcacaaaauugagacuggccacaggauugaggaaugucccgucuauucaaucuagaggccuauuuggggccauugccggcuucauugaagggggguggacagggaugguagauggaugguacgguuaucaccaucaaaaugagcaggggucaggauaugcagccgaccugaagagcacacagaaugccauugacaagauuacuaacaaaguaaauucuguuauugaaaagaugaauacacaguucacagcaguagguaaagaguucaaccaccuggaaaaaagaauagagaauuuaaauaaaaaaguugaugaugguuuccuggacauuuggacuuacaaugccgaacuguugguucuauuggaaaaugaaagaacuuuggacuaccacgauucaaaugugaagaacuuguaugaaaagguaagaaaccaguuaaaaaacaaugccaaggaaauugggaacggcugcuuugaauuuuaccacaaaugcgauaacacgugcauggaaagugucaaaaaugggacuuaugacuacccaaaauacucagaggaagcaaaauuaaacagagaagaaauagaugggguaaagcuggaaucaacaaggauuuaccagauuuuggcgaucuauucaacugucgccaguucauugguacugguagucucccugggggcaaucaguuucuggaugugcucuaaugggucucuacaguguagaauauguauuuaa

SEQ ID NO: 41775 - RNA, 1701 nt, Artificial Sequence
  derived and/or modified CDS sequence (wt) from hemagglutinin__InfluenzaA__AGB08297
augaaggcaauacuaguaguucugcuauauacauuugcaaccgcaaaugcagacacauuauguauagguuaucaugcgaacaauucaacagacacuguagacacaguacuagaaaagaauguaacaguaacacacucuguuaaccuucuagaagacaagcauaaugggaaacuaugcaaacuaagagggguagccccauugcauuuggguaaauguaacauugcuggcuggauccugggaaauccagagugugaaucacucuccacagcaagcucaugguccuacauuguggaaacaucuaguucagacaauggaacguguuacccaggagauuucaucaauuaugaggagcuaagagagcaauugagcucagugucaucauuugaaagguuugagauauuccccaagacaaguucauggcccaaucaugacucgaacaaagguguaacggcagcauguccucaugcuggagcaaaaagcuucuacaaaaauuuaauauggcuaguuaaaaaaggaaauucauacccaaagcucagcgaauccuacauuaaugauaaagggaaagaaguccucgugcuguggggcauucaccauccaucuacuacugcugaccaacaaagucucuaucagaaugcagaugcauauguuuuuguggggacaucaagauacagcaagaaauucaagccggaaauagcaauaagacccaaagugagggaucaagaagggagaaugaacuauuacuggacacuaguagagccgggagacaaaauaacauucgaagcaacuggaaaucuagugguaccgagauaugcauucgcaauggaaagaacugcuggaucugguauuaucauuucagauacaccaguccacgauugcaauacaacuugucagacacccaagggugcuauaaacaccagccucccauuucagaauauacauccgaucacaauuggaaaauguccaaaauauguaaaaagcacaaaauugagacuggccacaggauugaggaaugucccgucuauucaaucuaggggccuauuuggggccauugccggcuucauugaagggggguggacagggaugguagauggaugguacgguuaucaccaucaaaaugagcaggggucaggauaugcagccgaccugaagagcacacagaaugccauugacaagauuacuaacaaaguaaauucuguuauugaaaagaugaauacacaguucacagcaguagguaaagaguucaaccaccuggaaaaaagaauagagaauuuaaauaaaaaaguugaugaugguuuccuggacauuuggacuuacaaugccgaacuguugguucuauuggaaaaugaaagaacuuuggacuaccacgauucaaaugugaagaacuuguaugaaaagguaagaaaccaguuaaaaaacaaugccaaggaaauugggaacggcugcuuugaauuuuaccacaaaugcgauaacacgugcauggaaagugucaaaaaugggacuuaugacuacccaaaauacucagaggaagcaaaauuaaacagagaagaaauagaugggguaaagcuggaaucaacaaggauuuaccagauuuuggcgaucuauucaacugucgccaguucauugguacugguagucucccugggggcaaucaguuucuggauguguucuaaugggucucuacaguguagaauauguauuuaa

SEQ ID NO: 41776 - RNA, 1701 nt, Artificial Sequence
  derived and/or modified CDS sequence (wt) from hemagglutinin__InfluenzaA__AGB08298
augaaggcaauacuaguaguucuucuauauacauuugcaaccgcaaaugcagacacauuauguauagguuaucaugcgaacaauucaacagacacuguagacacaguacuagaaaagaauguaacaguaacacacucuguuaaccuucuagaagacaagcauaaugggaaacuaugcaaacuaagagggauagccccauugcauuuggguaaauguaacauugcuggcuggaucuugggaaauccagagugugaaucacucuccacagcaagcucgugguccuacauuguggaaacaucuaguucagacaauggaacguguuacccaggagauuucaucaauuaugaggagcuaagagagcaauugagcucagugucaucauuugaaagguuugagauauuccccaagacaaguucauggcccaaucaugacucgaacaaagguguaacggcagcauguccucaugcuggagcaaaaagcuucuacaaaaauuuaauauggcuaguuaaaaaaggaaauucauacccaaggcucagcaaauccuacauuaaugauaaagggaaagaaguccucgugcuguggggcauucaccauccaucuacuacugcugaccaacaaagucucuaucagaaugcagaugcauauguuuuuguagggacaucaagauacagcaagaaauucaagccggaaauagcaauaagacccaaagugagggaucaagaagggagaaugaacuauuacuggacacuaguagagccgggagacaaaauaacauucgaagcaacuggaaaucuagugguaccgagauaugcauucgcaauggagagaacugcuggaucugguauuaucauuucagauacaccaguccaugauugcaauacaacuugucagacacccaagggugcuauaaacaccagccucccauuucagaauauacauccgaucacaauuggaaaauguccaaaauauguaaaaagcacaaaauugagacuggccacaggauugaggaaugucccgucuauucaaucuagaggccuauuuggggccauugccggcuucauugaagggggguggacagggaugguagauggaugguacgguuaucaccaucaaaaugagcaggggucaggauaugcagccgaccugaagagcacacagaaugccauugacaagauuacuaacaaaguaaauucuguuauugaaaagaugaauacacaguucacagcaguagguaaagaguucaaccaacuggaaaaaagaauagagaauuuaaauaaaaaaguugaugaugguuuccuggacauuuggacuuacaaugccgaacuguugguucuauuggaaaaugaaagaacuuuggacuaccacgauucaaaugugaagaacuuguaugaaaagguaagaaaccaguuaaaaaacaaugccaaggaaauugggaacggcugcuuugaauuuuaccacaaaugcgauaacacgugcauggaaagugucaaaaaugggacuuaugacuacccaaaauacucagaggaagcaaaauuaaacagagaagaaauagaugggguaaagcuggaaucaacaaggauuuaccagauuuuggcgaucuauucaacugucgccaguucauugguacugguagucucccugggggcaaucaguuucuggaugugcucuaaugggucucuacaguguagaauauguauuuaa

SEQ ID NO: 41777 - RNA, 1701 nt, Artificial Sequence
  derived and/or modified CDS sequence (wt) from hemagglutinin__InfluenzaA__AGB08301
augaagaccaucauugcuuugagcuacauucuaugucuaguuuucgcucaagaacuuccuggaaaugacgacagcacggcaacgcugugccuugggcaccaugcagugccaaacggaacgauagugaaaacaaucacgaaugaccaaauugaaguuacuaaugcuacugagcugguucagaguuccucaacaggugaaauaugcaacaguccucaucagauccuugauggagaaaacugcacacuaauagaugcucuauugggagacccucagugugauggcuuccaaaacaagaaaugggaccuuuuuguugaacgaagcaaagcccacagcaacuguuacccuuaugaugugccggauuaugccucccuuaggucacuaguugccucauccggcacacuggaguuuaacaaugaaagcuucaauuggacuggagucacucaaaacggaacaagcucugcuugcauaaggagaucuaauaauaguuucuuuaguagauugaauugguugacccacuuaaacuucaaauacccagcauugaacgugacuaugccaaacaaugaacaauuugacaaauuguacauuugggggguucaccacccggguacggacaaggaccaaaucuuccuguaugcucaagcaucaggaagaaucacaguaucuaccaaaagaagccaacaagcuguaauuccgaauaucggaucuagacccagaguaaggaauaucccuagcagaguaagcaucuauuggacaguaguaaaaccgggagacauacuuuugauuaacagcacagggaaucuaauugcuccuagggguuacuucaaaauacgaagugggaaaagcucaauaaugagaucagaugcacccauuggcaaaugcaauucugcaugcaucacuccaaauggaagcauucccaaugacaaaccauuccaaaauguaaacaggaucacauacggggccugucccagauaugucaagcaaaacacucugaaauuggcaacaggaaugagaaauguaccagagaaacaaacuagaggcauauuuggcgcaauagcggguuucauagaaaaugguugggagggaaugguggaugguugguacgguuucaggcaucaaaauucugagggaaggggacaagcagcagaucucaaaagcacucaagcagcaaucgaucaaaucaaugggaagcugaauagauugaucgggaaaaccaacgagaaauuccaucagauugaaaaagaauucucagaagucgaagggagaauucaggaccuugagaaauauguugaggacacuaaaauagaucucuggucauacaacgcggagcuucuuguugcccuggagaaccaacacacaauugaucuaacugacucagaaaugaacaaacuguuugaaaaaacaaagaagcaacugagggaaaaugcugaggauaugggcaaugguuguuucaaaauauaccacaaaugugacaaugccugcauaggaucaaucagaaaugggacuuaugaucacaauguguacagagaugaagcauuaaacaaccgauuccagaucaagggaguugagcugaagucaggguacaaagauuggauccuauggauuuccuuugccauaucauguuuuuugcuuuguguugcuuuguugggguucaucaugugggccugccaaaaaggcaacauuaggugcaacauuugcauuuga

SEQ ID NO: 41778 - RNA, 1701 nt, Artificial Sequence
  derived and/or modified CDS sequence (wt) from hemagglutinin__InfluenzaA__AGB08343
augaagacuaucauugcuuugagcuacauuuucugucugguucucgcccaagaccuuccaggaaaugacaacagcacagcaacgcugugccugggacaucaugcagugccaaacggaacgcuagugaaaacaaucacgaaugaucagauugaagugacuaaugcuacugagcugguucagaguuccucaacagguagaauaugcaacaauccucaucgaauccuugauggaauaaacugcacacugauugaugcucuauugggggacccucauugugauggcuuucaaaauaagaaaugggaccuuuuuguugaacgcagcaaagcuuucagcaacuguuacccuuaugaugugccagauuaugccucccuuaggucacuaguugccucgucaggcacucuggaguuuaucaaugaaggcuucaauuggacuggggucacucagaaugggggaagcuaugcuugcaaaaggggaccugauaacgguuuuuucaguagacugaacugguuguacaaaucagaaagcacauauccagugcugaacgugacuaugccaaacaaugacaauuuugacaaacuauacauuugggggguucaccacccgagcacggacaaagaacaaaccaaccuauauguucaagcaucagggagagucacagucuccaccaagagaagccagcaaacuauaaucccgaaugucgggucuagacccuggguaaggggucugucuaguagaauaagcaucuauuggacaauaguuaaaccgggugacauacugguaauuaauaguaaugggaaccuaauugcuccucgggguuacuucaaaauacgcaaugggaaaagcucaauaaugaggucagaugcaccuauuggcaccugcaguucugaaugcaucacuccaaauggaagcauucccaaugacaagcccuuucaaaacguaaacaagaucacauauggggcaugucccaaguauguuaagcaaaacacucugaaguuggcaacagggaugcggaauguaccagagaaacaaacuaggggcauauucggugcaauagcagguuucauagaaaaugguugggagggaaugauagacgguugguacgguuucaggcaucaaaauucugagggcacaggacaagcagcagaucuuaaaagcacucaagcagccaucgaccaaaucaaugggaaacugaauagaguaaucgagaaaacgaacgagaaauuccaucaaaucgaaaaggaauucucagaaguagaagggagaauucaggaccucgagaaauacguugaagacacuaaaauagaucucuggucuuacaaugcagagcuucuugucgcucuggagaaccaacauacaauugaucugacugacucggaaaugaacaagcuguuugaaaaaacaaggaggcaacugagggaaaaugcugaggacaugggcaaugguugcuucaaaauauaccacaaaugugacaaugcuugcauagggucaaucagaaaugggacuuaugaccaugauguauacagagacgaagcauuaaacaaccgguuucagaucaaagguguugaacugaagucaggauacaaagacuggauccuguggauuuccuuugccauaucaugcuuuuugcuuuguguuguuuugcugggguucaucaugugggccugccagaaaggcaacauuaggugcaacauuugcauuuga

SEQ ID NO: 41779 - RNA, 1701 nt, Artificial Sequence
  derived and/or modified CDS sequence (wt) from hemagglutinin__InfluenzaA__AGB08362
augaagaccaucauugcuuugagcuacauuuucugucuggcucucggccaagaccuuccaggaaaugacaacagcacagcaacgcugugccugggacaucaugcggugccaaacggaacacuagugaaaacaaucacagaugaucagauugaagugacuaaugcuacugagcuaguucagagcuccucaacggggaaaauaugcaacaauccucaucgaauccuugauggaauaaacugcacacugauagaugcucuauugggggacccucauugugauguuuuucaagaugagacaugggaccuuuucguugaacgcagcaaagcuuucagcaacuguuacccuuaugaugugccagauuaugccucccuuaggucacuaguugccucgucaggcacucuggaguuuaucacugaggguuucacuuggacuggggucacucagaaugggggaagcaaugcuugcaaaaggggaccugguagcgguuuuuucaguagacugaacugguugaccaaaucaggaagcacauauccagugcugaacgugacuaugccaaacaaugacaauuuugacaaacuauacauuugggggguucaccacccgagcacgaaccaagaacaaaccagccuguauguucaagcaucagggagagucacagucucuaccaggagaagccagcaaacuauaaucccgaauaucggguccagacccuggguaaggggucugucuaguagaauaagcaucuauuggacaauaguuaagccgggagacguacugguaauuaauaguaaugggaaccuaaucgcuccucgggguuauuucaaaaugcgcacugggaaaagcucaauaaugaggucagaugcaccuauugauaccuguauuucugaaugcaucacuccaaauggaagcauucccaaugacaagcccuuucaaaacguaaacaagaucacauauggagcaugccccaaguauguuaagcaaaacacccugaaguuggcaacagggaugcggaauguaccagagaaacaaacuagaggccuauucggcgcaauagcagguuucauagaaaaugguugggagggaaugauagacgguugguacgguuucaggcaucaaaauucugagggcacaggacaagcagcagaucuuaaaagcacucaagcagccaucgaccaaaucaaugggaaauugaacaggguaaucgagaagacgaacgagaaauuccaucaaaucgaaaaggaauucucagaaguagaagggagaauucaggaccucgagaaauacguugaagacacuaaaauagaucucuggucuuacaaugcggagcuucuugucgcucuggaaaaucaacauacaauugaccugacugacucggaaaugaacaagcuguuugauaaaacaaggaggcaacugagggaaaaugcugaagacaugggcaaugguugcuucaaaauauaccacaaaugugacaacgcuugcauagagucaaucagaaaugggacuuaugaccaugauguauacagagacgaagcauuaaacaaccgguuucagaucaaagguguugaacugaagucuggauacaaagacuggauccuguggauuuccuuugccauaucaugcuuuuugcuuuguguuguuuugcugggguucaucaugugggccugccagagaggcaacauuaggugcaacauuugcauuuga

SEQ ID NO: 41780 - RNA, 1701 nt, Artificial Sequence
  derived and/or modified CDS sequence (wt) from hemagglutinin__InfluenzaA__AGB12986
augaaggcaauacuaguaguucugcuauauacauuugcaaccgcaaaugcagacacauuauguauagguuaucaugcgaacaauucaacagacacuguagacacaguacuagaaaagaauguaacaguaacacacucuguuaaucuucuagaagacaagcauaacgggaaacuaugcaaacuaagagggguagccccauugcauuuggguaaauguaacauugcuggcuggauccugggaaauccagagugugaaucacucuccacagcaagcucaugguccuacauuguggaaacaucuaguucagacaauggaacguguuacccaggagauuucaucgauuaugaggagcuaagagagcaauugagcucagugucaucauuugaaagguuugagauauuccccaaaacaaguucauggcccaaucaugacucgaacaaagguguaacggcagcauguccucaugcuggagcaaaaggcuuuuacaaaaauuuaauauggcuaguuaaaaaaggaaauucauacccaaagcucagcaaauccuacauuaaugauaaagggaaagaaguccucgugcuauggggcauucaccauccaucuacuacugcugaccaacaaagucucuaucagaaugcagauacauauguuuuuguggggacaucaagauacagcaagaaguucaagccggaaauagcaauaagacccaaagugagggaucaagaagggagaaugaacuauuacuggacaauaguagagccgggagacaaaauaacauucgaagcaacuggaaaucuagugguaccgagauaugcauucgcaauggaaagaaaugcuggaucugguauuaucauuucagauacaccaguccacgauugcaauacaacuugucagacacccaagggugcuauaaacaccagccucccauuucagaauauacauccgaucacaauuggaaaauguccaaaauauguaaaaagcacaaaauugagacuggccacaggauugaggaaugucccgucuauucaaucuagaggccuauuuggggccauugccggcuucauugaagggggguggacagggaugguagauggaugguacgguuaucaccaucaaaaugagcaggggucaggauaugcagccgaccugaagagcacacagaaugccauugacaagauuacuaacaaaguaaauucuguuauugaaaagaugaauacacaguucacagcaguagguaaagaguucaaccaccuggaaaaaagaauagagaauuuaaauaaaaaaguugaugaugguuuccuggacauuuggacuuacaaugccgaacuguugguucuauuggaaaaugaaagaacuuuggacuaccacgauucaaaugugaagaacuuauaugaaaagguaagaaaccaguuaaaaaacaaugccaaggaaauuggaaacggcugcuuugaauuuuaccacaaaugcgauaacacgugcauggaaagugucaaaaaugggacuuaugacuacccaaaauacucagaggaagcaaaauuaaacagagaagaaauagaugggguaaagcuggaaucaacaaggauuuaccagauuuuggcgaucuauucaacugucgccaguucauugguacugguagucucccugggggcaaucaguuuuuggaugugcucuaaugggucucuacaguguagaauauguauuuaa

SEQ ID NO: 41781 - RNA, 1701 nt, Artificial Sequence
  derived and/or modified CDS sequence (wt) from hemagglutinin__InfluenzaA__AGB13006
augaaggcaauacuaguaguucugcuauauacauuugcaaccgcaaaugcagacacauuauguauagguuaucaugcgaacaauucaacagacacuguagacacaguacuagaaaagaauguaacaguaacacacucuguuaaccuucuagaagacaagcauaacgggaaacuaugcaaacuaagagggguagccccauugcauuuggguaaauguagcauugccggcuggauccugggaaauccagaaugugaaucacucuccacagcaagcucaugguccuacauuguggaaacaucuaguucagacaauggaacguguuacccaggagauuucaucaauuaugaggagcuaagagagcaauugagcucagugucaucauuugaaagguuugagauauuccccaagacaaguucauggcccaaucaugacucgaacaaagguguaacggcagcauguccucaugcuggagcaaaaagcuucuacaaaaauuugauauggcuaguuaaaaaaggaaauucauacccaaagcucagcaaauccuacauuaaugauaaagggaaagaaguccucgugcuauggggcauucaccauccaucuacuacugcugaccaacaaagucucuaucagaaugcagaugcauauguuuuuguggggacaucaagauacagcaagaaguucaagccggaaauagcaauaagacccaaagugagggaucaagaagggagaaugaacuauuacuggacacuaguagagccgggagacaaaauaacauucgaagcaacuggaaaucuagugguaccgagauaugcauucgcaauggaaagaaaugcuggaucugguauuaucauuucagauacaccaguacacgauugcaauacaacuugucagacacccaagggugcuauaaacaccagccucccauuucagaauauacauccgaucacaauuggaaaauguccaaaauauguaaaaagcacaaaauugagacuggccacaggauugaggaaugucccgucuauucaaucuagaggccuauuuggggccauugccggcuucauugaagggggguggacagggaugguagauggaugguacgguuaucaccaucaaaaugagcaggggucaggauaugcagccgaccugaagagcacacagaaugccauugacaagauuacuaacaaaguaaauucuguuauugaaaagaugaauacacaguucacagcaguagguaaagaguucaaccaccuggaaaaaagaauagagaauuuaaauaaaaaaguugaugaugguuuccuggacauuuggacuuacaaugccgaacuguugguucuauuggaaaaugaaagaacuuuggacuaccacgauucaaaugugaagaacuuauaugaaaagguaagaaaccaguuaaaaaacaaugccaaggaaauuggaaacggcugcuuugaauuuuaccacaaaugcgauaacacgugcauggaaagugucaaaaaugggacuuaugacuacccaaaauacucagaggaagcaaaauuaaacagagaagaaauagaugggguaaagcuggaaucaacaaggauuuaccagauuuuggcgaucuauucaacugucgccaguucauugguacugguagucucccugggggcaaucagcuucuggaugugcucuaaugggucucuacaguguagaauauguauuuaa

SEQ ID NO: 41782 - RNA, 1701 nt, Artificial Sequence
  derived and/or modified CDS sequence (wt) from hemagglutinin__InfluenzaA__AGB13016
augaaggcaauacuaguaguucugcuauauacaauugcaaccgcaaaugcagacacauuauguauagguuaucaugcgaacaauucaacagacacuguagacacaguacuagaaaagaauguaacaguaacacacucuguuaaccuucuagaagacaagcauaacgggaaacuaugcaaacuaagagggguagccccauugcauuuggguaaauguaacauugcuggcuggauccugggaaauccagagugugaaucacucuccacagcaagcucaugguccuacauuguggaaacaucuaguucagacaauggaacguguuacccaggagauuucaucaauuaugaggagcuaagagagcaauugagcucagugucaucauuugaaagguuugagauauuccccaagacaaguucauggcccaaucaugacucgaacaaagguguaacggcagcauguccucaugcuggagcaaaaagcuucuacaaaaauuuaauauggcuaguuaaaaaaggaaauucauacccaaagcucagcaaauccuacauuaaugauaaagggaaagaaguccucgugcuguggggcauucaccauccaucuacuacugcugaccaacaaagucucuaucagaaugcagaugcauauguuuuuguggggacaucaagauacagcaagaaguucaagccggaaauagcaauaagacccaaagugagggaucaagaagggagaaugaacuauuacuggacacuaguagagccgggagacaaaauaacauucgaagcaauuggaaaucuagugguaccgagauaugcauucgcaauggaaaaaaaugcuggaucugguauuaucauuucagauacaccaguccacgauugcaauacaacuugucagacacccaagggugcuauaaacaccagccucccauuucagaauauacauccgaucacaauuggaaaauguccaaaauauguaaaaagcacaaaauugagacuggccacaggauugaggaaugucccgucuauucaaucuagaggccuauuuggggccauugccggcuucauugaagggggguggacagggaugguagauggaugguacgguuaucaccaucaaaaugagcaggggucaggauaugcagccgaccugaagagcacacagaaugccauugacaagauuacuaacaaaguaaauucuguuauugaaaagaugaauacacaguucacagcaguagguaaagaguucaaccaccuggaaaaaagaauagagaauuuaaauaaaaaaguugaugaugguuuccuggacauuuggacuuacaaugccgaacuguugguucuauuggaaaaugaaagaacuuuggacuaccacgauucaaaugugaagaauuuguaugaaaagguaagaaaccaguuaaaaaacaaugccaaggaaauuggaaacggcugcuuugaauuuuaccacaaaugcgauaacacgugcauggaaagugucaaaaaugggacuuaugacuacccaaaauacucagaggaagcaaaauuaaacagagaagaaauagaugggguaaagcuggaaucagcaaggguuuaccagauuuuggcgaucuauucaacugucgccaguucauugguacugguagucucccugggggcaaucaguuucuggaugugcucuaaugggucucuacaguguagaauauguauuuaa

SEQ ID NO: 41783 - RNA, 1701 nt, Artificial Sequence
  derived and/or modified CDS sequence (wt) from hemagglutinin__InfluenzaA__AGB13026
augaaggcaauacuaguaguucugcuauauacauuugcaaccgcaaaugcagacacauuauguauagguuaucaugcgaacaauucaacagacacuguagacacaguacuagaaaagaauguaacaguaacacacucuguuaaccuucuagaagacaagcauaacgggaaacuaugcaaacuaagagggguagccccauugcauuuggguaaauguaacauugcuggcuggauccugggaaauccagagugugaaucacucuccacagcaagcucaugguccuacauuguggaaacaucuaguucagacaauggaacguguuacccaggagauuucaucaauuaugaggagcuaagagagcaauugagcucagugucaucauuugaaagguuugagauauuccccaagacaaguucauggcccaaucaugacucgaacaaagguguaacggcagcauguccucaugcuggagcaaaaagcuucuacaaaaauuuaauauggcuaguuaaaaaaggaaauucauacccaaagcucagcaaauccuacauuaaugauaaagggaaagaaguccucgugcuguggggcauucaccauccaucuacuacugcugaccaacaaagucucuaucagaaugcagaugcauauguuuuuguggggacaucaagauacagcaagaaguucaagccggaaauagcaauaagacccaaagugagggaucaagaagggagaaugaacuauuacuggacacuaguagagccgggagacaaaauaacauucgaagcaacuggaaaucuagugguaccgagauaugcauucgcaauggaaagaaaugcuggaucugguauuaucauuucagauacaccaguccacgauugcaauacaacuugucagacacccaagggugcuauaaacaccagccucccauuucagaauauacauccgaucacaauuggaaaauguccaaaauauguaaaaagcacaaaauugagacuggccacaggauugaggaaugucccgucuauucaaucuagaggccuauuuggggccauugccggcuucauugaagggggguggacagggaugguagauggaugguacgguuaucaccaucaaaaugagcaggggucaggauaugcagccgaccugaagagcacacagaaugccauugacaagauuacuaacaaaguaaauucuguuauugaaaagaugaauacacaguucacagcaguagguaaagaguucaaccaccuggaaaaaagaauagagaauuuaaauaaaaaaguugaugaugguuuccuggacauuuggacuuacaaugccgaacuguugguucuauuggaaaaugaaagaacuuuggacuaccacgauucaaaugugaagaacuuguaugaaaagguaagaaaccaguuaaaaaacaaugccaaggaaauuggaaacggcugcuuugaauuuuaccacaaaugcgauaacacgugcauggaaagugucaaaaaugggacuuaugacuacccaaaauacucagaggaagcaaaauuaaacagagaagaaauagaugggguaaagcuggaaucaacaaggauuuaccagauuuuggcgaucuauucaacugucgccaguucauugguacugguagucucccugggggcaaucaguuucuggaugugcucuaaugggucucuacaguguagaauauguauuuaa

SEQ ID NO: 41784 - RNA, 1701 nt, Artificial Sequence; identical to SEQ ID NO: 39090
  derived and/or modified CDS sequence (wt) from hemagglutinin__InfluenzaA__AGB13036

SEQ ID NO: 41785 - RNA, 1701 nt, Artificial Sequence
  derived and/or modified CDS sequence (wt) from hemagglutinin__InfluenzaA__AGB13048
augaaggcaauacuaguaguucugcuauauacauuugcaaccgcaaaugcagacacauuauguauagguuaucaugcgaacaauucaacagacacuguagacacaguacuagaaaagaauguaacaguaacacacucuguuaaccuucuagaagacaagcauaacgggaaacuaugcaaacuaagagggguagccccauugcauuuggguaaauguaacauugcuggcuggauccugggaaauccagagugugaaucacucuccacagcaagcucaugguccuacauuguggaaacaucuaguucagacaauggaacguguuacccaggagauuucaucaauuaugaggagcuaagagagcaauugagcucagugucaucauuugaaagguuugagauauuccccaagacaaguucauggcccaaucaugacucgaacaaagguguaacggcagcauguccucaugcuggagcaaaaagcuucuacaaaaauuuaauauggcuaguuaaaaaaggaaauucauacccaaagcucagcaaauccuacauuaaugauaaagggaaagaaguccucgugcuguggggcauucaccauccaucuacuacugcugaccaacaaagucucuaucagaaugcagaugcauauguuuuuguggggacaucaagauacagcaagaaguucaagccggaaauagcaauaagacccaaagugagggaucaagaagggagaaugaacuauuacuggacacuaguagagccgggagacaaaauaacauucgaagcaacuggaaaucuagugguaccgagauaugcauucgcaauggaaagaaaugcuggaucugguauuaucauuucagauacaccaguccacgauugcaauacaacuugucagacacccaagggugcuauaaacaccagccucccauuucagaauauacauccgaucacaauuggaaaauguccaaaauauguaaaaagcacaaaauugagacuggccacaggauugaggaaugucccgucuauucaaucuagaggccuauuuggggccauugccggcuucauugaagggggguggacagggaugguagauggaugguacgguuaucaccaucaaaaugagcaggggucaggauaugcagccgaccugaagagcacacagaaugccauugacaagauuacuaacaaaguaaauucuguuauugaaaagaugaauacacaguucacagcaguagguaaagaguucaaccaccuggaaaaaagaauagagaauuuaaauaaaaaaguugaugaugguuuccuggacauuuggacuuacaaugccgaacuguugguucuauuggaaaaugaaagaacuuuggacuaccacgauucaaaugugaagaacuuguaugaaaagguaagaaaccaguuaaaaaacaaugccaaggaaauuggaaacggcugcuuugaauuuuaccacaaaugcgauaacacgugcauagaaagugucaaaaaugggacuuaugacuacccaaaauacucagaggaagcaaaauuaaacagagaagaaauagaugggguaaagcuggaaucaacaaggauuuaccagauuuuggcgaucuauucaacugucgccaguucauugguacugguagucucccugggggcaaucaguuucuggaugugcucuaaugggucucuacaguguagaauauguauuuaa

SEQ ID NO: 41786 - RNA, 1701 nt, Artificial Sequence
  derived and/or modified CDS sequence (wt) from hemagglutinin__InfluenzaA__AGB13066
augaaggcaauacuaguaguucugcuauauacauuugcaaccgcaaaugcagacacauuauguauagguuaucaugcgaacaauucaacagacacuguagacacaguacuagaaaagaauguaacaguaacacacucuguuaaccuucuagaagacaagcauaacgggaaacuaugcaaacuaagagggguagccccauugcauuuggguaaauguaacauugcuggcuggauccugggaaauccagagugugaaucacucuccacagcaagcucaugguccuacauuguggaaacaucuaguucagacaauggaacguguuacccaggagauuucaucgauuaugaggagcuaagagagcaauugagcucagugucaucauuugaaagguuugagauauuccccaagacaaguucauggcccaaucaugacucgaacaaagguguaacggcagcauguccucaugcuggagcaaaaagcuucuacaaaaauuuaauauggcuaguuaaaaaaggaaauucauacccaaagcucagcaaauccuacauuaaugauaaagggaaagaaguccucgugcuauggggaauucaccauccaucuacuagugcugaccaacaaagucucuaucagaaugcagaugcauauguuuuuguggggacaucaagauacagcaagaaguucaagccggaaauagcaauaagacccaaagugagggaucaagaagggagaaugaacuauuacuggacacuaguagagccgggagacaaaauaacauucgaagcaacuggaaaucuagugguaccgagauaugcauucgcaauggaaagaaaugcuggaucugguauuaucauuucagauacaccaguccacgauugcaauacaacuugucagacacccaagggugcuauaaacaccagccucccauuucagaauauacauccgaucacaauuggaaaauguccaaaauauguaaaaggcacaaaauugagacuggccacaggauugaggaaugucccgucuauucaaucuagaggccuauuuggggccauugccgguuucauugaagggggguggacagggaugguagauggaugguacgguuaucaccaucaaaaugagcaggggucaggauaugcagccgaccugaagagcacacagcaugccauugacgagauuacuaacaaaguaaauucuguuauugaaaagaugaauacacaguucacagcaguagguaaagaguucaaccaccuggaaaaaagaauagagaauuuaaauaaaaaaguugaugaugguuuccuggacauuuggacuuacaaugccgaacuguugguucuauuggaaaaugaaagaacuuuggacuaccacgauucaaaugugaagaacuuauaugaaaagguaagaagccaguuaaaaaacaaugccaaggaaauuggaaacggcugcuuugaauuuuaccacaaaugcgauaacacgugcauggaaagugucaaaaaugggacuuaugacuacccaaaauacucagaggaagcaaaauuaaacagagaagaaauagaugggguaaagcuggaaucaacaaggauuuaccagauuuuggcgaucuauucaacugucgccaguucauugguacugguagucucccugggggcaaucaguuucuggaugugcucuaaugggucucuacaguguagaauauguauuuaa

SEQ ID NO: 41787 - RNA, 1701 nt, Artificial Sequence
  derived and/or modified CDS sequence (wt) from hemagglutinin__InfluenzaA__AGB13082
augaaggcaauacuaguaguucugcuauauacauuugcaaccgcaaaugcagacacauuauguauagguuaucaugcgaacaauucaacagacacuguagacacaguacuagaaaagaauguaacaguaacacacucuguuaaccuucuagaagacaagcauaacgggaaacuaugcaaacuaagagggguagccccauugcauuuggguaaauguaacauugcuggcuggauccugggaaauccagagugugaaucacucuccacagcaagcucaugguccuacauuguggaaacaucuaguucagacaauggaacguguuacccaggagauuucaucgauuaugaggagcuaagagagcaauugagcucagugucaucauuugaaagguuugagauauuccccaagacaaguucauggcccaaucaugacucgaacaaagguguaacgacagcauguccucaugcuggagcaaaaagcuucuacaaaaauuuaauauggcuaguuaaaaaaggaaauucauacccaaaacucagcaaauccuacauuaaugauaaagggaaagaaguccucgugcuauggggcauucaccauccaccuacuagugcugaccaacaaagucucuaucagaaugcagaugcauauguuuuuguggggacaucaagauacagcaagaaguucaagccggaaauagcaauaagacccaaagugagggaucaagaagggagaaugaacuauuacuggacacuaguagagccgggagacaaaauaacauucgaagcaacuggaaaucuagugguaccgagauaugcauucgcaauggaaagaaaugcuggaucugguauuaucauuucagauacaccaguccacgauugcaauacaacuugucagacacccaagggugcuauaaacaccagccucccauuucagaauauacauccgaucacaauuggaaaauguccaaaauauguaaaaagcacaaaauugagacuggccacaggauugaggaaugucccgucuauucaaucuagaggccuauuuggggccauugccgguuucauugaagggggguggacagggaugguagauggaugguacgguuaucaccaucaaaaugagcaggggucaggguaugcagccgaccugaagagcacacagaaugccauugacgagauuacuaacaaaguaaauucuguuauugaaaagaugaauacacaguucacagcaguagguaaagaguucaaccaccuggaaaaaagaauagagaauuuaaauaaaaaaguugaugaugguuucuuggacauuuggacuuacaaugccgaacuguugguucuauuggaaaaugaaagaacuuuggacuaccacgauucaaaugugaagaacuuauaugaaaagguaagaagccaguuaaaaaacaaugccaaggaaauuggaaacggcugcuuugaauuuuaccacaaaugugauaacacgugcauggaaagugucaaaaaugggacuuaugacuacccaaaauacucagaggaagcaaaauuaaacagagaagaaauagaugggguaaagcuggaaucaacaaggauuuaccagauuuuggcgaucuauucaacugucgccaguucauugguacugguagucucccugggggcaaucaguuucuggaugugcucuaaugggucucuacaguguagaauauguauuuaa

SEQ ID NO: 41788 - RNA, 1701 nt, Artificial Sequence; identical to SEQ ID NO: 39090
  derived and/or modified CDS sequence (wt) from hemagglutinin__InfluenzaA__AGB13105

SEQ ID NO: 41789 - RNA, 1701 nt, Artificial Sequence
  derived and/or modified CDS sequence (wt) from hemagglutinin__InfluenzaA__AGB13125
augaaggcaauacuaguaguucugcuauauacauuugcaaccgcaaaugcagacacauuauguauagguuaucaugcgaacaauucaacagacacuguagacacaguacuagaaaagaauguaacaguaacacacucuguuaaccuucuagaagacaagcauaacgggaaacuaugcaaacuaagagggguagccccauugcauuuggguaaauguaacauugcuggcuggauccugggaaauccagagugugaaucacucuccacagcaagcucaugguccuacauuguggaaacaucuaguucagacaauggaacguguuacccaggagauuucaucaauuaugaggagcuaagagagcaauugagcucagugucaucauuugaaagguuugagauauuccccaagacaaguucauggcccaaucaugacucgaacaaagguguaacggcagcauguccucaugcuggagcaaaaagcuucuacaaaaauuuaauauggcuaguuaaaaaaggaaauucauacccaaagcucagcaaauccuacauuaaugauaaagggaaagaaguccucgugcuguggggcauucaccauccaucuacuacugcugaccaacaaagucucuaucagaaugcagaugcauauguuuuuguggggacaucaagauacagcaagaaguucaagccggaaauagcaauaagacccaaagugagggaucaagaagggagaaugaacuauuacuggacacuaguagagccgggagacaaaauaacauucgaagcaacuggaaaucuagugguaccgagauaugcauucgcaauggaaagaaaugcuggaucugguauuaucauuucagauacaccaguccacgauugcaauacaacuugucagacacccaagggugcuauaaacaccagccucccauuucagaauauacauccgaucacaauuggaaaauguccaaaauauguaaaaagcacaaaauugagacuggccacaggauugaggaaugucccgucuauucaaucuagaggccuauuuggggccauugccggcuucauugaagggggguggacagggaugguagauggaugguacgguuaucaccaucaaaaugagcaggggucaggauaugcagccgaccugaagagcacacagaaugccauugacaagauuacuaacaaaguaaauucuguuauugaaaagaugaauacacaguucacagcaguagguaaagaguucaaccaccuggaaaaaagaauagagaauuuaaauaagaaaguugaugaugguuuccuggacauuuggacuuacaaugccgaacuguugguucuauuggaaaaugaaagaacuuuggacuaccacgauucaaaugugaagaacuuguaugaaaagguaagaaaccaguuaaaaaacaaugccaaggaaauuggaaacggcugcuuugaauuuuaccacaaaugcgauaacacgugcauggaaagugucaaaaaugggacuuaugacuacccaaaauacucagaggaagcaaaauuaaacagagaagaaauagaugggguaaagcuggaaucaacaaggauuuaccagauuuuggcgaucuauucaacugucgccaguucauugguacugguagucucccugggggcaaucaguuucuggaugugcucuaaugggucucuacaguguagaauauguauuuaa

SEQ ID NO: 41790 - RNA, 1701 nt, Artificial Sequence
  derived and/or modified CDS sequence (wt) from hemagglutinin__InfluenzaA__AGB13130
augaaggcaauacuaguaguucugcuauauacauuugcaaccgcaaaugcagacacauuauguauagguuaucaugcgaacaauucaacagacacuguagacacaguacuagaaaagaauguaacaguaacacacucuguuaaccuucuagaagacaagcauaacgggaaacuaugcaaacuaagagggguagccccauugcauuuggguaaauguaacauugcuggcuggauccugggaaauccagagugugaaucacucuccacagcaagcucaugguccuacauuguggaaacaucuaguucagacaauggaacguguuacccaggagauuucaucaauuaugaggagcuaagagagcaauugagcucagugucaucauuugaaagguuugagauauuccccaagacaaguucauggcccaaucaugacucgaacaaagguguaacggcagcauguccucaugcuggagcaaaaagcuucuacaaaaauuuaauauggcuaguuaaaaaaggaaauucauacccaaagcucagcaaauccuacauuaaugauaaagggaaagaaguccucgugcuauggggcauucaccauccaucuacuacugcugaccaacaaagucucuaucagaaugcagaugcauauguuuuuguggggacaucaagauacagcaagaaguucaagccggaaauagcaauaagacccaaagugagggaucaagaagggagaaugaacuauuacuggacacuaguagagccgggagacaaaauaacauuugaagcaacuggaaaucuagugguaccgagauaugcauucgcaauggaaagaaaugcuggaucugguauuaucauuucagauacaccaguccacgauugcaauacaacuugucagacacccaagggugcuauaaacaccagccucccauuucagaauauacauccgaucacaauuggaaaauguccaaaauauguaaaaagcacaaaauugagacuggccacaggauugaggaaugucccgucuauucaaucuagaggccuauuuggggccauugccggcuucauugaagggggguggacagggaugguagauggaugguacgguuaucaccaucaaaaugagcaggggucaggauaugcagccgaccugaagagcacacagaaugccauugacaagauuacuaacaaaguaaauucuguuauugaaaagaugaauacacaguucacagcaguagguaaagaguucaaccaccuggaaaaaagaauagagaauuuaaauaaaaaaguugaugaugguuuccuggacauuuggacuuacaaugccgaacuguugguucuauuggaaaaugaaagaacuuuggacuaccacgauucaaaugugaagaacuuauaugaaaagguaagaaaccaguuaaaaaacaaugccaaggaaauuggaaacggcugcuuugaauuuuaccacaaaugcgauaacacgugcauggaaagugucaaaaaugggacuuaugacuacccaaaauacucagaggaagcaaaauuaaacagagaagaaauagaugggguaaagcuggaaucaacaaggauuuaccagauuuuggcgaucuauucaacugucgccaguucauugguacugguagucucccugggggcaaucagcuucuggaugugcucuaaugggucucuacaguguagaauauguauuuaa

SEQ ID NO: 41791 - RNA, 1701 nt, Artificial Sequence
  derived and/or modified CDS sequence (wt) from hemagglutinin__InfluenzaA__AGB13140
augaaggcaauacuaguaguucugcuauauacauuugcaaccgcaaaugcagacacauuauguauagguuaucaugcgaacaauucaacagacacuguagacacaguacuagaaaagaauguaacaguaacacacucuguuaaucuucuagaagacaagcauaacgggaaacuaugcaaacuaagagggguagccccauugcauuuggguaaauguaacauugcuggcuggauccugggaaauccagagugugaaucacucuccacagcaagcuuaugguccuacauuguggaaacaucuaguucagacaauggaacguguuacccaggagauuucaucgauuaugaggagcuaagagagcaauugagcucagugucaucauuugaaagguuugagauauuccccaagacaaguucauggcccaaucaugacucgaacaaagguguaacggcagcauguccucaugcuggagcaaaaagcuucuacaaaaauuuaauauggcuaguuaaaaaaggaaauucauacccaaagcucagcaaauccuacauuaaugauaaagggaaagaaguccucgugcuauggggcauucaccauccaucuacuacugcugaccaacaaagucucuaucagaaugcagauacauauguuuuuguggggacaucaagauacagcaagaaguucaagccggaaauagcaauaagacccaaagugagggaucaagaagggagaaugaacuauuacuggacacuaguagagccgggagacaaaauaacauucgaagcaacuggaaaucuagugguaccgagauaugcauucgcaauggaaagaaaugcuggaucugguauuaucauuucagauacaccaguccacgauugcaauacaacuugucagacacccaagggugcuauaaacaccagccucccauuucagaauauacauccgaucacaauuggaaaauguccaaaauauguaaaaagcacaaaauugagacuggccacaggauugaggaaugucccgucuauucaaucuagaggccuauuuggggccauugccggcuucauugaagggggguggacagggaugguagauggaugguacgguuaucaccaucaaaaugagcaggggucaggauaugcagccgaccugaagagcacacagaaugccauugacaagauuacuaacaaaguaaauucuguuauugaaaagaugaauacacaguucacagcaguggguaaagaguucaaccaccuggaaaaaagaauagagaauuuaaauaaaaaaguugaugaugguuuccuggacauuuggacuuacaaugccgaacuguugguucuauuggaaaaugaaagaacuuuggacuaccacgauucaaaugugaagaacuuauaugaaaagguaagaaaccaguuaaaaaacaaugccaaggaaauuggaaauggcugcuuugaauuuuaccacaaaugcgauaacacgugcauggaaagugucaaaaaugggacuuaugacuacccaaaauacucagaggaagcaaaauuaaacagagaagaaauagaugggguaaagcuggaaucaacaaggauuuaccagauuuuggcgaucuauucaacugucgccaguucauugguacugguagucucccugggggcaaucaguuuuuggaugugcucuaaugggucucuacaguguagaauauguauuuaa

SEQ ID NO: 41792 - RNA, 1701 nt, Artificial Sequence
  derived and/or modified CDS sequence (wt) from hemagglutinin__InfluenzaA__AGB13159
augaaggcaauacuaguaguuaugcuauauacauuugcaaccgcaaaugcagacacauuauguauagguuaucaugcgaacaauucaacagacacuguagacacaguacuagaaaagaauguaacaguaacacacucuguuaaucuucuagaagacaagcauaacgggaaacuaugcaaacuaagagggguagccucauugcauuuggguaaauguaacauugcuggcuggauccugggaaauccagagugugaaucacucuccacagcaagcucaugguccuacauuguggaaacaucuaguucagacaauggaacguguuacccaggagauuucaucgauuaugaggagcuaagagagcaauugagcucagugucaucauuugaaagguuugagauauuccccaaaacaaguucauggcccaaucaugacucgaacaaagguguaacggcagcauguccucaugcuggagcaaaaggcuucuacaaaaauuuaauauggcuaguuaaaaaaggaaauucauacccaaagcucagcaaauccuacauuaaugauaaagggaaagaaguccucgugcuauggggcauucaccauccaucuacuacugcugaccaacaaagucucuaucagaaugcagauacauauguuuuuguggggacaucaagauacagcaagaaguucaagccggaaauagcaauaagacccaaagugagggaucaagaagggagaaugaacuauuacuggacacuaguagagccgggagacaaaauaacauucgaagcaacuggaaaucuagugguaccgagauaugcauucgcaauggaaagaaaugcuggaucugguauuaucauuucagauacaccaguccacgauugcaauacaacuugucagacacccaagggugcuauaaacaccagccucccauuucagaauauacauccgaucacaauuggaaaauguccaaaauauguaaaaagcacaaaauugagacuggccacaggauugaggaaugucccgucuauucaaucuagaggccuauuuggggccauugccggcuucauugaagggggguggacagggaugguagauggaugguacgguuaucaccaucaaaaugagcaggggucaggauaugcagccgaccugaagagcacacagaaugccauugacaagauuacuaacaaaguaaauucuguuauugaaaagaugaauacacaguucacagcaguagguaaagaguucaaccaccuggaaaaaagaauagagaauuuaaauaaaaaaguugaugaugguuuccuggacauuuggacuuacaaugccgaacuguugguucuauuggaaaaugaaagaacuuuggacuaccacgauucaaaugugaagaacuuauaugaaaagguaagaaaccaguuaaaaaacaaugccaaggaaauuggaaauggcugcuuugaauuuuaccacaaaugcgauaacacgugcauggaaagugucaaaaaugggacuuaugacuacccaaaauacucagaggaagcaaaauuaaacagagaagaaauagaugggguaaagcuggaaucaacaaggauuuaccagauuuuggcgaucuauucaacugucgccaguucauugguacugguagucucccugggggcaaucaguuuuuggaugugcucuaaugggucucuacaguguagaauauguauuuaa

SEQ ID NO: 41793 - RNA, 1701 nt, Artificial Sequence
  derived and/or modified CDS sequence (wt) from hemagglutinin__InfluenzaA__AGB13170
augaaggcaauacuaguaguuaugcuauauacauuugcaaccgcaaaugcagacacauuauguauagguuaucaugcgaacaauucaacagacacuguagacacaguacuagaaaagaauguaacaguaacacacucuguuaaucuucuagaagacaagcauaacgggaaacuaugcaaacuaagagggguagccccauugcauuuggguaaauguaacauugcuggcuggauccugggaaauccagagugugaaucacucuccacagcaagcucaugguccuacauuguggaaacaucuaguucagacaauggaacguguuacccaggagauuucaucgauuaugaggagcuaagagagcaauugagcucagugucaucauuugaaagguuugagauauuccccaaaacaaguucauggcccaaucaugacucgaacaaagguguaacggcagcauguccucaugcuggagcaaaaggcuucuacaaaaauuuaauauggcuaguuaaaaaaggaaauucauacccaaagcucagcaaauccuacauuaaugauaaagggaaagaaguccuugugcuauggggcauucaccauccgucuacuacugcugaccaacaaagucucuaucagaaugcagauacauauguuuuuguggggacaucaagauacagcaagaaguucaagccggaaauagcaauaagacccaaaguaagggaucaagaagggagaaugaacuauuacuggacacuaguagagccgggagacaaaauaacauucgaagcaacuggaaaucuagugguaccgagauaugcauucgcaauggaaagaaaugcuggaucugguauuaucauuucagauacaccaguccacgauugcaauacaacuugucagacacccaagggugcuauaaacaccagccucccauuucagaauauacauccgaucacaauuggaaaauguccaaaauauguaaaaagcacaaaauugagacuggccacaggauugaggaaugucccgucuauucaaucuagaggccuauuuggggccauugccggcuucauugaagggggguggacagggaugguagauggaugguacgguuaucaccaucaaaaugagcaggggucaggauaugcagccgaccugaagagcacacagaaugccauugacaagauuacuaacaaaguaaauucuguuauugaaaagaugaauacacaguucacagcaguagguaaagaguucaaccaccuggaaaaaagaauagagaauuuaaauaaaaaaguugaugaugguuuccuggacauuuggacuuacaaugccgaacuguugguucuauuggaaaaugaaagaacuuuggacuaccacgauucaaaugugaagaacuuauaugaaaagguaaggaaccaguuaaaaaacaaugccaaggaaauuggaaauggcugcuuugaauuuuaccacaaaugcgauaacacgugcauggaaagugucaaaaaugggacuuaugacuacccaaaauacucagaggaagcaaaauuaaacagagaagaaauagaugggguaaagcuggaaucaacaaggauuuaccagauuuuggcgaucuauucaacugucgccaguucauugguacugguagucucccugggggcaaucaguuuuuggaugugcucuaaugggucucuacaguguagaauauguauuuaa

SEQ ID NO: 41794 - RNA, 1701 nt, Artificial Sequence
  derived and/or modified CDS sequence (wt) from hemagglutinin__InfluenzaA__AGB13180
augaaggcaauacuaguaguucugcuauauacauuugcaaccgcaaaugcagacacauuauguauagguuaucaugcgaacaauucaacagacaccguagacacaguacuagaaaagaauguaacaguaacacacucuguuaaccuucuagaagacaagcauaacgggaaacuaugcaaacuaagagggguagccccauugcauuuggguaaauguaacauugcuggcuggauccugggaaauccagagugugaaucacucuccacagcaagcucaugguccuacauuguggaaacaucuaguucagacaauggaacguguuacccaggagauuucaucaauuaugaggagcuaagagagcaauugagcucagugucaucauuugaaagguuugagauauuccccaagacaaguucauggcccaaucaugacucgaacaaagguguaacggcagcauguccucaugcuggagcaaaaagcuucuacaaaaauuuaauauggcuaguuaaaaaaggaaauucauacccaaagcucagcaaauccuacauuaaugauaaagggaaagaaguccucgugcuguggggcauucaccauccaucuacuacugcugaccaacaaagucucuaucagaaugcagaugcauauguuuuuguggggacaucaagauacagcaagaaguucaagccggaaauagcaauaagacccaaagugagggaucaagaagggagaaugaacuauuacuggacacuaguagagccgggagacaaaauaacauucgaagcaacuggaaaucuagugguaccgagauaugcauucgcaauggaaagaaaugcuggaucugguauuaucauuucagauacaucaguccacgauugcaauacaacuugucagacacccaagggugcuauaaacaccagccucccauuucagaauauacauccgaucacaauuggaaaauguccaaaauauguaaaaagcacaaaauugagacuggccacaggauugaggaaugucccgucuauucaaucuagaggccuauuuggggccauugccggcuucauugaagggggguggacagggaugguagauggaugguacgguuaucaccaucaaaaugagcaggggucaggauaugcagccgaccugaagagcacacagaaugccauugacaagauuacuaacaaaguaaauucuguuauugaaaagaugaauacacaguucacagcaguagguaaagaguucaaccaccuggaaaaaagaauagagaauuuaaauaaaaaaguugaugaugguuuccuggacauuuggacuuacaaugccgaacuguugguucuauuggaaaaugaaagaacuuuggacuaccacgauucaaaugugaagaacuuguaugaaaagguaagaaaccaguuaaaaaacaaugccaaggaaauuggaaacggcugcuuugaauuuuaccacaaaugcgauaacacgugcauggaaagugucaaaaaugggacuuaugacuacccaaaauacucagaggaagcaaaauuaaacagagaagaaauagaugggguaaagcuggaaucaacaaggauuuaccagauuuuggcgaucuauucaacugucgccaguucauugguacugguagucucccugggggcaaucaguuucuggaugugcucuaaugggucucuacaguguagaauauguauuuaa

SEQ ID NO: 41795 - RNA, 1701 nt, Artificial Sequence; identical to SEQ ID NO: 41783
  derived and/or modified CDS sequence (wt) from hemagglutinin__InfluenzaA__AGB13190

SEQ ID NO: 41796 - RNA, 1701 nt, Artificial Sequence
  derived and/or modified CDS sequence (wt) from hemagglutinin__InfluenzaA__AGB13200
augaaggcaauacuaguaguucugcuauauacauuugcaaccgcaaaugcagacacauuauguauagguuaucaugcgaacaauucaacagacacuguagacacaguacuagaaaagaauguaacaguaacacacucuguuaaccuucuagaagacaagcauaacgggaaacuaugcaaacuaagagggguagccccauugcauuuggguaaauguaacauugcuggcuggauccugggaaauccagagugugaaucacucuccacagcaagcucaugguccuacauuguggaaacaucuaguucagacaauggaacguguuacccaggagauuucaucaauuaugaggagcuaagagagcaauugagcucagugucaucauuugaaagauuugagauauuccccaagacaaguucauggcccaaucaugacucgaacaaagguguaacggcagcauguccucaugcuggaguaaaaagcuucuacaaaaacuuaauauggcuaguuaaaaaaggaaauucauacccaaagcucagcaaauccuacauuaaugauaaagggaaagaaguccucgugcuguggggcauucaccauccaucuacuacuacugaccaacaaagucucuaucagaaugcagaugcauauguuuuuguggggacaucaaaauacagcaagaaguucaagccggaaauagcaauaagacccaaagugagggaucaagaagggagaaugaacuauuacuggacacuaguagagccgggagacaaaauaacauucgaagcaacuggaaaucuagugguaccgagauaugcauucgcaauggaaagaaaugcuggaucugguauuaucauuucagauacaccaguccacgauugcaauacaacuugucagacacccaagggugcuauaaacaccagccucccauuucagaauauacauccgaucacaauuggaaaauguccaaaauauguaaaaagcacaaaauugagacuggccacaggauugaggaaugucccgucuauucaaucuagaggccuauuuggggccauugccggcuucauugaagggggguggacagggaugguagauggaugguacgguuaucaccaucaaaaugagcaggggucaggauaugcagccgaccugaagagcacacagaaugccauugacaagauuacuaacaaaguaaauucuguuauugaaaagaugaauacacaguucacagcaguagguaaagaguucaaccaccuggaaaaaagaauagagaauuuaaauaaaaaaguugaugaugguuuccuggacauuuggacuuacaaugccgaauuguugguucuauuggaaaaugaaagaacuuuggacuaccacgauucaaaugugaagaacuuguaugaaaagguaagaaaccaguuaaaaaacaaugccaaggaaauuggaaacggcugcuuugaauuuuaccacaaaugcgauaacacgugcauggaaagugucaaaaaugggacuuaugacuacccaaaauacucagaggaagcaaaauuaaacagagaagaaauagaugggguaaagcuggaaucaacaaggauuuaccagauuuuggcgaucuauucaacugucgccaguucauugguacugguagucucccugggggcaaucaguuucuggaugugcucuaaugggucucuacaguguagaauauguauuuaa

SEQ ID NO: 41797 - RNA, 1701 nt, Artificial Sequence
  derived and/or modified CDS sequence (wt) from hemagglutinin__InfluenzaA__AGB13210
augaaggcaacacuaguaguucugcuauauacauuugcaaccgcaaaugcagacacauuauguauagguuaucaugcgaacaauucaacagacacuguagacacaguacuagaaaagaauguaacaguaacacacucuguuaaccuuuuagaagacaagcauaacgggaaacuaugcaaacugagagggguagccccauugcauuuggguaaauguaacauugcuggcuggauccugggaaauccagagugugaaucacucuccacagcaagcucaugguccuacauuguggaaacaucuaguucagacaauggaacguguuacccaggagauuucaucaauuaugaagagcuaagagagcaauugagcucagugucaucauuugaaagguuugagauauuccccaagacaaguucauggcccaaucaugacucgaacaaagguguaacggcagcauguccucaugcuggagcaaaaagcuucuacaaaaauuuaauauggcuaguuaaaaaaggaaauucauacccaaagcucagcaaauccuacauuaacgauaaagggaaagaaguccucgugcuauggggcauucaccauccaucuacuagugcugaccaacaaagucucuaucagaaugcagaugcauauguuuuuguggggacaucaaaauacagcaagaaguucaagccggaaauagcaguaagacccaaagugagggaucaagaagggagaaugaacuauuacuggacacuaguagagccgggagacaaaauaacauucgaagcaacuggaaaucuauugguaccgagauaugcauucgcaauggaaagaaaugcuggaucugguauuaucauuucagauacaccaguccacgauugcaauacaacuugucagacacccaagggugcuauaaacaccagccucccauuucagaauauacauccgaucacaauuggaaaauguccaaaauauguaaaaagcacaaaauugagacuggccacaggauugaggaaugucccgucuauucaaucuagaggccuauuuggggccauugccgguuucauugaagggggguggacagggaugguagauggaugguacgguuaucaccaucaaaaugagcaggggucaggauaugcagccgaccugaagagcacacagaaugccauugacaagauuacuaacaaaguaaauucuguuauugaaaagaugaauacacaguucacagcaguagguaaagaguucaaccaccuggaaaaaagaauagagaauuuaaauaaaaaaguugaugaugguuuccuggacauuuggacuuacaaugccgaacuguugguucuauuggaaaaugaaagaacuuuggacuaccacgauucaaaugugaaaaacuuauaugaaaagguaagaagccaguuaaaaaacaaugccaaggaaauuggaaacggcugcuuugaauuuuaccacaaaugcgauaacacgugcauggaaagugucaaaaaugggacuuaugacuacccaaaauacucagaggaagcaaaauuaaacagagaagaaauagaugggguaaagcuggaaucaacaaggauuuaccagauuuuggcgaucuauucaacugucgccaguucauugguacugguagucucccugggggcaaucaguuucuggaugugcucuaaugggucucuacaguguagaauauguauuuaa

SEQ ID NO: 41798 - RNA, 1701 nt, Artificial Sequence
  derived and/or modified CDS sequence (wt) from hemagglutinin__InfluenzaA__AGB13220
augaaggcaauacuaguaguucugcuauauacauuugcaaccgcaaaugcagacacauuauguauagguuaucaugcgaacaauucaacagacacuguagacacaguacuagaaaagaauguaacaguaacacacucuguuaaccuucuagaagacaagcauaacgggaaacuaugcaaacuaagagggguagccccauugcauuuggguaaauguaacauugcuggcuggauccugggaaauccagagugugaaucacucuccacagcaagcucaugguccuacauuguggaaacaucuauuucagacaauggaacguguuacccaggagauuucaucaauuaugaggagcuaagagagcaauugagcucagugucaucauuugaaagguuugagauauuccccaagacaaguucauggcccaaucaugacucgaacaaagguguaacggcagcauguccucaugcuggagcaaaaagcuucuacaaaaauuuaauauggcuaguuaaaaaaggaaauucauacccaaagcucagcaaauccuacauuaaugauaaagggaaagaaguccucgugcuauggggcauucaccauccaucuacuacugcugaccaacaaagucucuaucagaaugcagaugcauauguuuuuguggggacaucaaaauacagcaagaaguucaagccggaaauagcaauaagacccaaagugagggaucaagaagggagaaugaacuauuacuggacacuaguagagccgggagacaaaauaacauucgaagcaacuggaaaucuagugguaccgagauaugcauucgcaauggaaagaaaugcuggaucugguauuaucauuucagauacaccaguccacgauugcaauacaacuugucagacacccaagggugcuauaaacaccagccucccauuucagaauauacauccgaucacaauuggaaaauguccaaaauauguaaaaagcacaaaauugagacuggccacaggauugaggaaugucccgucuauucaaucuagaggccuauuuggggccauugccgguuucauugaagggggguggacagggaugguagauggaugguacgguuaucaccaucaaaaugagcaggggucaggauaugcagccgaccugaagagcacacagaaugccauugacaagauuacuaacaaaguaaauucuguuauugaaaagaugaauacacaguucacagcaguagguaaagaguucaaccacuuggaaaaaagaauagagaauuuaaauaaaaaaguugaugaugguuuccuggacauuuggacuuacaaugccgaacuguugguucuauuggaaaaugaaagaacuuuggacuaccaugauucaaaugugaagaacuuauaugaaaagguaagaaaccaguuaaaaaacaaugccaaggaaauuggaaacggcugcuuugaauuuuaccauaaaugcgauaacacgugcauggaaagugucaaaaaugggacuuaugacuacccaaaauacucagaggaagcaaaauuaaacagagaagaaauagaugggguaaagcuggaaucaacaaggauuuaccagauuuuggcgaucuauucaacugucgccaguucauugguacugguagucucccugggggcaaucaguuucuggaugugcucuaaugggucucuacaguguagaauauguauuuaa

SEQ ID NO: 41799 - RNA, 1701 nt, Artificial Sequence
  derived and/or modified CDS sequence (wt) from hemagglutinin__InfluenzaA__AGB13230
augaaggcaauacuaguaguucugcuauauacauuugcaaccgcaaaugcagacacauuauguauagguuaucaugcgaacaauucaacagacacuguagacacaguacuagaaaagaauguaacaguaacacacucuguuaaccuucuagaagacaaucauaacgggaaacuaugcaaacuaagagggguagccccauugcauuuggguaaauguaacauugcuggcuggauccugggaaauccagagugugaaucacucuccacagcaagcucaugguccuacauuguggaaacaucuaguucagacaauggaacguguuacccaggagauuucaucaauuaugaggagcuaagagagcaauugagcucagugucaucauuugaaagguuugagauauuccccaagacaaguucauggcccaaucaugacucgaacaaagguguaacggcagcauguccucaugcuggagcaaaaagcuucuacaaaaauuuaauauggcuaguuaaaaaaggaaauucauacccaaagcucagcaaauccuacauuaaugauaaagggaaagaaguccucgugcuguggggcauucaccauccaucuacuacugcugaccaacaaagucucuaucagaaugcagaugcauauguuuuuguggggacaucaagauacagcaagaaguucaagccggaaauagcaauaagacccaaagugagggaucaagaagggagaaugaacuauuacuggacacuaguagagccgggagacaaaauaacauucgaagcaacuggaaaucuagugguaccgagauaugcauucgcaauggaaagaaaugcuggaucugguauuaucauuucagauacaccaguccacgauugcaauacaacuugucagacacccaagggugcuauaaacaccagccucccauuucagaauauacauccgaucacaauuggaaaauguccaaaauauguaaaaagcacaaaauugagacuggccacaggauugaggaaugucccgucuauucaaucuagaggccuauuuggggccauugccggcuucauugaagggggguggacagggaugguagauggaugguacgguuaucaccaucaaaaugagcaggggucaggauaugcagccgaccugaagagcacacagaaugccauugacaagauuacuaacaaaguaaauucuguuauugaaaagaugaauacacaguucacagcaguagguaaagaguucaaccgccuggaaaaaagaauagagaauuuaaauaaaaaaguugaugaugguuuccuggacauuuggacuuacaaugccgaacuguugguucuauuggaaaaugaaagaacuuuggacuaccacgauucaaaugugaagaacuuguaugaaaagguaagaaaccaguuaaaaaacaaugccaaggaaauuggaaacggcugcuuugaauuuuaccacaaaugcgauaacacgugcauggaaagugucaaaaaugggacuuaugacuacccaaaauacucagaggaagcaaaauuaaacagagaagaaauagaugggguaaagcuggaaucaacaaggauuuaccagauuuuggcgaucuauucaacugucgccaguucauugguacugguagucucccugggggcaaucaguuucuggaugugcucuaaugggucucuacaguguagaauauguauuuaa

SEQ ID NO: 41800 - RNA, 1701 nt, Artificial Sequence; identical to SEQ ID NO: 41783
  derived and/or modified CDS sequence (wt) from hemagglutinin__InfluenzaA__AGB13240

SEQ ID NO: 41801 - RNA, 1701 nt, Artificial Sequence; identical to SEQ ID NO: 41783
  derived and/or modified CDS sequence (wt) from hemagglutinin__InfluenzaA__AGB13250

SEQ ID NO: 41802 - RNA, 1701 nt, Artificial Sequence
  derived and/or modified CDS sequence (wt) from hemagglutinin__InfluenzaA__AGB13260
augaaggcaauacuaguaguucugcuauauacauuugcaaccgcaaaugcagacacauuauguauagguuaucaugcgaacaauucaacagacacuguagacacaguacuagaaaagaauguaacaguaacacacucuguuaaccuucuagaagacaagcauaacgggaaacuaugcaaacuaagagggguagccccauugcauuuggguaaauguaacauugcuggcuggauccugggaaauccagagugugaaucacucuccacagcaagcucaugguccuacauuguggaaacaucuaguucagacaauggaacguguuacccaggagauuucaucgauuaugaggagcuaagagagcaauugagcucagugucaucauuugaaagguuugagauauuccccaagacaaguucauggcccaaucaugacucgaacaaagguguaacgacagcauguccucaugcuggaucaaaaagcuucuacaaaaauuuaauauggcuaguuaaaaaaggaaauucauacccaaaacucagcaaauccuacauuaaugauaaagggaaagaaguccucgugcuauggggcauucaccauccaccuacuagugcugaccaacaaagucucuaucagaaugcagaugcauauguuuuuguggggacaucaagauacagcaagaaguucaagccggaaauagcaauaagacccaaagugagggaucaagaagggagaaugaacuauuacuggacacuaguagagccgggagacaaaauaacauucgaagcaacuggaaaucuggugguaccgagauaugcauucgcaauggaaagaaaugcuggaucugguauuaucauuucagauacaccaguccacgauugcaauacaacuugucagacacccaagggggcuauaaacaccagccuuccauuucagaauguacauccgaucacaauuggaaaauguccaaaauauguaaaaagcacaaaauugagacuggccacaggauugaggaaugucccgucuauucaaucuagaggccuauuuggggccauugccgguuucauugaagggggguggacagggaugguagauggaugguacgguuaucaccaucaaaaugagcaggggucaggguaugcagccgaccugaagagcacacagaaugccauugacgagauuacuaacaaaguaaauucuguuauugaaaagaugaauacacaguucacagcaguagguaaagaguucaaccaccuggaaaaaagaauagagaauuuaaauaaaaaaguugaugaugguuuccuggacauuuggacuuacaaugccgaacuguugguucuauuggaaaaugaaagaacuuuggacuaccacgauucaaaugugaagaacuuauaugaaaagguaagaagccaguuaaaaaacaaugccaaggaaauuggaaacggcugcuuugaauuuuaccacaaaugugauaacacgugcauggaaaguaucaaaaaugggacuuaugacuacccaaaauacucagaggaagcaaaauuaaacagagaagaaauagaugggguaaagcuggaaucaacaaggauuuaccagauuuuggcgaucuauucaacugucgccaguucauugguacugguagucucccugggggcaaucaguuucuggaugugcucuaaugggucucuacaguguagaauauguauuuaa

SEQ ID NO: 41803 - RNA, 1701 nt, Artificial Sequence
  derived and/or modified CDS sequence (wt) from hemagglutinin__InfluenzaA__AGB13270
augaaggcaauacuaguaguucugcuauauacauuugcaaccgcaaaugcagacacauuauguauagguuaucaugcgaacaauucaacagacacuguagacacaguacuagaaaagaauguaacaguaacacacucuguuaaccuucuagaagacaagcauaacgggaaacuaugcaaacugagagggguagccccauugcauuuggguaaauguaacauugcuggcuggauccugggaaauccagagugugaaucacucuccacagcaagcucaugguccuacauuguggaaacaucuaguucagacaauggaacguguuacccaggagauuucaucaauuaugaagagcuaagagagcaauugagcucagugucaucauuugaaagguuugagauauuccccaagacaaguucauggcccaaucaugacucgaacaaagguguaacggcagcauguccucaugcuggagcaaaaagcuucuacaaaaauuuaauauggcuaguuaaaaaaggaaauucauacccaaagcucagcaaauccuacauuaacgauaaagggaaagaaguccucgugcuauggggcauucaccauccaucuacuagugcugaccaacaaagucucuaucagaaugcagaugcauauguuuuuguggggacaucaaaauacagcaagaaguucaagccggaaauagcaguaagacccaaagugagggaucaagaagggagaaugaacuauuacuggacacuaguagagccgggagacaaaauaacauucgaagcaacuggaaaucuauugguaccgagauaugcauucgcaauggaaagaaaugcuggaucugguauuaucauuucagauacaccaguccacgauugcaauacaacuugucagacacccaagggugcuauaaacaccagccucccauuucagaauauacauccgaucacaauuggaaaauguccaaaauauguaaaaagcacaaaauugagacuggccacaggauugaggaaugucccgucuauucaaucuagaggccuauuuggggccauugccgguuucauugaagggggguggacagggaugguagauggaugguacgguuaucaccaucaaaaugagcaggggucaggauaugcagccgaccugaagagcacacagaaugccauugacaagauuacuaacaaaguaaauucuguuauugaaaagaugaauacacaguucacagcaguagguaaagaguucaaccaccuggaaaaaagaauagagaauuuaaauaaaaaaguugaugaugguuuccuggacauuuggacuuacaaugccgaacuguugguucuauuggaaaaugaaagaacuuuggacuaccacgauucaaaugugaaaaacuuauaugaaaagguaagaagccaguuaaaaaacaaugccaaggaaauuggaaacggcugcuuugaauuuuaccacaaaugcgauaacacgugcauggaaagugucaaaaaugggacuuaugacuacccaaaauacucagaggaagcaaaauuaaacagagaaaaaauagaugggguaaagcuggaaucaacaaggauuuaccagauuuuggcgaucuauucaacugucgccaguucauugguacugguagucucccugggggcaaucaguuucuggaugugcucuaaugggucucuacagugcagaauauguauuuaa

SEQ ID NO: 41804 - RNA, 1701 nt, Artificial Sequence
  derived and/or modified CDS sequence (wt) from hemagglutinin__InfluenzaA__AGB13280
augaaggcaauacuaguaguucugcuauauacauuugcaaccgcaaaugcagacacauuauguauagguuaucaugcgaacaauucaacagacacuguagacacaguacuagaaaagaauguaacaguaacacacucuguuaaccuuuuagaagacaagcauaacgggaaacuaugcaaacugagagggguagccccauugcauuuggguaaauguaacauugcuggcuggauccugggaaauccagagugugaaucacucuccacagcaagcucaugguccuacauuguggaaacaucuaguucagacaauggaacguguuacccaggagauuucaucaauuaugaagagcuaagagagcaauugagcucagugucaucauuugaaagguuugagauauuccccaagacaaguucauggcccaaucaugacucgaacaaagguguaacggcagcauguccucaugcuggagcaaaaagcuucuacaaaaauuuaauauggcuaguuaaaaaaggaaauucauacccaaagcucagcaaauccuacauuaacgauaaagggaaagaaguccucgugcuauggggcauucaccauccaucuacuaaugcugaccaacaaagucucuaucagaaugcagaugcauauguuuuuguggggacaucaaaauacagcaagaaguucaagccggaaauagcaguaagacccaaagugagggaucaagaagggagaaugaacuauuacuggacacuaguagagccgggagacaaaauaacauucgaagcaacuggaaaucuauugguaccgagauaugcauucgcaauggaaagaaaugcuggaucugguauuaucauuucagauacaccaguccacgauugcaauacaacuugucagacacccaagggugcuauaaacaccagccucccauuucagaauauacauccgaucacaauuggaaaauguccaaaauauguaaaaagcacaaaauugagacuggccacaggauugaggaaugucccgucuauucaaucuagaggccuauuuggggccauugccgguuucauugaagggggguggacagggaugguagauggaugguacgguuaucaccaucaaaaugggcaggggucaggauaugcagccgaccugaagagcacacagaaugccauugacaagauuacuaacaaaguaaauucuguuauugaaaagaugaauacacaguucacagcaguagguaaagaguucaaccaccuggaaaaaagaauagagaauuuaaauaaaaaaguugaugaugguuuccuggacauuuggacuuacaaugccgaacuguugguucuauuggaaaaugaaagaacuuuggacuaccacgauucaaaugugaaaaacuuauaugaaaagguaagaagccaguuaaaaaacaaugccaaggaaauuggaaacggcugcuuugaauuuuaccacaaaugcgauaacacgugcauggaaagugucaaaaaugggacuuaugacuacccaaaauacucagaggaagcaaaauuaaacagagaagaaauagaugggguaaagcuggaaucaacaaggauuuaccagauuuuggcgaucuauucaacugucgccaguucauugguacugguagucucccugggggcaaucaguuucuggaugugcucuaaugggucucuacaguguagaauauguauuuaa

SEQ ID NO: 41805 - RNA, 1701 nt, Artificial Sequence
  derived and/or modified CDS sequence (wt) from hemagglutinin__InfluenzaA__AGB13290
augaaggcaauacuaguaguucugcuauauacauuugcaaccgcaaaugcagacacauuauguauagguuaucaugcgaacaauucaacagacacuguagacacaguacuagaaaagaauguaacaguaacacacucuguuaaccuucuagaagucaagcauaacgggaaacuaugcaaacuaagagggguagccccauugcauuuggguaaauguaacauugcuggcuggauccugggaaauccagagugugaaucacucuccacagcaagcucaugguccuacauuguggaaacaucuaguucagacaauggaacguguuacccaggagauuucaucaauuaugaggagcuaagagagcaauugagcucagugucaucauuugaaagguuugagauauuccccaagacaaguucauggcccaaucaugacucgaacaaagguguaacggcagcauguccucaugcuggagcaaaaagcuucuacaaaaauuuaauauggcuaguuaaaaaaggaaauucauacccaaagcucagcaaauccuacauuaaugauaaagggaaagaaguccucgugcuguggggcauucaccauccaucuacuacugcugaccaacaaagucucuaucagaaugcagaugcauauguuuuuguggggacaucaagauacagcaagaaguucaagccggaaauagcaauaagacccaaagugagggaucaagaagggagaaugaacuauuacuggacacuaguagagccgggagacaaaauaacauucgaagcaacuggaaaucuagugguaccgagauaugcauucgcaauggaaagaaaugcuggaucugguauuaucauuucagauacaccaguccacgauugcaauacaacuugucagacacccaagggugcuauaaacaccagccucccauuucagaauauacauccgaucacaauuggaaaauguccaaaauauguaaaaagcacaaaauugagacuggccacaggauugaggaaugucccgucuauucaaucuagaggccuauuuggggccauugccggcuucauugaagggggauggacagggaugguagauggaugguacgguuaucaccaucaaaaugagcaggggucaggauaugcagccgaccugaagagcacacagaaugccauugacaagauuacuaacaaaguaaauucuguuauugagaagaugaauacacaguucacagcaguagguaaagaguucaaccaccuggaaaaaagaauagagaauuuaaauaaaaaaguugaugaugguuuccuggacauuuggacuuacaaugccgaacuguugguucuauuggaaaaugaaagaacuuuggacuaccacgauucaaaugugaagaacuuguaugaaaagguaagaaaccaguuaaaaaacaaugccaaggaaauuggaaacggcugcuuugaauuuuaccacaaaugcgauaacacgugcauggaaagugucaaaaaugggacuuaugacuacccaaaauacucagaggaagcaaaauuaaacagagaagaaauagaugggguaaagcuggaaucaacaaggauuuaccagauuuuggcgaucuauucaacugucgccaguucauugguacugguagucucccugggggcaaucaguuucuggaugugcucuaaugggucucuacaguguagaauauguauuuaa

SEQ ID NO: 41806 - RNA, 1701 nt, Artificial Sequence; identical to SEQ ID NO: 41790
  derived and/or modified CDS sequence (wt) from hemagglutinin__InfluenzaA__AGB13300

SEQ ID NO: 41807 - RNA, 1701 nt, Artificial Sequence
  derived and/or modified CDS sequence (wt) from hemagglutinin__InfluenzaA__AGB13310
augaaggcaauacuaguaguucugcuauauacauuugcaaccgcaaaugcagacacauuauguauagguuaucaugcgaacaauucaacagacacuguagacacaguacuagaaaagaauguaacaguaacacacucuguuaaccuucuagaagacaagcauaacgggaaacuaugcaaacuaagagggguagccccauugcauuuggguaaauguaacauugcuggcuggauccugggaaauccagagugugaaucacucuccacagcaagcucaugguccuacauuguggaaacaucuaguucagacaauggaacguguuacccaggagauuucaucgauuaugaggagcuaagagagcaauugagcucagugucaucauuugaaagguuugagauauuccccaagacaaguucauggcccaaucaugacucgaacaaagguguaacggcagcauguccucaugcuggagcaaaaagcuucuacaaaaauuuaauauggcuaguuaaaaaaggaaauucauacccaaagcucagcaaauccuacauuaaugauaaagggaaagaaguccucgugcuauggggaguucaccauccaucuacuagugcugaccaacaaagucucuaucagaaugcagaugcauauguuuuuguggggacaucaagauacagcaagaaguucaagccggaaauagcaauaagacccaaagugagggaucaagaagggagaaugaacuauuacuggacacuaguagagccgggagacaaaauaacauucgaagcaacuggaaaucuagugguaccgagauaugcauucgcaauggaaagaaaugcuggaucugguauuaucauuucagauacaccaguccacgauugcaauacaacuugucagacacccaagggugcuauaaacaccagccucccauuucagaauauacauccgaucacaauuggaaaauguccaaaauauguaaaaagcacaaaauugagacuggccacaggauugaggaaugucccgucuauucaaucuagaggccuauuuggggccauugccgguuucauugaagggggguggacagggaugguagauggaugguacgguuaucaccaucaaaaugagcaggggucaggauaugcagccgaccugaagagcacacagcaugccauugacgagauuacuaacaaaguaaauucuguuauugaaaagaugaauacacaguucacagcaguagguaaagaguucaaccaccuggaaaaaagaauagagaauuuaaauaaaaaaguugaugaugguuuccuggacauuuggacuuacaaugccgaacuguugguucuauuggaaaaugaaagaacuuuggacuaccacgauucaaaugugaagaacuuauaugaaaagguaagaagccaguuaaaaaacaaugccaaggaaauuggaaacggcugcuuugaauuuuaccacaaaugcgauaacacgugcauggaaagugucaaaaaugggacuuaugacuacccaaaauacucagaggaagcaaaauuaaacagagaagaaauagaugggguaaagcuggaaucaacaaggauuuaccagauuuuggcgaucuauucaacugucgccaguucauugguacugguagucucccugggggcaaucaguuucuggaugugcucuaaugggucucuacaguguagaauauguauuuaa

SEQ ID NO: 41808 - RNA, 1701 nt, Artificial Sequence
  derived and/or modified CDS sequence (wt) from hemagglutinin__InfluenzaA__AGB13320
augaaggcaauacuaguaguucugcuauauacaauugcaaccgcaaaugcagacacauuauguauagguuaucaugcgaacaauucaacagacacuguagacacaguacuagaaaagaauguaacaguaacacacucuguuaaccuucuagaagacaagcauaacgggaaacuaugcaaacuaagagggguagccccauugcauuuggguaaauguaacauugcuggcuggauccugggaaauccagagugugaaucacucuccacagcaagcucaugguccuacauuguggaaacaucuaguucagacaauggaacguguuacccaggagauuucaucaauuaugaggagcuaagagagcaauugagcucagugucaucauuugaaagguuugagauauuccccaagacaaguucauggcccaaucaugacucgaacaaagguguaacggcagcauguccucaugcuggagcaaaaagcuucuacaaaaauuuaauauggcuaguuaaaaaaggaaauucauacccaaagcucagcaaauccuacauuaaugauaaagggaaagaaguccucgugcuguggggcauucaccauccaucuacuacugcugaccaacaaagucucuaucagaaugcagaugcauauguuuuuguggggacaucaagauacagcaagaaguucaagccggaaauagcaauaagacccaaagugagggaucaagaagggagaaugaacuauuacuggacacuaguagagccgggagacaaaauaacauucgaagcaacuggaaaucuagugguaccgagauaugcauucgcaauggaaaaaaaugcuggaucugguauuaucauuucagauacaccaguccacgauugcaauacaacuugucagacacccaagggugcuauaaacaccagccucccauuucagaauauacauccgaucacaauuggaaaauguccaaaauauguaaaaagcacaaaauugagacuggccacaggauugaggaaugucccgucuauucaaucuagaggccuauuuggggccauugccggcuucauugaagggggguggacagggaugguagauggaugguacgguuaucaccaucaaaaugagcaggggucaggauaugcagccgaccugaagagcacacagaaugccauugacaagauuacuaacaaaguaaauucuguuauugaaaagaugaauacacaguucacagcaguagguaaagaguucaaccaccuggaaaaaagaauagagaauuuaaauaaaaaaguugaugaugguuuccuggacauuuggacuuacaaugccgaacuguugguucuauuggaaaaugaaagaacuuuggacuaccacgauucaaaugugaagaacuuguaugaaaagguaagaaaccaguuaaaaaacaaugccaaggaaauuggaaacggcugcuuugaauuuuaccacaaaugcgauaacacgugcauggaaagugucaaaaaugggacuuaugacuacccaaaauacucagaggaagcaaaauuaaacagagaagaaauagaugggguaaagcuggaaucagcaaggguuuaccagauuuuggcgaucuauucaacugucgccaguucauugguacugguagucucccugggggcaaucaguuucuggaugugcucuaaugggucucuacaguguagaauauguauuuaa

SEQ ID NO: 41809 - RNA, 1701 nt, Artificial Sequence
  derived and/or modified CDS sequence (wt) from hemagglutinin__InfluenzaA__AGB13330
augaaggcaauacuaguaguuaugcuauauacauuugcaaccgcaaaugcagacacauuauguauagguuaucaugcgaacaauucaacagacacuguagacacaguacuagaaaagaauguaacaguaacacacucuguuaaucuucuagaagacaagcauaacgggaaacuaugcaaacuaagagggguagccccauugcauuuggguaaauguaacauugcuggcuggauccugggaaauccagagugugaaucacucuccacagcaagcucaugguccuacauuguggaaacaucuaguucagacaauggaacguguuacccaggagauuucaucgauuaugaggagcuaagagagcaauugagcucagugucaucauuugaaagguuugagauauuccccaaaacaaguucauggcccaaucaugacucgaacaaagguguaacggcagcauguccucaugcuggagcaaaaggcuucuacaaaaauuuaauauggcuaguuaaaaaaggaaauucauacccaaagcucagcaaauccuacaguaaugauaaagggaaagaaguccucgugcuauggggcauucaccauccaucuacuacugcugaccaacaaagucucuaucagaaugcagauacauauguuuuuguggggacaucaagauacagcaagaaguucaagccggaaauagcaauaagacccaaagugagggaucaagaagggagaaugaacuauuacuggacacuaguagagccgggagacaaaauaacauucgaagcaacuggaaaucuagugguaccgagauaugcauucgcaauggaaagaaaugcuggaucugguauuaucauuucagauacaccaguccacgauugcaauacaacuugucagacacccaagggugcuauaaacaccagccucccauuucagaauauacauccgaucacaauuggaaaauguccaaaauauguaaaaagcacaaaauugagacuggccacaggauugaggaaugucccgucuauucaaucuagaggccuauuuggggccauugccggcuucauugaagggggguggacagggaugguagauggaugguacgguuaucaccaucaaaaugagcaggggucaggauaugcagccgaccugaagagcacacagaaugccauugacaagauuacuaacaaaguaaauucuguuauugaaaagaugaauacacaguucacagcaguagguaaagaguucaaccaccuggaaaaaagaauagagaauuuaaauaaaaaaguugaugaugguuuccuggacauuuggacuuacaaugccgaacuguugguucuauuggaaaaugaaagaacuuuggacuaccacgauucaaaugugaagaacuuauaugaaaagguaagaaaccaguuaaaaaacaaugccaaggaaauuggaaauggcugcuuugaauuuuaccacaaaugcgauaacacgugcauggaaagugucaaaaaugggacuuaugacuacccaaaauacucagaggaagcaaaauuaaacagagaagaaauagaugggguaaagcuggaaucaacaaggauuuaccagauuuuggcgaucuauucaacugucgccaguucauugguacugguagucucccugggggcaaucaguuuuuggaugugcucuaaugggucucuacaguguagaauauguauuuaa

SEQ ID NO: 41810 - RNA, 1701 nt, Artificial Sequence
  derived and/or modified CDS sequence (wt) from hemagglutinin__InfluenzaA__AGB13340
augaaggcaauacuaguaguucugcuauauacauuugcaaccgcaaaugcagacacauuauguauagguuaucaugcgaacaauucaacagacacuguagacacaguacuagaaaagaauguaacaguaacacacucuguuaaccuucuagaagacaagcauaacgggaaacuaugcaaacuaagagggguagccccauugcauuuggguaaauguaacauugcuggcuggauccugggaaauccagagugugaaucacucuccacagcaagcucaugguccuacauuguggaaacaucuaguucagacaauggaacguguuacccaggagauuucaucaauuaugaggagcuaagagagcaauugagcucagugucaucauuugaaagguuugagauauuccccaagacaaguucauggcccaaucaugacucgaacaaagguguaacggcagcauguccucaugcuggagcaaaaagcuucuacaaaaauuuaauauggcuaguuaaaaaaggaaauucauacccaaagcucagcaaauccuacauuaaugauaaagggaaagaaguccucgugcuguggggcauucaccauccaucuacuacugcugaccaacaaagucucuaucagaaugcagaugcauauguuuuuguggggacaucaagauacagcaagaaguucaagccggaaauagcaauaagacccaaagugagggaucaagaagggagaaugaacuauuacuggacacuaguagagccgggagacaaaauaacauucgaagcaacuggaaaucuagugguaccaagauaugcauucgcaauggaaagaaaugcuggaucugguauuaucauuucagauacaccaguccacgauugcaauacaacuugucagacacccaagggugcuauaaacaccagccucccauuucagaauauacauccgaucacaauuggaaaauguccaaaauauguaaaaagcacaaaauugagacuggccacaggauugaggaaugucccgucuauucaaucuagaggccuguuuggggccauugccggcuucauugaagggggguggacagggaugguagauggaugguacgguuaucaccaucaaaaugagcaggggucaggauaugcagccgaccugaagagcacacagaaugccauugacaagauuacuaacaaaguaaauucuguuauugaaaagaugaauacacaguucacagcaguagguaaagaguucaaccaccuggaaaaaagaauagagaauuuaaauaaaaaaguugaugaugguuuccuggacauuuggacuuacaaugccgaacuguugguucuauuggaaaaugaaagaacuuuggacuaccacgauucaaaugugaagaacuuguaugaaaagguaagaaaccaguuaaaaaacaaugccaaggaaauuggaaacggcugcuuugaauuuuaccacaaaugcgauaacacgugcauggaaagugucaaaaaugggacuuaugacuacccaaaauacucagaggaagcaaaauuaaacagagaagaaauagaugggguaaagcuggaaucaacaaggauuuaccagauuuuggcgaucuauucaacugucgccaguucauugguacugguagucucccugggggcaaucaguuucuggaugugcucuaaugggucucuacaguguagaauauguauuuaa

SEQ ID NO: 41811 - RNA, 1701 nt, Artificial Sequence
  derived and/or modified CDS sequence (wt) from hemagglutinin__InfluenzaA__AGB13350
augaaggcaauacuaguaguucugcuauauacauuugcaaccgcaaaugcagacacauuauguauagguuaucaugcgaacaauucaacagaaacuguagacacaguacuagaaaagaauguaacagugacacacucuguuaaccuucuagaagacaagcauaacgggaaacuaugcaaacugagagggguagccccauugcauuuggguaaauguaacauugcuggcuggauccugggaaauccagagugugaaucacucuccacagcaagcucaugguccuacaucguggaaacaucuaguucagacaauggaacgugcuacccaggagauuucaucaauuaugaggagcuaagagagcaauugagcucagugucaucauuugaaagguuugagauauuccccaagacaaguucauggcccaaucaugacucgaacaaagguguaacggcagcauguccucaagcuggagcaaaaagcuucuacaaaaauuuaauauggcuaguuaaaaaaggaaauucauacccaaagcucagcaaauccuacauuaacgauaaagggaaagaaguccucgugcuauggggcauucaccauccaucuacuagugcugaccaacaaagucucuaucagaaugcagaugcauauguuuuuguggggacaucaaaauacagcaagaaguucaagccggaaauagcaguaagacccaaagugagggaucaagaagggagaaugaacuauuacuggacacuaguagagccgggagacaaaauaacauucgaagcaacuggaaaucuauugguaccgagauaugcauucgcaauggaaagaaaugcuggaucugguauuaucauuucagauacaccaguccacgauugcaauacaacuugucagacacccaagggugcuauaaacaccagccucccauuucagaauauacauccgaucacaauuggaaaaugucccaaauauguaaaaagcacaaaauugagacuggccacaggauugaggaaugucccgucuauucaaucuagaggccuauuuggggccauugccgguuucauugaagggggguggacagggaugguagauggaugguacgguuaucaccaucaaaaugcgcaggggucaggauaugcagccgaccugaagagcacacagaaugccauugacaagauuacuaacaaaguaaauucuguuauugaaaagaugaauacacaguucacagcaguagguaaagaguucaaccaccuggaaaaaagaauagagaauuuaaauaaaaaaguugaugaugguuuccuggacauuuggacuuacaaugccgaacuguugguucuauuggaaaaugaaagaacuuuggacuaccacgauucaaaugugaaaaacuuauaugaaaagguaagaagccaguuaaaaaacaaugccaaggaaauuggaaacggcugcuuugaauuuuaccacaaaugcgauaacacgugcauggaaagugucaaaaaugggacuuaugacuacccaaaauacucagaggaagcaaaauuaaacagagaagaaauagaugggguaaagcuggaaucaacaaggauuuaccagauuuuggcgaucuauucaacugucgccaguucauugguacugguagucucccugggggcaaucaguuucuggaugugcucuaaugggucucuacaguguagaauauguauuuaa

SEQ ID NO: 41812 - RNA, 1701 nt, Artificial Sequence
  derived and/or modified CDS sequence (wt) from hemagglutinin__InfluenzaA__AGB13360
augaaggcaauacuaguaguucugcuauauacauuugcaaccgcaaaugcagacacauuauguauagguuaucaugcgaacaauucaacagacacuguagacacaguacuagaaaagaauguaacaguaacacacucuguuaaccuucuagaagacaagcauaacgggaaacuaugcaaacugagagggguagccccauugcauuuggguaaauguaacauugcuggcuggauccugggaaauccagagugugaaucacucuccacagcaagcucaugguccuacauuguggaaacaucuaguucagacaauggaacguguuacccaggagauuucaucaauuaugaagagcuaagagagcaauugagcucagugucaucauuugaaagguuugagauauuccccaagacaaguucauggcccaaucaugacucgaacaaagguguaacggcagcauguccucaugcuggagcaaaaagcuucuacaaaaauuuaauauggcuaguuaaaaaaggaaauucauacccaaagcucagcaaauccuacauuaacgauaaagggaaagaaguccucgugcuauggggcauucaccauccaucuacuagugcugaccaacaaagucucuaucagaaugcagaugcauauguuuuuguggggacaucaaaauacagcaagaaguucaagccggaaauagcaguaagaccuaaagugagggaucaagaagggagaaugaacuauuacuggacacuaguagagccgggagacaaaauaacauucgaagcaacuggaaaucuauugguaccgagauaugcauucgcaauggaaagaaaugcuggaucugguauuaucauuucagauacaccaguccacgauugcaauacaacuugucagacacccaagggugcuauaaacaccagccucccauuucagaauauacauccgaucacaauuggaaaauguccaaaauauguaaaaagcacaaaauugagacuggccacgggauugaggaaugucccgucuauucaaucuagaggccuauuuggggccauugccgguuucauugaagggggguggacagggaugguagauggaugguacgguuaucaccaucaaaaugagcaggggucaggauaugcagccgaccugaagagcacacagaaugccauugacaagauuacuaacaaaguaaauucuguuauugaaaagaugaauacacaguucacagcaguagguaaagaguucaaccaccuggaaaaaagaauagagaauuuaaauaaaaaaguugaugaugguuuccuggacauuuggacuuacaaugccgaaauguugguucuauuggaaaaugaaaaaacuuuggacuaccacgauucaaaugugaaaaacuuauaugaaaagguaagaagccaguuaaaaaacaaugccaaggaaauuggaaacggcugcuuugaauuuuaccacaaaugcgauaacacgugcauggaaagugucaaaaaugggacuuaugacuacccaaaauacucagaggaagcaaaauuaaacagagaagaaauagaugggguaaagcuggaaucaacaaggauuuaccagauuuuggcgaucuauucaacugucgccaguucauugguacugguagucucccugggggcaaucaguuucuggaugugcucuaaugggucucuacaguguagaauauguauuuaa

SEQ ID NO: 41813 - RNA, 1701 nt, Artificial Sequence
  derived and/or modified CDS sequence (wt) from hemagglutinin__InfluenzaA__AGB13380
augaaggcaauacuaguaguucugcuauacacauuugcaaccgcaaaagcagacacauuauguauagguuaucaugcgaacaauucaacagacacuguagacacaguacuagaaaagaauguaacaguaacacacucuguuaaccuucuagaagacaagcauaacgggaaacuaugcaagcuaagagggguagccccauugcauuuggguaaauguaacauugcuggcuggaucuugggaaauccagagugugaaucacucuccacagcaagcucaugguccuacauuguggaaacaucuaguucagacaauggaacguguuacccaggagauuucaucaauuaugaggagcuaagagagcaauugagcucagugucaucauuugaaagguuugagauauuccccaagacaaguucauggcccaaucaugacucgaacaaagguguaacggcagcauguccucaugcuggagcaaaaagcuucuacaaaaauuuaauauggcuaguuaaaaaaggaaauucauacccaaagcucagcaaauccuacauuaaugauaaagggaaagaaguccucgugcuguggggcauucaccauccaucuacuacugcugaccaacaaagucucuaucagaaugcagaugcauauguuuuuguggggacaucaagauacagcaagaaguucaagccggaaauagcaauaagacccaaagugagggaucaagaagggagaaugaacuauuacuggacacuaguagagccgggagacaaaauaacauucgaagcaacuggaaaucuagugguaccgagauaugcauucgcaauggaaagaaauccuggaucugguauuaucauuucagauacaccaguccacgauugcaauacaacuugucagacacccaagggugccauaaacaccagccucccauuucagaauauacauccgaucacaauuggaaaauguccaaaauauguaaaaagcacaaaauugagacuggccacaggauugaggaaugucccgucuauucaaucuagaggccuauuuggggccauugccggcuucauugaagggggguggacagggaugguagauggaugguacgguuaucaccaucaaaaugagcaggggucaggauaugcagccgaccugaagagcacacagaaugccauugacaagauuacuaacaaaguaaauucuguuauugaaaagaugaauacacaguucacagcaguagguaaagaguucaaccaccuggaaaaaagaauagagaauuuaaauaaaaaaguugaugaugguuuccuggacauuuggacuuacaaugccgaacuguugguucuauuggaaaaugaaagaacuuuggacuaccacgauucaaaugugaagaacuuguaugaaaagguaagaaaccaguuaaaaaacaaugccaaggaaauuggaaacggcugcuuugaauuuuaccacaaaugcgauaacacgugcauggaaagugucaaaaaugggacuuaugacuacccaaaauacucagaggaagcaaaauuaaacagagaagaaauagaugggguaaagcuggaaucaacaaggauuuaccagauuuuggcgaucuauucaacugucgccaguucauugguacugguagucucccugggggcaaucaguuucuggaugugcucuaaugggucucuacaguguagaauauguauuuaa

SEQ ID NO: 41814 - RNA, 1701 nt, Artificial Sequence; identical to SEQ ID NO: 38450
  derived and/or modified CDS sequence (wt) from hemagglutinin__InfluenzaA__AGB13390

SEQ ID NO: 41815 - RNA, 1701 nt, Artificial Sequence; identical to SEQ ID NO: 39054
  derived and/or modified CDS sequence (wt) from hemagglutinin__InfluenzaA__AGB13400

SEQ ID NO: 41816 - RNA, 1701 nt, Artificial Sequence; identical to SEQ ID NO: 38450
  derived and/or modified CDS sequence (wt) from hemagglutinin__InfluenzaA__AGB13410

SEQ ID NO: 41817 - RNA, 1701 nt, Artificial Sequence
  derived and/or modified CDS sequence (wt) from hemagglutinin__InfluenzaA__AGB13420
augaaggcaauacuaguaguucugcuauauacauuugcaaccgcaaaugcagacacauuauguauagguuaucaugcgaacaauucaacagacacuguagacacaguacuagaaaagaauguaacaguaacacacucuguuaaucuucuagaagacaagcauaacgggaaacuaugcaaacuaagagggguagccccauugcauuuggguaaauguaacauugcuggcuggauccugggaaauccagagugugaaucacucuccacagcaagcucaugguccuacauuguggaaacaucuaguucagacaauggaacguguuacccaggagauuucaucgauuaugaggagcuaagagagcaauugagcucagugucaucauuugaaagguuugagauauuccccaagacaaguucauggcccaaucaugacucgaacaaagguguaacggcagcauguccucaugcuggagcaaaaggcuucuacaaaaauuuaauauggcuaguuaaaaaaggaaauucauacccaaagcucagcaaauccuacauuaaugauaaagggaaagaaguccucgugcuauggggcauucaccauccaucuacuacugcugaccaacaaagucucuaucagaaugcagauacauauguuuuuguggggacaucaagauacagcaagaaguucaagccggaaauagcaauaagacccaaagugagggaucaagaagggagaaugaacuauuacuggacacuaguagagccgggagacaaaauaacauucgaagcaacuggaaaucuagugguaccgagauaugcauucgcaauggaaagaaaugcuggaucugguauuaucauuucagauacaccaguccacgauugcaauacaacuugucagacacccaagggugcuauaaacaccagccucccauuucagaauauacauccgaucacaauuggaaaauguccaaaauauguaaaaagcacaaaauugagacuggccacaggauugaggaaugucccgucuauucaaucuagaggccuauuuggggccauugccggcuucauugaagggggguggacagggaugguagauggaugguacgguuaucaccaucaaaaugagcaggggucaggauaugcagccgaccugaagagcacacagaaugccauugacaagauuacuaacaaaguaaauucuguuauugaaaagaugaauacacaguucacagcaguagguaaagaguucaaccaccuggaaaaaagaauagagaauuuaaauaaaaaaguugaugaugguuuccuggacauuuggacuuacaaugccgaacuguugguucuauuggaaaaugaaagaacuuuggacuaccacgauucgaaugugaagaacuuauaugaaaagguaagaaaccaguuaaaaaacaaugccaaggaaauuggaaauggcugcuuugaauuuuaccacaaaugcgauaacacgugcauggaaagugucaaaaaugggacuuaugacuacccaaaauacucagaggaagcaaaauuaaacagagaagaaauagaugggguaaagcuggaaucaacaaggauuuaccagauuuuggcgaucuauucaacugucgccaguucauugguacugguagucucccugggggcaaucaguuuuuggaugugcucuaaugggucucuacaguguagaauauguauuuaa

SEQ ID NO: 41818 - RNA, 1701 nt, Artificial Sequence
  derived and/or modified CDS sequence (wt) from hemagglutinin__InfluenzaA__AGB13430
augaaggcaauacuaguaguucugcuauauacauuugcaaccgcaaaugcagacacauuauguauagguuaucaugcgaacaauucaacagacacuguagacacaguacuagaaaagaauguaacaguaacacacucuguuaaccuucuagaagacaagcauaacgggaaacuaugcaaacuaagagggguagccccauugcauuuggguaaauguaacauugcuggcuggauccugggaaauccagagugugaaucacucuccacagcaagcucaugguccuacauuguggaaacaucuaguucagacaauggaacguguuacccaggagauuucaucgauuaugaggagcuaagagagcaauugagcucagugucaucauuugaaagguuugagauguuccccaagacaaguucauggcccaaucaugacucgaacaaagguguaacgacagcauguccucaugcuggagcaaaaagcuucuacaaaaauuuaauauggcuaguuaaaaaaggaaauucauacccaaagcucagcaaauccuacauuaaugauaaagggaaagaaguccucgugcuauggggcauucaccauccaccuacuagugcugaccaacaaagucucuaucagaaugcagaugcauauguuuuuguggggacaucaagauacagcaagaaguucaagccggaaauagcaauaagacccaaagugagggaucaagaagggagaaugaacuauuacuggacacuaguagagccgggagacaaaauaacauucgaagcaacuggaaaucuagugguaccgagauaugcauucgcaauggaaagaaaugcuggaucugguauuaucauuucagauacaccaguccacgauugcaauacaacuugucagacacccaagggugcuauaaacaccagccucccauuucagaauauacauccgaucacaauuggaaaauguccaaaauauguaaaaagcacaaaauugagacuggccacaggauugaggaaugucccgucuauucaaucuagaggccuauuuggggccauugccgguuucauugaagggggguggacagggaugguagauggaugguacgguuaucaccaucaaaaugagcaggggucaggauaugcagccgaccugaagagcacacagaaugccauugacgggauuacuaacaaaguaaauucuguuauugaaaagaugaauacacaguucacagcaguagguaaagaguucaaccaccuggaaaaaagaauagagaauuuaaauaaaaaaguugaugaugguuuccuggacauuuggacuuacaaugccgaacuguugguucuauuggaaaaugaaagaacuuuggacuaccacgauucaaaugugaagaacuuauaugaaaagguaagaagccaguuaaaaaacaaugccaaggaaauuggaaacggcugcuuugaauuuuaccacaaaugugauaacacgugcauggaaagugucaaaaaugggacuuaugacuacccaaaauacucagaggaagcaaaauuaaacagagaagaaauagaugggguaaagcuggaaucaacaaugauuuaccagauuuuggcgaucuauucaacugucgccaguucauugguacugguagucucccugggggcaaucaguuucuggaugugcucuaaugggucucuacaauguagaauauguauuuaa

SEQ ID NO: 41819 - RNA, 1701 nt, Artificial Sequence
  derived and/or modified CDS sequence (wt) from hemagglutinin__InfluenzaA__AGB13440
augaaggcaauacuaguaguucugcuauauacauuugcaacugcaaaugcagacacauuauguauagguuaucaugcgaacaauucaacagacacuguagacacaguacuagaaaagaauguaacaguaacacacucuguuaaccuucuagaagacaagcauaacgggaaacuaugcaaacuaagagggguagccccauugcauuuggguaaauguaacauugcuggcuggauccugggaaauccagagugugaaucacucuccacagcaagcucaugguccuacauuguggaaacaucuaguucagacaauggaacguguuacccaggagauuucaucgauuaugaggagcuaagagagcaauugagcucagugucaucauuugaaagguuugagauauuccccaagacaaguucauggcccaaucaugacucgaacaaagguguaacgacagcauguccucaugcuggagcaaaaagcuucuacaaaaauuuaauauggcuaguuaaaaaaggaaauucauacccaaagcucagcaaauccuacauuaaugauaaagggaaagaaguccucgugcuauggggcauucaccauccaccuacuagugcugaccaacaaagucucuaucagaaugcagaugcauauguuuuuguggggacaucaagauacagcaagaaguucaagccggaaauagcaauaagacccaaagugagggaucaagaagggagaaugaacuauuacuggacacuaguagagccgggagacaaaauaacauucgaagcaacuggaaaucuagugguaccgagauaugcauucgcaauggaaagaaaugcuggaucugguauuaucauuucagauacaccaguccacgauugcaauacaacuugucagacacccaagggugcuauaaacaccagccucccauuucagaauauacauccgaucacaauuggaaaauguccaaaauauguaaaaagcacaaaauugagacuggccacaggauugaggaaugucccgucuauucaaucuagaggccuauuuggggccauugccgguuucauugaagggggguggacagggaugguagauggaugguacgguuaucaccaucaaaaugagcaggggucaggauaugcagccgaccugaagagcacacagaaugccauugacgggauuacuaacaaaguaaauucuguuauugaaaagaugaauacacaguucacagcaguagguaaagaguucaaccaccuggaaaaaagaauagagaauuuaaauaaaaagguugaugaugguuuccuggacauuuggacuuacaaugccgaacuguugguucuauuggaaaaugaaagaacuuuggacuaccacgauucaaaugugaagaacuuauaugaaaagguaagaagccaguuaaaaaacaaugccaaggaaauuggaaacggcugcuuugaauuuuaccacaaaugugauaacacgugcauggaaagugucaaaaaugggacuuaugacuacccaaaauacucagaggaagcaaaauuaaacagagaagaaauagaugggguaaagcuggaaucaacaaugauuuaccagauuuuggcgaucuauucaacugucgccaguucguugguacugguagucucccugggggcaaucaguuucuggaugugcucuaaugggucucuacaguguagaauauguauuuaa

SEQ ID NO: 41820 - RNA, 1701 nt, Artificial Sequence; identical to SEQ ID NO: 39039
  derived and/or modified CDS sequence (wt) from hemagglutinin__InfluenzaA__AGB13450

SEQ ID NO: 41821 - RNA, 1701 nt, Artificial Sequence
  derived and/or modified CDS sequence (wt) from hemagglutinin__InfluenzaA__AGB13460
augaaggcaauacuaguaguucugcuauauacauuugcaaccgcaaaugcagacacauuauguauagguuaucaugcgaacaauucaacagacacuguagacacaguacuagaaaagaauguaacaguaacacacucuguuaaucuucuagaagacaagcauaacgggaaacuaugcaaacuaagagggguagccccauugcauuuggguaaauguaacauugcuggcuggauccugggaaauccagagugugaaucacucuccacagcaagcucaugguccuacauuguggaaacaucuaguucagacaauggaacguguuacccaggagauuucaucgauuaugaggagcuaagagagcaauugagcucagugucaucauuugaaagguuugagauauuccccaagacaaguucauggcccaaucaugacucgaacaaagguguaacggcagcauguccucaugcuggagcaaaaagcuucuacaaaaauuuaauauggcuaguuaaaaaaggaaauucauacccaaagcucagcaaauccuacauuaaugauaaagggaaagaaguccucgugcuauggggcauucaccauccaucuacuacugcugaccaacaaagucucuaucagaaugcagauacauauguuuuuguggggacaucaagauacagcaagaaauucaagccggaaauagcaauaagacccaaagugagggaucaagaagggagaaugaacuauuacuggacacuaguagagccgggagacaaaauaacauucgaagcaacuggaaaucuagugguaccgagauaugcauucgcaauggaaagaaaugcuggaucugguauuaucauuucagauacaccaguccacgauugcaauacaacuugucagacacccaagggugcuauaaacaccagccucccauuucagaauauacauccgaucacaauuggaaaauguccaaaauauguaaaaagcacaaaauugagacuggccacaggauugaggaaugucccgucuauucaaucuagaggccuauuuggggccauugccggcuucauugaagggggguggacagggaugguagauggaugguacgguuaucaccaucaaaaugagcaggggucaggauaugcagccgaccugaagagcacacagaaugccauugacaagauuacuaacaaaguaaauucuguuauugaaaagaugaauacacaguucacagcaguagguaaagaguucaaccaccuggaaaaaagaauagagaauuuaaauaaaaaaguugaugaugguuuccuggacauuuggacuuacaaugccgaacuguugguucuauuggaaaaugaaagaacuuuggacuaccacgauucaaaugugaagaacuuauaugaaaagguaagaaaccaguuaaaaaacaaugccaaggaaauuggaaauggcugcuuugaauuuuaccacaaaugcgauaacacgugcauggaaagugucaaaaaugggacuuaugacuacccaaaauacucagaggaagcaaaauuaaacagagaagaaauagaugggguaaagcuggaaucaacaaggauuuaccagauuuuggcgaucuauucaacugucgccaguucauugguacugguagucucccugggggcaaucaguuuuuggaugugcucuaaugggucucuacaguguagaauauguauuuaa

SEQ ID NO: 41822 - RNA, 1701 nt, Artificial Sequence; identical to SEQ ID NO: 41783
  derived and/or modified CDS sequence (wt) from hemagglutinin__InfluenzaA__AGB13470

SEQ ID NO: 41823 - RNA, 1701 nt, Artificial Sequence
  derived and/or modified CDS sequence (wt) from hemagglutinin__InfluenzaA__AGB13480
augaaggcaauacuaguaguucugcuauauacauuugcaaccgcaaaugcagacacauuauguauagguuaucaugcgaacaauucaacagacacuguagacacaguacuagaaaagaauguaacaguaacacacucuguuaaucuucuagaagacaagcauaacgggaaacuaugcaaacuaagagggguagccccauugcauuuggguaaauguaacauugcuggcuggauccugggaaauccagagugugaaucacucuccacagcaagcucaugguccuacauuguggaaacaucuaguucagacaauggaacguguuacccaggagauuucaucgauuaugaggagcuaagagagcaauugagcucagugucaucauuugaaagguuugagauauuccccaaaacaaguucauggcccaaucaugacucgaacaaagguguaacggcagcauguccucaugcuggagcaaaaggcuucuacaaaaauuuaauauggcuaguuaaaaaaggaaauucauacccaaagcucagcaaauccuacauuaaugauaaagggaaagaaguccucgugcuauggggcauucaccauccaucuacuacugcugaccaacaaagucucuaucagaaugcagauacauauguuuuuguggggacaucaagauacagcaagaaguucaagccggaaauagcaauaagacccaaagugagggaucaagaagggagaaugaacuauuacuggacacuaguagagccgggagacaaaauaacauucgaagcaacuggaaaucuagugguaccgagauaugcauucgcaauggaaagaaaugcuggaucugguauuaucauuucagauacaccaguccacgauugcaauacaacuugucagacacccaagggugcuauaaacaccagccucccauuucagaauauacauccgaucacaauuggaaaauguccaaaauauguaaaaagcacaaaauugagacuggccacaggauugaggaaugucccgucuauucaaucuagaggccuauuuggggccauugccggcuucauugaagggggguggacagggaugguagauggaugguacgguuaucaccaucaaaaugagcaggggucaggauaugcagccgaccugaagagcacacagaaugccauugacaagauuaccaacaaaguaaauucuguuauugaaaagaugaauacacaguucacagcaguagguaaagaguucaaccaccuggaaaaaagaauagagaauuuaaauaaaaaaguugaugaugguuuccuggacauuuggacuuacaaugccgaacuguugguucuauuggaaaaugaaagaacuuuggacuaccacgauucaaaugugaagaacuuauaugaaaagguaagaaaccaguuaaaaaacaaugccaaggaaauuggaaauggcugcuuugaauuuuaccacaaaugcgauaacacgugcauggaaagugucaaaaaugggacuuaugacuacccaaaauacucagaggaagcaaaauuaaacagagaagaaauagaugggguaaagcuggaaucaacaaggauuuaccagauuuuggcgaucuauucaacugucgccaguucauugguacugguagucucccugggggcaaucaguuuuuggaugugcucuaaugggucucuacaguguagaauauguauuuaa

SEQ ID NO: 41824 - RNA, 1701 nt, Artificial Sequence
  derived and/or modified CDS sequence (wt) from hemagglutinin__InfluenzaA__AGB13490
augaaggcaauacuaguaguucugcuauauacauuugcaaccgcaaaugcagacacauuauguauagguuaucaugcgaacaauucaacagacacuguagacacaguacuagaaaagaauguaacaguaacacacucuguuaaccuucuagaagacaagcauaacgggaaacuaugcaaacuaagagggguagccccauugcauuuggguaaauguaacauugcuggcuggauccugggaaauccagagugugaaucacucuccacagcaagcucaugguccuacauuguggaaacaucuaguucagacaauggaacguguuacccaggagauuucaucaauuaugaggagcuaagagagcaauugagcucagugucaucauuugaaagguuugagauauuccccaagacaaguucauggcccaaucaugacucgaacaaagguguaacggcagcauguccucaugcuggagcaaaaaguuucuacaaaaauuuaauauggcuaguuaaaaaaggaaauucauacccaaagcucagcaaauccuacauuaaugauaaagggaaagaaguccucgugcuguggggcauucaccauccaucuacuacugcugaccaacaaagucucuaucagaaugcagaugcauauguuuuuguggggacaucaagauacagcaagaaguucaagccggaaauagcaauaagacccaaagugagggaucaagaagggagaaugaacuauuacuggacacuaguagagccgggagacaaaauaacauucgaagcaacuggaaaucuagugguaccgagauaugcauucgcaauggaaagaaaugcuggaucugguauuaucauuucagauacaccaguccacgauugcaauacaacuugucagacacccaagggugcuauaaacaccagccucccauuucagaauauacauccgaucacaauuggaaaauguccaaaauauguaaaaagcacaaaauugagacuggccacaggauugaggaaugucccgucuauucaaucuagaggccuauuuggggccauugccggcuucauugaagggggguggacagggaugguagauggaugguacgguuaucaccaucaaaaugagcaggggucaggauaugcagccgaccugaagagcacacagaaugccauugacaagauuacuaacaaaguaaauucuguuauugaaaagaugaauacacaguucacagcaguagguaaagaguucaaccaccuggaaaaaagaauagagaauuuaaauaaaaaaguugaugaugguuuccuggacauuuggacuuacaaugccgaacuguugguucuauuggaaaaugaaagaacuuuggauuaccacgauucaaaugugaagaacuuguaugaaaagguaagaaaccaguuaaaaaacaaugccaaggaaauuggaaacggcugcuuugaauuuuaccacaaaugcgauaacacgugcauggaaagugucaaaaaugggacuuaugacuacccaaaauacucagaggaagcaaaauuaaacagagaagaaauagaugggguaaagcuggaaucaacaaggauuuaccagauuuuggcgaucuauucaacugucgccaguucauugguacugguagucucccugggggcaaucaguuucuggaugugcucuaaugggucucuacaguguagaauauguauuuaa

SEQ ID NO: 41825 - RNA, 1701 nt, Artificial Sequence
  derived and/or modified CDS sequence (wt) from hemagglutinin__InfluenzaA__AGB13500
augaaggcaauacuaguaguucugcuauauacauuugcaaccgcaaaugcagacacauuauguauagguuaucaugcgaacaauucaacagacacuguagacacaguacuagaaaagaauguaacaguaacacacucuguuaaccuucuagaagacaagcauaacgggaaauuaugcaaacuaagagggguagccccauugcauuuggguaaauguaacauugcuggcuggauccugggaaauccagagugugaaucacucuccacagcaagcucaugguccuacauuguggaaacaucuaguucagacaauggaacguguuacccaggaaauuucaucgauuaugaggagcuaagagaacaauugagcucagugucaucauuugaaagguuugagauauuccccaagacaaguucauggcccgaucaugacucgaacaaagguguaacggcagcauguccucaugcuggagcaaaaggcuucuacaaaaauuuaauauggcuaguuaaaaaaggaaauucauacccaaagcucagcaaauccuacauuaaugauaaagggaaagaaguccucgugcuauggggcauucaccauccaucuacuagugcugaccaacaaagucucuaucagaaugcagaugcauauguuuuuguggggacaucaagauacagcaagaaguucaagccggaaauagcaauaagacccaaagugagggaucaagaagggagaaugaacuauuacuggacacuaguagagccgggagacaaaauaacauucgaagcaacuggaaaucuaguggcaccgagauaugcauucgcaauggaaagaaaugcuggaucugguauuaucauuucagauacaccaguccacgauugcaauacaacuugucagacacccaagggugcuauaaacaccagccucccauuucagaauauacauccgaucacaauuggaaaauguccaaaauauguaaaaagcacaaaauugagacuggccacaggauugaggaaugucccgucuauucaaucuagaggccuauuuggggccauugccgguuucauugaagggggguggacagggaugguagauggaugguacgguuaucaccaucaaaaugagcaggggucuggauaugcagccgaccugaagagcacacagaaugccauugacaagauuacuaacaaaguaaauucuguuauugaaaagaugaauacacaguucacagcaguagguaaagaguucaaccaccuggaaaaaagaauagagaauuuaaauaaaaaaguugaugaugguuuccuggacauuuggacuuacaaugccgaacuguugguucuauuggaaaaugaaagaacuuuggacuaccacgauucaaaugugaagaacuuauaugaaaagguaagaagccaguuaaaaaacaaugccaaggaaauuggaaacggaugcuuugaauuuuaccacaaaugcgauaacacgugcauggaaagugucaaaaaugggacuuaugacuacccaaaauacucagaggaagcaaaauuaaacagagaagaaauagaugggguaaagcuggaaucaacaaggauuuaccagauuuuggcgaucuauucaacugucgccaguucauugguacugguagucucccugggggcaaucaguuucuggaugugcucuaaugggucucuacaguguagaauauguauuuaa

SEQ ID NO: 41826 - RNA, 1701 nt, Artificial Sequence; identical to SEQ ID NO: 39084
  derived and/or modified CDS sequence (wt) from hemagglutinin__InfluenzaA__AGB13520

SEQ ID NO: 41827 - RNA, 1701 nt, Artificial Sequence
  derived and/or modified CDS sequence (wt) from hemagglutinin__InfluenzaA__AGB13530
augaaggcaauacuaguaguucugcuauauacauuugcaaccgcaaaugcagacacauuauguauagguuaucaugcgaacaauucaacagacacuguagacacaguacuagaaaagaauguaacaguaacacacucuguuaaccuucuagaagacaagcauaacgggaaacuaugcaaacuaagagggguagccccauugcauuuggguaaauguaacauugcuggcuggauccugggaaauccagagugugaaucacucuccacagcaagcucaugguccuacauuguggaaacaucuaguucagacaauggaacguguuacccaggagauuucaucgauuaugaggagcuaagagagcaauugagcucagugucaucauuugaaagguuugagauauuccccaagacaaguucauggcccaaucaugacucgaacaaagguguaacggcagcauguccucaugcuggagcaaaaagcuucuacaaaaauuuaauauggcuaguuaaaaaaggaaauucauacccaaagcucaacaaauccuacauuaaugauaaagggaaagaaguccucgugcuauggggcauucaccauccaucuacuacugcugaccaacaaagucucuaucagaaugcagaugcauauguuuuuguggggacaucaagauacagcaagaaguucaagccggaaauagcaauaagacccaaagugagggaucaagaagggagaaugaacuauuacuggacacuaguagagccuggagacaaaauaacauucgaagcaacuggaaaucuagugguaccgagauaugcauucgcaauggaaagaaaugcuggaucugguauuaucauuucagauacaccaguccacgauugcaauacaacuugucagacacccaagggugcuauaaacaccagccucccauuucagaauauacauccgaucacaauuggaaaauguccaaaauauguaaaaagcacaaaauugagacuggccacaggauugaggaaugucccaucuauucaaucuagaggccuauuuggggccauugccggcuucauugaagggggguggacagggaugguagauggaugguacgguuaucaccaucaaaaugagcaggggucaggauaugcagccgaccugaagagcacacagaaugccauugacaagauuacuaacaaaguaaauucuguuauugaaaagaugaacacacaguucacagcaguagguaaagaguucaaccaccuggaaaaaagaauagagaauuuaaauaaaaaaguugaugaugguuuccuggacauuuggacuuacaaugccgaacuguugguucuauuggaaaaugaaagaacuuuggacuaccacgauucaaaugugaagaacuuauaugaaaagguaagaaaccaguuaaaaaacaaugccaaggaaauuggaaacggcugcuuugaauuuuaccacaaaugcgauaacacgugcauggaaagugucaaaaaugggacuuaugacuacccaaaauacucagaggaagcaaaauuaaacagagaagaaauaaaugggguaaagcuggaaucaacaaggauuuaccagauuuuggcgaucuauucaacugucgccaguucauugguacugguagucucccugggggcaaucaguuucuggaugugcucuaaugggucucuacaguguagaauauguauuuaa

SEQ ID NO: 41828 - RNA, 1701 nt, Artificial Sequence
  derived and/or modified CDS sequence (wt) from hemagglutinin__InfluenzaA__AGB13540
augaaggcaauacuaguaguucugcuauauacauuugcaaccgcaaaugcagacacauuauguauagguuaucaugcgaacaauucaacagacacuguagacacaguacuagaaaagaauguaacaguaacacacucuguuaaccuucuagaagacaagcauaacgggaaacuaugcaaacuaagagggguagccccauugcauuuggguaaauguagcauugcuggcuggauccugggaaauccagaaugugaaucacucuccacagcaagcucaugguccuacauuguggaaacaucuaguucagacaauggaacguguuacccaggagauuucaucaauuaugaggagcuaagagagcaauugagcucagugucaucauuugaaagguuugagauauuccccaagacaaguucauggcccaaucaugacucaaacaaagguguaacggcagcauguccucaugcuggagcaaaaagcuucuacaaaaauuuaauauggcuaguuaagaaaggaaauucauacccaaagcucagcaaauccuacauuaaugauaaaggaaaagaaguccucgugcuauggggcauucaccauccaucuacuacugcugaccaacaaagucucuaucagaaugcagaugcauauguuuuuguggggacaucaagauacagcaagaaguucaagccggaaauagcaauaagacccaaagugagggaucaagaagggagaaugaacuauuacuggacacuaguagagccgggagacaaaauaacauucgaagcaacuggaaaucuagugguaccgagauaugcauucgcaauggaaagaaaugcuggaucugguauuaucauuucagauacaccaguccacgauugcaauacaacuugucagacacccaagggugcuauaaacaccagccucccauuucagaauauacauccgaucacaauuggaaaauguccaaaauauguaaaaagcacaaaauugagacuggccacaggauugaggaaugucccgucuauucaaucuagaggccuauuuggggccauugccggcuucauugaagggggguggacagggaugguagauggaugguacgguuaucaccaucaaaaugagcaggggucaggauaugcagccgaccugaagagcacacagaaugccauugacaagauuacuaacaaaguaaauucuguuauugaaaagaugaauacacaguucacagcaguagguaaagaguucaaccaccuggaaaaaagaauagagaauuuaaauaaaaaaguugaugaugguuuccuggacauuuggacuuacaaugccgaacuguugguucuauuggaaaaugaaagaacuuuggacuaccacgauucaaaugugaagaacuuauaugaaaagguaagaaaccaguuaaaaaacaaugccaaggaaauuggaaacggcugcuuugaauuuuaccacaaaugcgauaacacgugcauggaaagugucaaaaaugggacuuaugacuacccaaaauacucagaggaagcaaaauuaaacagagaagaaauagaugggguaaagcuggaaucaacaaggauuuaccagauuuuggcgaucuauucaacugucgccaguucauugguacugguagucucccugggggcaaucagcuucuggaugugcucuaaugggucucuacaguguagaauauguauuuaa

SEQ ID NO: 41829 - RNA, 1701 nt, Artificial Sequence
  derived and/or modified CDS sequence (wt) from hemagglutinin__InfluenzaA__AGB13550
augaaggcaauacuaguaguucugcuauauacauuugcaaccgcaaaugcagacacauuauguauagguuaucaugcgaacaauucaacagacacuguagacacaguacuagaaaagaauguaacaguaacacacucuguuaaccuuuuagaagacaagcauaacgggaaacuaugcaaacugagagggguagccccauugcauuuggguaaauguaacauugcuggcuggauccugggaaauccagagugugaaucacucuccacagcaagcucaugguccuacauuguggaaacaucuaguucagacaauggaacguguuacccaggagauuucaucaauuaugaagagcuaagagagcaauugagcucagugucaucauuugaaagguuugagauauuccccaagacaaguucauggcccaaucaugacucgaacaaagguguaacggcagcauguccucaugcuggagcaaaaagcuucuacaaaaauuuaauauggcuaguuaaaaaaggaaauucauacccaaagcucagcaaauccuacauuaacgauaaagggaaagaaguccucgugcuauggggcauucaccauccaucuacuagugcugaccaacaaagucucuaucagaaugcagaugcauauguuuuuguggggacaucaaaauacagcaagaaguucaagccggaaauagcaguaagacccaaagugagggaucaagaagggagaaugaacuauuacuggacacuaguagagccgggagacaaaauaacauucgaagcaacuggaaaucuauugguaccgagauaugcauucgcaauggaaagaaaugcuggaucugguauuaucauuucagauacaccaguccacgauugcaauacaacuugucagacacccaagggugcuauaaacaccagccucccauuucagaauauacauccgaucacaauuggaaaauguccaaaauauguaaaaagcacaaaauugagacuggccacaggauugaggaaugucccgucuauucaaucuagaggccuauuuggggccauugccgguuucauugaagggggguggacagggaugguagauggaugguacgguuaucaccaucaaaaugagcaggggucaggauaugcagccgaccugaagagcacacagaaugccauugacaagauuacuaacaaaguaaauucuguuauugaaaagaugaauacacaguucacagcaguagguaaagaguucaaccaccuggaaaaaagaauagagaauuuaaauaaaaaaguugaugaugguuuccuggacauuuggacuuacaaugccgaacuguugguucuauuggaaaaugaaagaacuuuggacuaccacgauucaaaugugaaaaacuuauaugaaaagguaagaagccaguuaaaaaacaaugccaaggaaauuggaaacggcugcuuugaauuuuaccacaaaugcgauaacacgugcauggaaagugucaaaaaugggacuuaugacuacccaaaauacucagaggaagcaaaauuaaacagagaagaaauagaugggguaaagcuggaaucaacaaggauuuaccagauuuuggcgaucuauucaacugucgccaguucauugguacugguagucucccugggggcaaucaguuucuggaugugcucuaaugggucucuacaguguagaauauguauuuaa

SEQ ID NO: 41830 - RNA, 1701 nt, Artificial Sequence
  derived and/or modified CDS sequence (wt) from hemagglutinin__InfluenzaA__AGB13560
augaaggcaauacuaguaguucugcuauauacauuugcaaccgcaaaugcagacacauuauguauagguuaucaugcgaacaauucaacagacacuguagacacaguacuagaaaagaauguaacaguaacacacucuguuaaccuucuagaagacaagcauaacgggaaacuaugcaaacugagagggguagccccauugcauuuggguaaauguaacauugcuggcuggauccugggaaauccagagugugaaucacucuccacagcaagcucaugguccuacauuguggaaacaucuaguucagacaauggaacguguuacccaggagauuucaucaauuaugaagagcuaagagagcaauugagcucagugucaucauuugaaagguuugagauauuccccaagacaaguucauggcccaaucaugacucgaacaaagguguaacggcagcauguccucaugcuggagcaaaaagcuucuacaaaaauuuaauauggcuaguuaaaaaaggaaauucauacccaaagcucagcaaauccuacauuaacgauaaagggaaagaaguccucgugcuauggggcauucaccauccaucuacuagugcugaccaacaaagucucuaucagaaugcagaugcauauguuuuuguggggacaucaaaauacagcaagaaguucaagccggaaauagcaguaagacccaaagugagggaucaagaagggagaaugaacuauuacuggacacuaguagagccgggagacaaaauaacauucgaagcaacuggaaaucuauugguaccgagauaugcauucgcaauggaaagaaaugcuggaucugguauuaucauuucagauacaccaguccacgauugcaauacaacuugucagacacccaagggugcuauaaacaccagccucccauuucagaauauacauccgaucacaauuggaaaauguccaaaauauguaaaaagcacaaaauugagacuggccacaggauugaggaaugucccgucuauucaaucuagaggccuauuuggggccauugccgguuucauugaagggggguggacagggaugguagauggaugguacgguuaucaccaucaaaaugagcaggggucaggauaugcagccgaccugaagagcacacagaaugccauugacaagauuacuaacaaaguaaauucuguuauugaaaagaugaauacacaguucacagcaguagguaaagaguucaaccaccuggaaaaaagaauagagaauuuaaauaaaaaaguugaugaugguuuccuggacauuuggacuuacaaugccgaacuguugguucuauuggaaaaugaaagaacuuuggacuaccacgauucaaaugugaaaaacuuauaugaaaagguaagaagccaguuaaaaaacaaugccaaggaaauuggaaacggcugcuuugaauuuuaccacaaaugcgauaacacgugcauggaaagugucaaaaaugggacuuaugacuacccaaaauacucagaggaagcaaaauuaaacagagaagaaauagauggaguaaagcuggaaucaacaaggauuuaccagauuuuggcgaucuauucaacugucgccaguucauugguacugguagucucccugggggcaaucaguuucuggaugugcucuaaugggucucuacaguguagaauauguauuuaa

SEQ ID NO: 41831 - RNA, 1701 nt, Artificial Sequence
  derived and/or modified CDS sequence (wt) from hemagglutinin__InfluenzaA__AGB13570
augaaggcaauacuaguaguucugcuauauacauuugcaaccgcaaaugcagacacauuaugcauagguuaucaugcgaacaauucaacagacacuguagacacaguacuagaaaagaauguaacaguaacacacucuguuaaccuucuagaagacaagcauaacgggaaacuaugcaaacuaagagggguagccccauugcauuuggguaaauguaacauugcuggcuggauccugggaaauccagagugugaaucacucuccacagcaagcucaugguccuacauuguggaaacaucuaguucagacaauggaacguguuacccaggagauuucaucaauuaugaggagcuaagagagcaauugagcucagugucaucauuugaaagguuugagauauuccccaagacaaguucauggcccaaucaugacucgaacaaagguguaacggcagcauguccucaugcuggagcaaaaagcuucuacaaaaauuuaauauggcuaguuaaaaaaggaaauucauacccaaagcucagcaaauccuacauuaaugauaaagggaaagaaguccucgugcuauggggcauucaccauccaucuacuacugcugaccaacaaagucucuaucagaaugcagaugcauauguuuuuguggggacaucaagauacagcaagaaguucaagccggaaauagcaauaagacccaaagugagggaucaagaagggagaaugaacuauuacuggacacuaguagagccgggagacaaaauaacauucgaagcaacuggaaaucuagugguaccgagauaugcauucgcaauggaaagaaaugcuggaucugguauuaucauuucagauacaccaguccacgauugcaauacaacuugucagacacccaagggugcuauaaacaccagccucccauuucagaauauacauccgaucacaauuggaaaauguccaaaauauguaaaaagcacaaaauugagacuggccacaggauugaggaaugucccgucuauucaaucuagaggccuauuuggggccauugccggcuucauugaagggggguggacagggaugguagauggaugguacgguuaucaccaucaaaaugagcaggggucaggauaugcagccgaccugaagagcacacagaaugccauugacaagauuacuaacaaaguaaauucuguuauugaaaagaugaauacacaguucacagcaguagguaaagaguucaaccaccuggaaaaaagaauagagaauuuaaauaaaaaaguugaugaugguuuccuggacauuuggacuuacaaugccgaacuguugguucuacuggaaaaugaaagaacuuuggacuaccacgauucaaaugugaagaacuuauaugaaaagguaagaaaccaguuaaaaaacaaugccaaggaaauuggaaacggcugcuuugaauuuuaccacaaaugcgauaacacgugcauggaaagugucaaaaaugggacuuaugacuacccaaaauacucagaggaagcaaaauuaaacagagaagaaauagaugggguaaagcuggaaucaacaaggauuuaccagauuuuggcgaucuauucaacugucgccaguucauugguacugguagucucccugggggcaaucagcuucuggaugugcucuaaugggucucuacaguguagaauauguauuuaa

SEQ ID NO: 41832 - RNA, 1701 nt, Artificial Sequence
  derived and/or modified CDS sequence (wt) from hemagglutinin__InfluenzaA__AGB13580
augaaggcaauacuaguaguucugcuauauacauuugcaaccgcaaaugcagacacauuauguauagguuaucaugcgaacaauucaacagacacuguagacacaguacuagaaaagaauguaacaguaacacacucuguuaaccuucuagaagacaagcauaacgggaaacuaugcaaacuaagagggguagccccauugcauuuggguaaauguaacauugcuggauggauccugggaaauccagagugugaaucacucuccacagcaagcucaugguccuacauuguggaaacaucuaguucagacaauggaacguguuacccaggagauuucaucaauuaugaggagcuaagagagcaauugagcucagugucaucauuugaaagguuugagauauuccccaagacaaguucauggcccaaucaugacucgaacaaagguguaacggcagcauguccucaugcuggagcaaaaagcuucuacaaaaauuuaauauggcuaguuaaaaaaggaaauucauacccaaagcucagcaaauccuacauuaaugauaaagggaaagaaguccucgugcuauggggcauucaccauccaucuacuacugcugaccaacaaagucucuaucagaaugcagaugcauauguuuuuguggggacaucaagauacagcaagaaguucaagccggaaauagcaauaagacccaaagugagggaucaagaagggagaaugaacuauuacuggacacuaguagagccgggagacaaaauaacauucgaagcaacuggaaaucuagugguaccgagauaugcauucgcaauggaaagaaaugcuggaucugguauuaucauuucagauacaccaguccacgauugcaauacaacuugucagacacccaagggugcuauaaacaccagccucccauuucagaauauacauccgaucacaauuggaaaauguccaaaauauguaaaaagcacaaaauugagacuggccacaggauugaggaaugucccgucuauucaaucuagaggccuauuuggggccauugccggcuucauugaagggggguggacaggaaugguagauggaugguacgguuaucaccaucaaaaugagcaggggucaggauaugcagccgaccugaagagcacacagaaugccauugacaagauuacuaacaaaguaaauucuguuauugaaaagaugaauacacaguucacagcaguagguaaagaguucaaccaccuggaaaaaagaauagagaauuuaaauaaaaaaguugaugaugguuuccuggacauuuggacuuacaaugccgaacuguugguucuauuggaaaaugaaagaacuuuggacuaccacgauucaaaugugaagaacuuauaugaaaagguaagaaaccaguuaaaaaacaaugccaaggaaauugggaacggcugcuuugaauuuuaccacaaaugcaauaacacgugcauggaaagugucaaaaaugggacuuaugacuacccaaaauacucagaggaagcaaaauuaaacagagaagaaauagaugggguaaagcuggaaucaacaaggauuuaccagauuuuggcgaucuauucaacugucgccaguucauugguacugguagucucccugggggcaaucagcuucuggaugugcucuaaugggucucuacaguguagaauauguauuuaa

SEQ ID NO: 41833 - RNA, 1701 nt, Artificial Sequence
  derived and/or modified CDS sequence (wt) from hemagglutinin__InfluenzaA__AGB13590
augaaggcaauacuaguaguucugcuauauacauuugcaaccgcaaaugcagacacauuauguauagguuaucaugcgaacaauucaacagacacuguagacacaguacuagaaaagaauguaacaguaacacacucuguuaaccuucuagaagacaagcauaacgggaaacuaugcaaacuaagagggguagccccauugcauuuggguaaauguaacauugcuggcuggauccugggaaauccagagugugaaucacucuccacagcaagcucaugguccuacauuguggaaacaucuaguucagacaauggaacguguuacccaggagauuucaucaauuaugaggagcuaagagagcaauugagcucagugucaucauuugaaagguuugagauauuccccaagacaaguucauggcccaaucaugacucgaacaaagguguaacggcagcauguccucaugcuggagcaaaaagcuucuacaaaaauuuaauauggcuaguuaaaaaaggaaauucauacccaaagcucagccaauccuacauuaaugauaaagggaaagaaguccucgugcuguggggcauucaccauccaucuacuacugcugaccaacaaagucucuaucagaaugcagaugcauauguuuuuguggggacaucaagauacagcaagaaguucaagccggaaauagcaauaagacccaaagugagggaucaagaagggagaaugaacuauuacuggacacuaguagagccgggagacaaaauaacauucgaagcaacuggaaaucuagugguaccgagauaugcauucgcaauggaaagaaaugcuggaucugguauuaucauuucagauacaccaguccacgauugcaauacaacuugucagacacccaagggugcuauaaacaccagccucccauuucagaauauacauccgauuacaauuggaaaauguccaaaauauguaaaaagcacaaaauugagacuggccacaggauugaggaaugucccgucuauucaaucuagaggccuauuuggggccauugccggcuucauugaagggggguggacagggaugguagauggaugguacgguuaucaccaucaaaaugagcaggggucaggauaugcagccgaccugaagagcacacagaaugccauugacaagauuacuaacaaaguaaauucuguuauugaaaagaugaauacacaguucacagcaguagguaaagaguucaaccaccuggaaaaaagaauagagaauuuaaauaaaaaaguugaugaugguuuccuggacauuuggacuuacaaugccgaacuguugguuuuauuggaaaaugaaagaacuuuggacuaccacgauucaaaugugaagaacuuguaugaaaagguaagaaaccaguuaaaaaacaaugccaaggaaauuggaaacggcugcuuugaauuuuaccacaaaugcgauaacacgugcauggaaagugucaaaaaugggacuuaugacuacccaaaauacucagaggaagcaaaauuaaacagagaagaaauagaugggguaaagcuggaaucaacaaggauuuaccagauuuuggcgaucuauucaacugucgccaguucauugguacugguagucucccugggggcaaucaguuucuggaugugcucuaaugggucucuacaguguagaauauguauuuaa

SEQ ID NO: 41834 - RNA, 1701 nt, Artificial Sequence
  derived and/or modified CDS sequence (wt) from hemagglutinin__InfluenzaA__AGB13600
augaaggcaauacuaguaguucugcuauauacauuugcaaccgcaaaugcagacacauuauguauagguuaucaugcgaacaauucaacagacacuguagacacaguacuagaaaagaauguaacaguaacacacucuguuaaccuucuagaagacaagcauaacgggaaacuaugcaaacuaagagggguagccccauugcauuuggguaaauguaacauugcuggcuggauccugggaaauccagagugugaaucacucuccacagcaagcucaugguccuacauuguggaaacaucuaguucagacaauggaacguguuacccaggagauuucaucaauuaugaggagcuaagagagcaauugagcucagugucaucauuugaaagguuugagauauuccccaagacaaguucauggcccaaucaugacucgaacaaagguguaacggcagcauguccucaugcuggagcaaaaagcuucuacaaaaauuuaauauggcuaguuaaaaaaggaaauucauacccaaagcucaacaaauccuacauuaaugauaaagggaaagaaguccucgugcuguggggcauucaccauccaucuacuacugcugaccaacaaagucucuaucagaaugcagaugcauauguuuuuguggggacaucaagauacagcaagaaguucaagccggaaauagcaauaagacccaaagugagggaucaagaagggagaaugaacuauuacuggacacuaguagagccgggagacaaaauaacauucgaagcaacuggaaaucuagugguaccgagauaugcauucgcaauggaaagaaaugcuggaucugguauuaucauuucagauacaccaguccacgauugcaauacaacuugucagacacccaagggugcuauaaacaccagccucccauuucagaauauacauccgaucacaauuggaaaauguccaaaauauguaaaaagcacaaaauugagacuggccacaggauugaggaaugucccgucuauucaaucuagaggccuauuuggggccauugccggcuucauugaagggggguggacagggaugguagauggaugguacgguuaucaccaucaaaaugagcaggggucaggauaugcagccgaccugaagagcacacagaaugccauugacaagauuacuaacaaaguaaauucuguuauugaaaagaugaauacacaguucacagcaguagguaaagaguucaaccaccuggaaaaaagaauagagaauuuaaauaaaaaaguugaugaugguuuccuggacauuuggacuuacaaugccgaacuguugguucuauuggaaaaugaaagaacuuuggacuaccacgauucaaaugugaagaacuuguaugaaaagguaagaaaccaguuaaaaaacaaugccaaggaaauuggaaacggcugcuuugaauuuuaucacaaaugcgauaacacgugcauggaaagugucaaaaaugggacuuaugacuacccaaaauacucagaggaagcaaaauuaaacagagaagaaauagaugggguaaagcuggaaucaacaaggauuuaccagauuuuggcgaucuauucaacugucgccaguucauugguacugguagucucccugggggcaaucaguuucuggaugugcucuaaugggucucuacaguguagaauauguauuuaa

SEQ ID NO: 41835 - RNA, 1701 nt, Artificial Sequence; identical to SEQ ID NO: 41790
  derived and/or modified CDS sequence (wt) from hemagglutinin__InfluenzaA__AGB13610

SEQ ID NO: 41836 - RNA, 1701 nt, Artificial Sequence; identical to SEQ ID NO: 40379
  derived and/or modified CDS sequence (wt) from hemagglutinin__InfluenzaA__AGB13620

SEQ ID NO: 41837 - RNA, 1701 nt, Artificial Sequence; identical to SEQ ID NO: 39908
  derived and/or modified CDS sequence (wt) from hemagglutinin__InfluenzaA__AGB13630

SEQ ID NO: 41838 - RNA, 1701 nt, Artificial Sequence
  derived and/or modified CDS sequence (wt) from hemagglutinin__InfluenzaA__AGB13640
augaaggcaauacuaguaguucugcuauauacauuugcaaccgcaaaugcagacacauuauguauagguuaucaugcgaacaauucaacagacacuguagacacaguacuagaaaagaauguaacaguaacacacucuguuaaccuucuagaagacaaacauaacgggaaacuaugcaaacuaagagggguagccccauugcauuuggguaaauguaacauugcuggcuggauccugggaaauccagagugugaaucacucuccacagcaagcucaugguccuacauuguggaaacaucuaguucagacaauggaacguguuacccaggagauuucaucgauuaugaggagcuaagagagcaauugagcucagugucaucauuugaaagguuugagauauuccccaagacaaguucauggcccaaucaugacucgaacaaagguguaacgacagcauguccucaugcuggagcaaaaagcuucuacaaaaauuuaauauggcuaguuaaaaaaggaaauucauacccaaagcucagcaaauccuacauuaaugauaaagggaaagaaguccucgugcuauggggcauucaccauccaccuacuagugcugaccaacaaagucucuaucagaaugcagaugcauauguuuuuguggggacaucaagauacagcaagaaauucaagccggaaauagcaauaagacccaaagugagggaucaagaagggagaaugaacuauuacuggacacuaguagagccgggagacaaaauaacauucgaagcaacuggaaaucuagugguaccgagauaugcauucgcaauggaaagaaaugcuggaucugguauuaucauuucagauacaccaguccacgauugcaauacaacuugucagacacccaagggugcuauaaauaccagccucccauuucagaauauacauccgaucacaauuggaaaauguccaaaauauguaaaaagcacaaaauugagacuggccacaggauugaggaaugucccgucuauucaaucuagaggccuauuuggggccauugccgguuucauugaagggggguggacagggaugguagauggaugguacgguuaucaccaucaaaaugagcaggggucaggauaugcagccgaccugaagagcacacagaaugccauugacgggauuacuaacaaaguaaauucuguuauugaaaagaugaauacacaguucacagcaguagguaaagaguucaaccaccuggaaaaaagaauagaaaauuuaaauaaaaaaguugaugaugguuuccuggacauuuggacuuacaaugccgaacuguugguucuauuggaaaaugaaagaacuuuggacuaccacgauucaaaugugaagaacuuauaugaaaagguaagaagccaguuaaaaaacaaugccaaggaaauuggaaacggcugcuuugaauuuuaccacaaaugugauaacacgugcauggaaagugucaaaaaugggacuuaugacuacccaaaauacucagaggaagcaaaauuaaacagagaagaaauagaugggguaaagcuggaaucaacaaugauuuaccagauuuuggcgaucuauucaacugucgccaguucauugguacugauagucucccugggggcaaucaguuucuggaugugcucuaaugggucucuacaguguagaauauguauuuaa

SEQ ID NO: 41839 - RNA, 1701 nt, Artificial Sequence
  derived and/or modified CDS sequence (wt) from hemagglutinin__InfluenzaA__AGB13650
augaaggcaauacuaguaguucugcuauauacauuugcaaccgcaaaugcagacacauuauguauagguuaucaugcgaacaauucaacagacacuguagacacaguacuagaaaagaauguaacaguaacacacucuguuaaccuucuagaagacaaacauaacgggaaacuaugcaaacuaagagggguagccccauugcauuuggguaaauguaacauugcuggcuggauccugggaaauccagagugugaaucacucuccacagcaagcucaugguccuacauuguggaaacaucuaguucagacaauggaacguguuacccaggagauuucaucgauuaugaggagcuaagagagcaauugagcucagugucaucauuugaaagguuugagauauuccccaagacaaguucauggcccaaucaugacucgaacaaagguguaacgacagcauguccucaugcuggagcaaaaagcuucuacaaaaauuuaauauggcuaguuaaaaaaggaaauucauacccaaagcucagcaaauccuacauuaaugauaaagggaaagaaguccucgugcuauggggcauucaccauccaccuacuagugcugaccaacaaagucucuaucagaaugcagaugcauauguuuuuguggggacaucaagauacagcaagaaauucaagccggaaauagcaauaagacccaaagugagggaucaagaagggagaaugaacuauuacuggacacuaguagagccgggagacaaaauaacauucgaagcaacuggaaaucuagugguaccgagauaugcauucgcaauggaaagaaaugcuggaucugguauuaucauuucagauacaccaguccacgauugcaauacaacuugucagacacccaagggugcuauaaauaccagccucccauuucagaauauacauccgaucacaauuggaaaauguccaaaauauguaaaaagcacaaaauugagacuggccacaggauugaggaaugucccgucuauucaaucuagaggccuauuuggggccauugccgguuucauugaagggggguggacagggaugguagauggaugguacgguuaucaccaucaaaaugagcaggggucaggauaugcagccgaccugaagagcacacagaaugccauugacgggauuacuaacaaaguaaauucuguuauugaaaagaugaauacacaguucacagcaguagguaaagaguucaaccaccuggaaaaaagaauagaaaauuuaaauaaaaaaguugaugaugguuuccuggacauuuggacuuacaaugccgaacuguugauucuauuggaaaaugaaagaacuuuggacuaccacgauucaaaugugaagaacuuauaugaaaagguaagaagccaguuaaaaaacaaugccaaggaaauuggaaacggcugcuuugaauuuuaccacaaaugugauaacacgugcauggaaagugucaaaaaugggacuuaugacuacccaaaauacucagaggaagcaaaauuaaacagagaagaaauagaugggguaaagcuggaaucaacaaugauuuaccagauuuuggcgaucuauucaacugucgccaguucauugguacugauagucucccugggggcaaucaguuucuggaugugcucuaaugggucucuacaguguagaauauguauuuaa

SEQ ID NO: 41840 - RNA, 1701 nt, Artificial Sequence
  derived and/or modified CDS sequence (wt) from hemagglutinin__InfluenzaA__AGB13660
augaaggcaauacuaguaguuaugcuauauacauuugcaaccgcaaaugcagacacauuauguauagguuaucaugcgaacaauucaacagacacuguagacacaguacuagaaaagaauguaacaguaacacacucuguuaaucuucuagaagacaagcauaacgggaaacuaugcaaacuaagagggguagccccauugcauuuggguaaauguaacauugcuggcuggauccugggaaauccagagugugaaucacucuccacagcaagcucaugguccuacauuguggaaacaucuaguucagacaauggaacguguuacccaggagauuucaucgauuaugaggagcuaagagagcaauugagcucagugucaucauuugaaagguuugagauauuccccaaaacaaguucauggcccaaucaugacucgaacaaagguguaacggcagcauguccucaugcuggagcaaaaggcuucuacaaaaauuuaauauggcuaguuaaaaaaggaaauucauacccaaagcucagcaaauccuacauuaaugauaaagggaaagaaguccucgugcuauggggcauucaccauccaucuacuacugcugaccaacaaagucucuaucagaaugcagauacauauguuuuuguggggacaucaagauacagcaagaaguucaagccggaaauagcaauaagacccaaagugagggaucaagaagggagaaugaacuauuacuggacacuaguagagccgggagacaaaauaacauucgaagcaacuggaaaucuagugguaccgagauaugcauuugcaauggaaagaaaugcuggaucugguauuaucauuucagauacaccaguccacgauugcaauacaacuugucagacacccaagggugcuauaaacaccagccucccauuucagaauauacauccgaucacaauuggaaaauguccaaaauauguaaaaagcacaaaauugagacuggccacaggauugaggaaugucccgucuauucaaucuagaggccuauuuggggccauugccggcuucauugaagggggguggacagggaugguagauggaugguacgguuaucaccaucaaaaugagcaggggucaggauaugcagccgaccugaagagcacacagaaugccauugacaagauuacuaacaaaguaaauucuguuauugaaaagaugaauacacaguucacagcaguagguaaagaguucaaccaccuggaaaaaagaauagagaauuuaaauaaaaaaguugaugaugguuuccuggacauuuggacuuacaaugccgaacuguugguucuauuggaaaaugaaagaacuuuggacuaccacgauucaaaugugaagaacuuauaugaaaagguaagaaaccaguuaaaaaacaaugccaaggaaauuggaaauggcugcuuugaauuuuaccacaaaugcgauaacacgugcauggaaagugucaaaaaugggacuuaugacuacccaaaauacucagaggaagcaaaauuaaacagagaagaaauagaugggguaaagcuggaaucaacaaggauuuaccagauuuuggcgaucuauucaacugucgccaguucauugguacugguagucucccugggggcaaucaguuuuuggaugugcucuaaugggucucuacaguguagaauauguauuuaa

SEQ ID NO: 41841 - RNA, 1701 nt, Artificial Sequence; identical to SEQ ID NO: 41821
  derived and/or modified CDS sequence (wt) from hemagglutinin__InfluenzaA__AGB13721

SEQ ID NO: 41842 - RNA, 1701 nt, Artificial Sequence
  derived and/or modified CDS sequence (wt) from hemagglutinin__InfluenzaA__AGB13731
augaaggcaauacuaguaguucugcuauauacauuugcaaccgcaaaugcagacacauuauguauagguuaucaugcgaacaauucaacagacacuguagacacaguacuagaaaagaauguaacaguaacacacucuguuaaccuucuagaagacaagcauaacgggaaacuaugcaaacuaagagggguagccccauugcauuuggguaaauguaacauugcuggcuggauccugggaaauccagagugugaaucacucuccacagcaagcucaugguccuacauuguggaaacaucuaguucagacaauggaacguguuacccaggagauuucaucaauuaugaggagcuaagagagcaauugagcucagugucaucauuugaaagguuugagauauuccccaagacaaguucauggcccaaucaugacucgaacaaagguguaacggcagcauguccucaugcuggagcaaaaagcuucuacaaaaauuuaauauggcuaguuaaaaaaggaaauucauacccaaagcucagcaaauccuacauuaaugauaaagggaaagaaguccucgugcuguggggcauucaccauccaucuacuacugcugaccaacaaagucucuaucagaaugcagaugcauauguuuuuguggggacaucaagauacagcaagaaguucaagccggaaauagcaauaagacccaaagugagggaucaagaagggagaaugaacuauuacuggacacuaguagagccgggagacaaaauaacauucgaagcaacuggaaaucuagugguaccgagauaugcauucgcaauggaaagaaaugcuggaucugguauuaucauuucagauacaccaguccacgauugcaauacaacuugucagacacccaagggugcuauaaacaccagccucccauuucagaauauacauccgauuacaauuggaaaauguccaaaauauguaaaaagcacaaaauugagacuggccacaggauugaggaaugucccgucuauucaaucuagaggccuauuuggggccauugccggcuucauugaagggggguggacagggaugguagauggaugguacgguuaucaccaucaaaaugagcaggggucaggauaugcagccgaccugaagagcacacagaaugccauugacaagauuacuaacaaaguaaauucuguuauugaaaagaugaauacacaguucacagcaguagguaaagaguucaaccaccuggaaaaaagaauagagaauuuaaauaaaaaaguugaugaugguuuccuggacauuuggacuuacaaugccgaacuguugguucuauuggaaaaugaaagaacuuuggacuaccacgauucaaaugugaagaacuuguaugaaaagguaagaaaccaguuaaaaaacaaugccaaggaaauuggaaacggcugcuuugaauuuuaccacaaaugcgauaacacgugcauggaaagugucaaaaaugggacuuaugacuacccaaaauacucagaggaagcaaaauuaaacagagaagaaauagaugggguaaagcuggaaucaacaaggauuuaccagauuuuggcgaucuauucaacugucgccaguucauugguacugguagucucccugggggcaaucaguuucuggaugugcucuaaugggucucuacaguguagaauauguauuuaa

SEQ ID NO: 41843 - RNA, 1701 nt, Artificial Sequence
  derived and/or modified CDS sequence (wt) from hemagglutinin__InfluenzaA__AGB51356
augaaggcaauacuauuagucuuguuauguacauuugcagccacaaaugcagacacacuauguauagguuaucaugcaaauaauucaacugacacuguugauacaguacuagaaaagaauguaacaguaacacacucuguuaaucuucuugaagacagacauaacgggaaacuauguaaacugggggggauagccccauugcacuuggguaaauguaacauugccggauggcuuuugggaaacccagaaugugaauuacuacucacaguaagcucauggucuuacauuguggaaacaucgaacucagacaaugggacauguuacccaggagauuucaucaauuaugaagagcugagagagcaguugagcucagugucaucauuugaaagauucgagauauuccccaagacaaguucguggcccaaucaugaaacaaacagaggugugacggcagcaugcccuuaugcuggagcaaacagcuucuacagaaauuuaauauggcugguggaaaaaggaaauucauacccaaagcucagcaaauccuauguuaacaauaaagggaaggaaguccuugugcuauggggcauucaucauccaccuaccaguacugaucaacaaagucucuaccaaaaugcagaugccuauguuuuuguagggucaucaaaauauaacagaaaguucaagccagaaauagcagcaagacccaaggugagaggucaagcagggaggaugaacuauuacuggacacuaauagaaccuggagacacaauaacauuugaagcaacuggaaaucuagugguaccaagauaugcuuucgcaaugaauagagguucuggaucugguauuauaauuucggaugcaccaguucaugauuguaacacgaagugucaaacacccaagggugccauaaacaccagccucccauuucagaauauacauccagucacaauuggagaauguccaaaauaugucaaaagcacaaaauugagaauggcuacaggacuaaggaauaucccgucuauucaaucuagaggucuguuuggagccauugcugguuuuauugaggggggauggacaggaaugauagauggaugguaugguuaucaccaucagaaugaacagggaucaggauaugcagcggaccaaaggagcacacaaaaugccauugacgggaucacuaacaaaguaaauucuguuauugaaaagaugaacacgcaauucacggcaguggguaaagaauucaaccacuuggaaaaaagaauagagaauuuaaacaaaaagguugaugaugguuuucuggauauuuggacauacaaugcagaacuguugguucuauuggaaaaugaaagaacucuggauuuccacgacucgaauguaaagaaccuguaugagaaaguaagaagccagcuaaggaacaaugccaaagaaauugggaauggcugcuuugaauucuaucacaaaugugaugauacaugcauggagagcgucaaaaaugggacuuaugauuacccaaaguacucagaagaaucaaagcuaaacagagaggagauagauggaguaaaguuggagucaacaagaauuuaccagauuuuggcgaucuauucaacugucgccaguucauugguacuguuggucucccugggggcaaucaguuuuuggaugugcucuaaugggucuuuacagugcagaauauguauuuaa

SEQ ID NO: 41844 - RNA, 1701 nt, Artificial Sequence
  derived and/or modified CDS sequence (wt) from hemagglutinin__InfluenzaA__AGB97269
augaaggcaauacuaguaguucugcuauauacauuugcaaccgcaaaugcagacacauuauguauagguuaccaugcgaacaacucaacagacacuguagacacaguacuagaaaagaauauaacaguaacacacucuguuaaucuucuagaagacaagcauaacgggaaacuaugcaaacuaagaggaguagccccauugcauuuggguaaauguaacauugcuggcuggauccugggaaauccagagugugaaacacucuccacagcaagcucaugguccuacauuguggaaacaucuaguucagacaauggaacguguuacccaggagauuucaucgauuaugaggagcuaagagagcaauugagcucagugucaucauuugaaagguuugagauauuccccaagacaaguucauggcccaaucaugacucgaacaaagguguaacggcagcauguccucaugcuggagcaaaaggcuucuacaaaaauuuaauauggcuaguuaaaaaaggaaauucauacccaaagcucagcaaauccuacauuaaugauaaagggaaagaaguccucgugcuauggggcauucaccauccaucuacuacugcugaccaacaaagucucuaucagaaugcagauacauauguuuuuguggggacaucaagauacagcaagaaguucaagccggaaauagcaauaagacccaaagugagggaucaagaagggagaaugaacuauuacuggacacuaguagagccgggagacaaaauaacauucgaagcaacuggaaaucuagugguaccgagauaugcauucgcaauggaaagagaugcuggaucugguauuaucauuucagauacaccaguccacgauugcaacacaacuugucagacacccaagggagcuauaaacaccagccucccauuucagaauauacauccgaucacaauuggaaaauguccaaaauauguaaaaagcacaaaauugagacuggccacaggauugaggaaugucccgucuauucaaucuagaggccuauuuggggccauugccggcuucauugaagggggauggacagggaugguagauggaugguacgguuaucaccaucaaaaugagcaggggucaggauaugcagccgaccugaagagcacacagaaugccauugacaagauuacuaacaaaguaaauucuguuauugaaaaaaugaauacacaguucacagcaguagguaaagaguucaaccaccuggaaaaaagaauagagaauuuaaauaaaaaaguugaugauggguuccuggacauuuggacuuacaaugccgaacuguugguucuauuggaaaaugaaagaacuuuggacuaccacgauucaaaugugaagaacuuauaugaaaagguaagaaaccaguuaaaaaacaaugccaaggaaauuggaaauggcugcuuugaauuuuaccacaaaugcgauaacacguguauggaaagugucaaaaaugggacuuaugacuacccaaaauacucagaggaagcaaaauuaaacagagaagaaauagaugggguaaagcuggaaucaacaaggauuuaccagauuuuggcgaucuauucaacugccgccaguucauugguacugguagucucccugggggcaaucaguuuuuggaugugcucuaaugggucucuacaguguagaauauguauuuaa

SEQ ID NO: 41845 - RNA, 1701 nt, Artificial Sequence
  derived and/or modified CDS sequence (wt) from hemagglutinin__InfluenzaA__AGB97273
augaaggcaauacuaguaguucugcuauauacauuugcaaccgcaaaugcagacacauuauguauagguuaccaugcgaacaacucaacagacacuguagacacaguacuagaaaagaauguaacaguaacacacucuguuaaucuucuagaagacaagcauaacgggaaacuaugcaaacuaagaggaguagccccauugcauuuggguaaauguaacauugcuggcuggauccugggaaauccagagugugaaacacucuccacagcaagcucaugguccuacauuguggaaacaucuaguucagacaauggaacguguuacccaggagauuucaucgauuaugaggagcuaagagagcaauugagcucagugucaucauuugaaagguuugagauauuccccaagacaaguucauggcccaaucaugacucgaacaaagguguaacggcagcauguccucaugcuggagcaaaaggcuucuacaaaaauuuaauauggcuaguuaaaaaaggaaauucauacccaaagcucagcaaauccuacauuaaugauaaagggaaagaaguccucgugcuauggggcauucaccauccaucuacuacugcugaccaacaaagucucuaucagaaugcagauacauauguuuuuguggggacaucaagauacagcaagaaguucaagccggaaauagcaauaagacccaaagugagggaucaagaagggagaaugaacuauuacuggacacuaguagagccgggagacaaaauaacauucgaagcaacuggaaaucuagugguaccgagauaugcauucgcaauggaaagagaugcuggaucugguauuaucauuucagauacaccaguccacgauugcaacacaacuugucagacacccaagggagcuauaaacaccagccucccauuucagaauauacauccgaucacaauuggaaaauguccaaaauauguaaaaagcacaaaauugagacuggccacaggauugaggaaugucccgucuauucaaucuagaggccuauuuggggccauugccggcuucauugaagggggauggacagggaugguagauggaugguacgguuaucaccaucaaaaugagcaggggucaggauaugcagccgaccugaagagcacacagaaugccauugacaagauuacuaacaaaguaaauucuguuauugaaaaaaugaauacacaguucacagcaguagguaaagaguucaaccaccuggaaaaaagaauagagaauuuaaauaaaaaaguugaugauggguuccuggacauuuggacuuacaaugccgaacuguugguucuauuggaaaaugaaagaacuuuggacuaccacgauucaaaugugaagaacuuauaugaaaagguaagaaaccaguuaaaaaacaaugccaaggaaauuggaaauggcugcuuugaauuuuaccacaaaugcgauaacacguguauggaaagugucaaaaaugggacuuaugacuacccaaaauacucagaggaagcaaaauuaaacagagaagaaauagaugggguaaagcuggaaucaacaaggauuuaccagauuuuggcgaucuauucaacugccgccaguucauugguacugguagucucccugggggcaaucaguuuuuggaugugcucuaaugggucucuacaguguagaauauguauuuaa

SEQ ID NO: 41846 - RNA, 1701 nt, Artificial Sequence
  derived and/or modified CDS sequence (wt) from hemagglutinin__InfluenzaA__AGB97288
augaagacuaucauugcuuugggcuacauucuaugucugguuuucgcucaaaaacuuccuggaaaugacaauagcacggcaacgcugugucuugggcaccaugcaguaccaaacggaacgauagugaaaacaaucacgaaugaccgaauugaaguuacuaaugcuacugagcugguucagaauuccucaauaggugaaauaugcgacaguccucaucagauccuugauggaaaaaacuguacacuaauagaugcucuauugggagacccucagugugauggcuuucaaaauaagaaaugggaccuuuuuauugaacgaagcaaagccuacagcaacuguuacccuuaugaugugccggauuaugccucccuuaggucacuaguugccucauccggcacacuggaguuuaacaaugaaagcuucaauuggacuggagucacucaaaacggaacaaguucugcuugcauaaggagaucuaauaguaguuucuuuaguagauuaaauugguugacccacuuaaacuucaaauacccagcauugaacgugacuaugccaaacaaugaacaauuugacaaauuguacauuugggggguucaccacccggguacggacaaggaccaaaucuuccuguaugcuaaaucaucaggaagaaucacaguaucuaccaaaagaagccaacaagcuguaaucccgaauaucggaucuagacccagaauaaggaauaucccuagcagaauaagcaucuauuggacaauaguaaaaccaggagacauacuuuugauuaacagcacagggaaucuaauugcuccuagggguuacuucaaaauacgaagugggaaaagcucaauaaugagaucagaugcacccauuggcaaaugcaagucugaaugcaucacuccaaauggaagcauuccaaaugacaaaccauuccaaaauguaaacaggaucacauacggggccugucccagauauguuaagcaaagcacucugaaauuggcaacaggaaugcgaaauguaccagagaaacaaacuagaggcauauuuggcgcaauagcggguuucauagaaaaugguugggagggaaugguggaugguugguacgguuucaggcaucaaaauucugagggaagaggacaagcagcagaucucaaaagcacucaagcagcaaucgaucaaaucaaugggaagcugaaucgauugaucgggaaaaccaacgagaaauuccaucagauugaaaaagaauucucagaaguagaagggagaauucaggaccuugagaaauauguugaggacacuaaaauagaucucuggucauacaacgcggagcuucuuguugcccuggagaaccaacauacaauugaucuaacugacucagaaaugaacaaacuguuugaaaaaacaaagaagcaacugagggaaaaugcugaggauaugggcaaugguuguuucaaaauauaccacaaaugugacaaugccugcauaggaucaaucagaaauggaacuuaugaccacaauguauacagggaugaagcauuaaacaaccgguuccagaucaagggaguugagcugaagucaggguacaaagauuggauccuauggauuuccuuugccauaucauguuuuuugcuuuguguugcuuuguugggguucaucaugugggccugccaaaagggcaacauuaggugcaacauuugcauuuga

SEQ ID NO: 41847 - RNA, 1701 nt, Artificial Sequence
  derived and/or modified CDS sequence (wt) from hemagglutinin__InfluenzaA__AGB97292
augaagaccaucauugcuuugagcuacauucuuugucuaguuuucgcucaagaacuuccuggaaaugacgacagcacggcaacgcugugccuugggcaccaugcagugccaaacggaacgauagugaaaacaaucacgaaugaccaaauugaaguuacuaaugcuacugagcugguucagaguuccucaacaggugaaauaugcaacaguccucaucagauccuugauggagaaaacugcacacuaauagaugcucuauugggagacccucagugugauggcuuccaaaacaagaaaugggaccuuuuuguugaacgaagcaaagcccacagcaacuguuacccuuaugaugugccggauuaugccucccuuaggucacuaguugccucauccggcacacuggaguuuaacaaugaaagcuucaauuggacuggagucacucaaaacggaacaagcucugcuugcauaaggagaucuaauaauaguuucuuuaguagauugaauugguugacccacuuaaacuucaaauacccagcauugaacgugacuaugccaaacaaugaacaauuugacaaauuguacauuugggggguucaccacccggguacggacaaggaccaaaucuuccuguaugcucaagcaucaggaagaaucacaguaucuaccaaaagaagccaacaagcuguaauuccgaauaucggaucuagacccagaguaaggaauaucccuagcagaguaagcaucuauuggacaauaguaaaaccaggagacauacuuuugauuaacagcacagggaaucuaauugcuccuagggguuacuucaaaauacgaagugggaaaagcucaauaaugagaucagaugcacccauuggcaaaugcaauucugcaugcaucacuccaaauggaagcauucccaaugacaaaccauuccaaaauguaaacaggaucacauacggggccugucccagauaugucaagcaaaacacucugaaauuggcaacaggaaugagaaauguaccagagaaacaaacuagaggcauauuuggcgcaauagcggguuucauagaaaaugguugggagggaaugguggaugguugguacgguuucaggcaucaaaauucugagggaaggggacaagcagcagaucucaaaagcacucaagcagcaaucgaucaaaucaaugggaagcugaauagauugaucgggaaaaccaacgagaaauuccaucagauugaaaaagaauucucagaagucgaagggagaauucaggaccuugagaaauauguugaggacacuaaaauagaucucuggucauacaacgcggagcuucuuguugcccuggagaaccaacacacaauugaucuaacugacucagaaaugaacaaacuguuugaaaaaacaaagaagcaacugagggaaaaugcugaggauaugggcaaugguuguuucaaaauauaccacaaaugugacaaugccugcauaggaucaaucagaaauggaacuuaugaucacgauguguacagagaugaagcauuaaacaaccgauuccagaucaaaggaguugagcugaagucaggguacaaagauuggauccuauggauuuccuuugccauaucauguuuuuugcuuuguguugcuuuguugggguucaucaugugggccugccaaaaaggcaacauuaggugcaacauuugcauuuga

SEQ ID NO: 41848 - RNA, 1701 nt, Artificial Sequence
  derived and/or modified CDS sequence (wt) from hemagglutinin__InfluenzaA__AGB97300
augaagacuaucauugcuuugagcuacauucuaugucugguuuucgcucaaaaacuuccuggaaaugacaauagcacggcaacgcugugccuugggcaccaugcaguaccaaacggaacgauagugaaaacaaucacgaaugaccgaauugaaguuacuaaugcuacugagcugguucagaauuccucaauaggugaaauaugcgacaguccucaucagauccuugauggagaaaacugcacacuaauagaugcucuauugggagacccucagugugauggcuuucaaaauaagaaaugggaccuuuuuguugaacgaagcaaagccuacagcaacuguuacccuuaugaugugccggauuaugccucccuuaggucacuaguugccucauccggcacacuggaguuuaacaaugaaagcuucaauuggacuggagucacucaaaauggaacaaguucugcuugcauaaggagaucuaauaguaguuucuuuaguagauuaaauugguugacccacuuaaacuucaaauacccagcauugaacgugacuaugccaaacaaugaacaauuugacaaauuguacauuugggggguucaccacccggguacggacaaggaccaaaucuuccuguaugcucaaucaucaggaagaaucacaguaucuaccaaaagaagccaacaagcuguaaucccgaauaucggaucuagacccagaauaaggaauaucccuagcagaauaagcaucuauuggacaauaguaaaaccgggagacauacuuuugauuaacagcacagggaaucuaauugcuccuagggguuacuucaaaauacgaagugggaaaagcucaauaaugagaucagaugcacccauuggcaaaugcaagucugaaugcaucacuccaaauggaagcauucccaaugacaaaccauuccaaaauguaaacaggaucacauacggggccugucccagauauguuaagcaaagcacucugaaauuggcaacaggaaugcgaaauguaccagagaaacaaacuagaggcauauuuggcgcaauagcggguuucauagaaaaugguugggagggaaugguggaugguugguacgguuucaggcaucaaaauucugagggaagaggacaagcagcagaucucaaaagcacucaagcagcaaucgaucaaaucaaugggaagcugaaucgauugaucgggaaaaccaacgagaaauuccaucagauugaaaaagaauucucagaaguagaagggagaauucaggaccuugagaaauauguugaggacacuaaaauagaucucuggucauacaacgcggagcuucuuguugcccuggagaaccaacauacaauugaucuaacugacucagaaaugaacaaacuguuugaaaaaacaaggaagcaacugagggaaaaugcugaggauaugggcaaugguuguuucaaaauauaccacaaaugugacaaugccugcauaggaucaaucagaaauggaacuuaugaccacgauguauacagggaugaagcauuaaacaaccgguuccagaucaagggaguugagcugaagucaggguacaaagauuggauccuauggauuuccuuugccauaucauguuuuuugcuuuguguugcuuuguugggguucaucaugugggccugccaaaagggcaacauuaggugcaacauuugcauuuga

SEQ ID NO: 41849 - RNA, 1701 nt, Artificial Sequence
  derived and/or modified CDS sequence (wt) from hemagglutinin__InfluenzaA__AGE89267
augaaggcaauacuaauaguucugcuauauacauuugcaaccgcaaaugcagacacauuauguauagguuaucaugcgaacaauucaacagacacuguagacacaguacuagaaaagaauguaacaguaacacacucuguugaccuucuagaagacaagcauaacgggaaacuaugcaaacuaagagggguagccccauugcauuuggguaaauguaacauugcuggcuggauccugggaaauccagagugugaaucacucuccacagcaagcucaugguccuacauuguggaaacaucuaguucagacaauggaacguguuacccaggagauuucaucgauuaugaggagcuaagagagcaauugagcucagugucaucauuugaaagguuugaaauauuccccaagacaaguucauggcccaaucaugacucgaacaaagguguaacggcagcauguccucaugcuggagaaaaaagcuucuacaaaaauuuaauauggcuaguuaaaaaaggaaauucauacccaaagcucaacaaauccuacauuaaugauaaagggaaagaaguccucgugcuauggggcauucaccauccaucuacuaguacugaccaacaaagucucuaucagaaugcagaugcauauguuuuuguggggacaucaagauacagcaagaaguuuaagccggaaauagcaauaagacccaaagugagggaucaagaagggagaaugaacuauuacuggacacuaguagagccgggagacaaaauaacauucgaagcaacuggaaaucuagugguaccgagauaugcauucgcaauggaaagaaaugcuggaucugguauuaucauuucagauacaccaauccacgauugcaauacaacuugucagacacccaagggggcuauaaacaccagccucccauuucagaauauacauccgaucacaauuggaaaguguccaaaauauguaaaaagcacaaaauugagacuggccacaggauugaggaaugucccgucuauucaaucuagaggccuauuuggggccauugccgguuucauugaagggggguggacaggaaugguagauggaugguacgguuaucaccaucaaaaugagcaggggucaggauaugcagccgaccugaagagcacacagaaugccauugacgagauuacuaacaaaguaaauucuguuauugaaaagaugaauacacaguucacagcaguaggcaaagaguucaaccaccuggaaaaaagaauagagaauuuaaauaaaaaaguugaugaugguuuccuggacauuuggacuuacaaugccgaacuguugguucuauuggaaaaugaaagaacuuuggacuaccacgauucaaaugugaagaacuuauaugaaaagguaaaaagccaguuaaaaaacaaugccaaggaaauuggaaacggcugcuuugaauuuuaccacaaaugcgauaacacgugcauggaaagugucaaaaaugggacuuaugacuacccaaaauacucagaggaagcaaaauuaaacagagaaaaaauagaugggguaaagcuggaaucaacaaggauuuaccagauuuuggcgaucuauucaacugucgccaguucauugguacugguagucucccugggggcaaucaguuucuggaugugcucuaaugggucucuacaguguagaauauguauuuaa

SEQ ID NO: 41850 - RNA, 1701 nt, Artificial Sequence
  derived and/or modified CDS sequence (wt) from hemagglutinin__InfluenzaA__AGE89277
augaaggcaauacuaauaguucugcuauauacauuugcaaccgcaaaugcagacacauuauguauagguuaucaugcgaacaauucaacagacacuguagacacaguacuagaaaagaauguaacaguaacacacucuguugaccuucuagaagacaagcauaacgggaaacuaugcaaacuaagagggguagccccauugcauuuggguaaauguaacauugcuggcuggauccugggaaauccagagugugaaucacucuccacagcaagcucaugguccuacauuguggaaacaucuaguucagacaauggaacguguuacccaggagauuucaucgauuaugaggagcuaagagagcaauugaacucagugucaucauuugaaagguuugaaauauuccccaagacaaguucauggcccaaucaugacucgaacaaagguguaacggcagcauguccucaugcuggagaaaaaagcuucuacaaaaauuuaauauggcuaguuaaaaaaggaaauucauacccaaagcucaacaaauccuacauuaaugauaaagggaaagaaguccucgugcuauggggcauucaccauccaucuacuaguacugaccaacaaagucucuaucagaaugcagaugcauauguuuuuguggggacaucaagauacagcaagaaguuuaagccggaaauagcaauaagacccaaagugagggaucaagaagggagaaugaacuauuacuggacacuaguagagccgggagacaaaauaacauucgaagcaacuggaaaucuagugguaccgagauaugcauucgcaauggaaagaaaugcuggaucugguauuaucauuucagauacaccaauccacgauugcaauacaacuugucagacacccaagggggcuauaaacaccagccucccauuucagaauauacauccgaucacaauuggaaaguguccaaaauauguaaaaagcacaaaauugagacuggccacaggauugaggaaugucccgucuauucaaucuagaggccuauuuggggccauugccgguuucauugaagggggguggacaggaaugguagauggaugguacgguuaucaccaucaaaaugagcaggggucaggauaugcagccgaccugaagagcacacagaaugccauugacgagauuacuaacaaaguaaauucuguuauugaaaagaugaauacacaguucacagcaguaggcaaagaguucaaccaccuggaaaaaagaauagagaauuuaaauaaaaaaguugaugaugguuuccuggacauuuggacuuacaaugccgaacuguugguucuauuggaaaaugaaagaacuuuggacuaccacgauucaaaugugaagaacuuauaugaaaagguaaaaagccaguuaaaaaacaaugccaaggaaauuggaaacggcugcuuugaauuuuaccacaaaugcgauaacacgugcauggaaagugucaaaaaugggacuuaugacuacccaaaauacucagaggaagcaaaauuaaacagagaaaaaauagaugggguaaagcuggaaucaacaaggauuuaccagauuuuggcgaucuauucaacugucgccaguucauuaguacugguagucucccugggggcaaucaguuucuggaugugcucuaaugggucucuacaguguagaauauguauuuaa

SEQ ID NO: 41851 - RNA, 1701 nt, Artificial Sequence
  derived and/or modified CDS sequence (wt) from hemagglutinin__InfluenzaA__AGE89287
augaagacuaucauugcuuugagcuacauucuaugucugguuuucgcucaaaaacuuccuggaaaugacaacagcacggcaacgcugugccuugggcaccaugcagugccaaacggaacgauagugaaaacaaucacgaaugaccaaauugaaguuacuaaugcuacugagcugguucagaguuccucaacaggugaaauaugcaacaguccucaucagauccuugauggagaaaacugcacacuaauagaugcucuauugggagacccucagugugauggcuuccaaaacaagaaaugggaccuuuuuguugaacgaagcaaagcccacagcaacuguuacccuuaugaugugccggauuaugccucccuuaggucacuaguugccucauccggcacacuggaguuuaacaaugaaagcuucaauuggacuggagucacucaaaacggaacaagcucugcuugcauaaggagaucuaauaauaguuucuuuaguagauugaauugguugacccacuuaaacuucaaauacccagcauugaacgugacuaugccaaacaaugaacaauuugacaaauuauacauuugggggguucaccacccggguacggacaaggaccaaaucuuccuguaugcucaagcaucaggaagaaucacaguaucuaccaaaagaagccaacaagcuguacuuccgaauaucggaucuagacccagaguaaggaauaucccuagcagaguaagcaucuauuggacaauaguaaaaccgggagacauacuucugauuaacagcacagggaaucuaauugcuccuagggguuacuucaaaauacgaagugggaaaagcucaauaaugagaucagaugcacccauuggcaaaugcaauucuacaugcaucacuccaaauggaagcauucccaaugacaaaccauuccaaaauguaaacaggaucacauacggggccugucccagauauguuaagcaaaacacucugaaauuggcaacaggaaugagaaauguaccagagaaacaaacuagaggcauauuuggcgcaauagcggguuucauagaaaaugguugggagggaaugguggaugguugguacgguuucaggcaucaaaauucugagggaaggggacaagcagcagaucucaaaagcacucaagcagcaaucgaccaaaucaaugggaagcugaauagauugaucgggaaaaccaacgagaaauuccaucagauugaaaaagaauucucagaagucgaagggagaauucaggaccuugagaaauauguugaggacacuaaaauagaucucuggucauacaacgcggagcuucuuguugcccuggagaaccaacacacaauugaucuaacugacucagaaaugaacaaacuguuugaaaaaacaaagaagcaacugagggaaaaugcugaggauaugggcaaugguuguuucaaaauauaccacaaaugugacaaugccugcauaggaucaaucagaaauggaacuuaugaccacgauguguacagagaugaagcauuaaacaaccgauuccagaucaagggaguugagcugaagucaggguacaaagauuggauccuauggauuuccuuugccauaucauguuuuuugcuuuguguugcuuuguugggguucaucaugugggccugccaaaaaggcaacauuaggugcaacauuugcauuuga

SEQ ID NO: 41852 - RNA, 1701 nt, Artificial Sequence
  derived and/or modified CDS sequence (wt) from hemagglutinin__InfluenzaA__AGE89298
augaaggcaauacuaguaguucugcuauauacauuugcaaccgcaaaugcagacacauuauguauagguuaucaugcgaacaauucaacagacacuguagacacaguacuagaaaagaauguaacaguaacacacucuguuaaucuucuagaagacaagcauaacgggaaacuaugcaaacuaagagggguagccccauugcauuuggguaaauguaacauugcuggcuggauccuaggaaauccagagugugaaucacucuccacagcaagcucaugguccuacauuguggaaacaucuaguucagacaauggaacguguuacccaggagauuucaucgauuaugaggagcuaagagagcaauugagcucagugucaucauuugaaagguuugagauauuccccaaaacaaguucauggcccaaucaugacucgaacaaagguguaacggcagcauguccucaugcuggagcaaaaggcuucuacaaaaauuuaauauggcuaguuaaaaaaggaaauucauacccaaagcucagcaaauccuacauuaaugauaaagggaaagaaguccucgugcuauggggcauucaccauccaucuacuacugcugaccaacaaagucucuaucagaaugcagauacauauguuuuuguggggacaucaagauacagcaagaaguucaagccggaaauagcaauaagacccaaagugagggaucaagaagggagaaugaacuauuacuggacacuaguagagccgggagacaaaauaacauucgaagcaacuggaaaucuagugguaccgagauaugcauucgcaauggaaagaaaugcuggaucugguauuaucauuucagauacaccaguccacgauugcaauacaacuugucagacacccaagggugcuauaaacaccagccucccauuucagaauauacauccgaucacaauuggaaaauguccaaaauauguaaaaagcacaaaauugagacuggccacaggauugaggaaugucccgucuauucaaucuagaggccuauuuggggccauugccggcuucauugaagggggguggacagggaugguagauggaugguacgguuaucaccaucaaaaugagcaggggucaggauaugcagccgaccugaagagcacacagaaugccauugacaagauuaccaacaaaguaaauucuguuauugaaaagaugaauacacaguucacagcaguagguaaagaguucaaccaccuggaaaaaagaauagagaauuuaaauaaaaaaguugaugaugguuuccuggacauuuggacuuacaaugccgaacuguugguucuauuggaaaaugaaagaacuuuggacuaccacgauucaaaugugaagaacuuauaugaaaagguaagaaaccaguuaaaaaacaaugccaaggaaauuggaaauggcugcuuugaauuuuaccacaaaugcgauaacacgugcauggaaagugucaaaaaugggacuuaugacuacccaaaauacucagaggaagcaaaauuaaacagagaagaaauagaugggguaaagcuggaaucaacaaggauuuaccagauuuuggcgaucuauucaacugucgccaguucauugauacugguagucucccugggggcaaucaguuuuuggaugugcucuaaugggucucuacaguguagaauauguauuuaa

SEQ ID NO: 41853 - RNA, 1701 nt, Artificial Sequence; identical to SEQ ID NO: 40370
  derived and/or modified CDS sequence (wt) from hemagglutinin__InfluenzaA__AGE89308

SEQ ID NO: 41854 - RNA, 1701 nt, Artificial Sequence
  derived and/or modified CDS sequence (wt) from hemagglutinin__InfluenzaA__AGE89318
augaagacuaucauugcuuugagcuacauucuaugucugguuuucgcucaaaaacuuccuggaaaugacaacagcacggcaacgcugugccuugggcaccaugcaguaccaaacggaacgauagugaaaacaaucacgaaugaccaaauugaaguuacuaaugcuacugagcugguucagaguuccucagcaggugaaauaugcgacaguccucaucauauccuugauggagaaaacugcacacuaauagaugcucuauugggagacccucagugugauggcuuccaaaauaagaaaugggaccuuuuuguugaacgaagcagagccuacagcaacuguuacccuuaugaugugccggauuaugccucccuuaggucacuaguugccucauccggcacacuggaguuuaacaaugaaagcuucaauuggacuggagucacucaaaacggaacaagcucugcuugcauaaggagaucuaauaauaguuucuuuaguagauugaauugguugacccacuuaaacuucaaauacccagcauugaacgugacuaugccaaacaaugaacaauuugacaaauuguacauuugggggguucaccacccggguacggacaaggaccaaaucuuccuguaugcucaagcaucaggaagaaucacaguaucuaccaaaagaagccaacaagcuguaaucccgaauaucggaucuagacccagaguaaggaauaucccuagcagaauaagcaucuauuggacaauaguaaaaccgggagacauacuuuugauuaacagcacagggaaucuaauugcuccuagggguuacuucaaaauacgaagugggaaaagcucaauaaugagaucagaugcacccauuggcaaaugcaauucugaaugcaucacuccaaauggaagcauucccaaugacaaaccauuccaaaauguaaacaggaucacauacggggccugucccagauauguuaagcaaagcacucugaaauuggcaacaggaaugcgaaauguaccagagaaacaaacuagaggcauauuuggcgcaauagcggguuucauagaaaaugguugggagggaaugauggaugguugguacgguuucaggcaucaaaauucugaaggaagaggacaagcagcagaucucaaaagcacucaagcagcaaucgaucaaaucaauggaaagcugaauagauugaucgggaaaaccaacgagaaauuccaucagauugaaaaagaauucucagaagucgaagggagaauucaggaccuugagaaauauguugaggacacuaaaauagaucucuggucauacaacgcggagcuucuuguugcccuggagaaccaacauacaauugaucuaacugacucagaaaugaacaaacuguuugaaaaaacaaagaagcaacugagggaaaaugcugaggauaugggcaaugguuguuucaaaauauaccacaaaugugacaaugccugcauaggaucaaucagaaauggaacuuaugaccacgauguauacagagaugaagcauuaaacaaccgguuccagaucaagggaguugagcugaagucaggguacaaagauuggauccuauggauuuccuuugccauaucauguuuuuugcuuuguguugcuuuguugggguucaucaugugggccugccaaaaaggcaacauuaggugcaacauuugcauuuga

SEQ ID NO: 41855 - RNA, 1701 nt, Artificial Sequence
  derived and/or modified CDS sequence (wt) from hemagglutinin__InfluenzaA__AGE89329
augaagacuaucauugcuuugagcuacauucuaugucugguuuucgcucaaaaacuuccuggaaaugacgacagcacggcaacgcugugccuugggcaccaugcagugccaaacggaacgauagugaaaacaaucacgaaugaccaaauugaaguuacuaaugcuacugagcugguucagaguuccucaacaggugaaauaugcaacaguccucaucagauccuugauggagaaaacugcacacuaauagaugcucuauugggagacccucagugugauggcuuccaaaacaagaaaugggaccuuuuuguugaacgaagcaaagcccacagcaacuguuacccuuaugaugugccggauuaugccucccuuaggucacuaguugccucauccggcacacuggaguuuaacaaugagagcuucaauuggacuggagucacucaaaacggaacaagcucugcuugcauaaggagaucuaauaauaguuucuuuaguagauugaauugguugacccacuuaaacuucaaauacccagcuuugaacgugacuaugccaaacaaugaacaauuugacaaauuguacauuugggggguucaccacccggguacggacaaggaccaaaucuuccuguaugcucaagcaucaggaagaaucacaguaucuaccaaaagaagccaacaagcuguaauuccgaauaucggaucuagacccagaguaaggaauaucccuagcagaguaagcaucuauuggacaauaguaaaaccgggagacauacuuuugauuaacagcacagggaaucuaauugcuccuagggguuacuucaaaauacgaagugggaaaagcucaauaaugagaucagaugcacccauuggcaaaugcaauucugcaugcaucacuccaaauggaagcauucccaaugacaaaccauuccaaaauguaaacaggaucacauacggggccugucccagauauguuaagcaaaacacucugaaauuggcaacaggaaugagaaauguaccagagaaacaaacuagaggcauauuuggcgcaauagcggguuucauagaaaaugguugggagggaaugguggaugguugguacgguuucaggcaucaaaauucugagggaaggggacaagcagcagaucucaaaagcacucaagcagcaaucgaucaaaucaaugggaagcugaauagauugaucgggaaaaccaacgagaaauuccaucagauugaaaaagaauucucagaagucgaagggagaauucaggaccuugagaaauauguugaggacacuaaaauagaucucuggucauacaacgcggagcuucuuguugcccuggagaaccaacacacaauugaucuaacugacucagaaaugaacaaacuguuugaaaaaacaaagaaacaacugagggaaaaugcugaggauaugggcaaugguuguuucaaaauauaccacaaaugugacaaugccugcauaggaucaaucagaaauggaacuuaugaccacgauguguacagagaugaagcauuaaacaaccgauuccagaucaagggaguugagcugaagucaggguacaaagauuggauccuauggauuuccuuugccauaucauguuuuuugcuuuguguugcuuuguugggguucaucaugugggccugccaaaaaggcaacauuaggugcaacauuugcauuuga

SEQ ID NO: 41856 - RNA, 1701 nt, Artificial Sequence; identical to SEQ ID NO: 39039
  derived and/or modified CDS sequence (wt) from hemagglutinin__InfluenzaA__AGE89340

SEQ ID NO: 41857 - RNA, 1701 nt, Artificial Sequence
  derived and/or modified CDS sequence (wt) from hemagglutinin__InfluenzaA__AGE89350
augaagaccaucauugcuuugagcuacauucuaugucugguuuucgcucaaaaacuuccuggaaaugacaacagcacggcaacgcugugccuugggcaccaugcaguaccaaacggaacgauagugaaaacaaucacgaaugaccaaauugaaguuacuaaugcuacugagcugguucagaauuccucagcaggugaaauaugcgacaguccucaucauauccuugauggagaaaacugcacacuaauagaugcucuauugggagacccucagugugauggcuuccaaaauaagaaaugggaccuuuuuguugaacgaagcagagccuacagcaacuguuacccuuaugaugugccggauuaugccucccuuaggucacuaguugccucauccggcacacuggaguuuaacaaugaaagcuucaauuggacuggagucacucaaaacggaacaagcucugcuugcauaaggagaucuaauaauaguuucuuuaguagauugaauugguugacccacuuaaacuucaaauacccagcauugaacgugacuaugccaaacaaugaacaauuugacaaauuguacauuugggggguucaccacccggguacggacaaggaccaaaucuuccuguaugcucaagcaucaggaagaaucacaguaucuaccaaaagaagccaacaagcuguaaucccgaauaucggaucuagacccagaguaaggaauaucccuagcagaauaagcaucuauuggacaauaguaaaaccgggagacauacuuuugauuaacagcacagggaaucuaauugcuccuagggguuacuucaaaauacgaagugggaaaagcucaauaaugagaucagaugcacccauuggcaaaugcaauucugaaugcaucacuccaaauggaagcauucccaaugacaaaccauuccaaaauguaaacaggaucacauacggggccugucccagauauguuaagcaaagcacucugaaauuggcaacaggaaugcgaaauguaccagagaaacaaacuagaggcauauuuggcgcaauagcggguuucauagaaaaugguugggagggaaugauggaugguugguacgguuucaggcaucaaaauucugagggaagaggacaagcagcagaucucaaaagcacucaagcagcaaucgaucaaaucaauggaaagcugaauagauugaucgggaaaaccaacgagaaauuccaucagauugaaaaagaauucucagaagucgaagggagaauucaggaccuugagaaauauguugaggacacuaaaauagaucucuggucauacaacgcggagcuucuuguugcccuggagaaccaacauacaauugaucuaacugacucagaaaugaacaaacuguuugaaaaaacaaagaagcaacugagggaaaaugcugaggauaugggcaaugguuguuucaaaauauaccacaaaugugacaaugccugcauaggaucaaucagaaauggaacuuaugaccacgauguauacagagaugaagcauuaaacaaccgguuccagaucaagggaguugagcugaagucaggguacaaagauuggauccuauggauuuccuuugccauaucauguuuuuugcuuuguguugcuuuguugggguucaucaugugggccugccaaaaaggcaacauuaggugcaacauuugcauuuga

SEQ ID NO: 41858 - RNA, 1701 nt, Artificial Sequence
  derived and/or modified CDS sequence (wt) from hemagglutinin__InfluenzaA__AGE89361
augaaggcaauacuaguaguucugcuauauacauuugcaaccgcaaaugcagacacauuauguauagguuaucaugcgaacaauucaacagacacuguagacacaguacuagaaaagaauguaacaguaacacacucuguuaaccuucuagaagacaagcauaacgggaaacuaugcaaacuaagagggguagccccauugcauuuggguaaauguaacauugcuggcuggauccugggaaauccagagugugaaucacucuccacagcaagcucaugguccuacauuguggaaacaucuaguucagacaauggaacguguuacccaggagauuucaucaauuaugaggagcuaagagagcaauugagcucagugucaucauuugaaagguuugagauauuccccaagacaaguucauggcccaaucaugacucgaacaaagguguaacggcagcauguccucaugcuggagcaaaaagcuucuacaaaaauuuaauauggcuaguuaaaaaaggaaauucauacccaaagcucagcaaauccuacauuaaugauaaagggaaagaaguccucgugcuauggggcauucaccauccaucuacuacuacugaccaacaaagucucuaucagaaugcagaugcauauguuuuuguggggacaucaagauacagcaagaaguucaagccggaaauagcaauaagacccaaagugagggaucaagaagggagaaugaacuauuacuggacacuaguagagccgggagacaaaauaacauuugaagcaacuggaaaucuagugguaccgagauaugcauucgcaauggaaagaaaugcuggaucugguauuaucauuucagauacaccaguccacgauugcaauacaacuugucagacacccaagggugcuauaaacaccagccucccauuucagaauauacauccgaucacaauuggaaaauguccaaaauauguaaaaagcacaaaauugagacuggccacaggauugaggaaugucccgucuauucaaucuagaggccuauuuggggccauugccggcuucauugaagggggguggacagggaugguagauggaugguacgguuaucaccaucaaaaugagcaggggucaggauaugcagccgaccugaagagcacacagaaugccauugacaagauuacuaacaaaguaaauucuguuauugaaaagaugaauacacaguucacagcaguagguaaagaguucaaccaccuggaaaaaagaauagagaauuuaaauaaaaaaguugaugaugguuuccuggacauuuggacuuacaaugccgaacuguugguucuauuggaaaaugaaagaacuuuggacuaccacgauucaaaugugaagaacuuauaugaaaagguaagaaaccaguuaaaaaacaaugccaaggaaauuggaaacggcugcuuugaauuuuaccacaaaugcgauaacacgugcauggaaagugucaaaaaugggacuuaugacuacccaaaauacucagaggaagcaaaauuaaacagagaagaaauagaugggguaaagcuggaaucaacaaggauuuaccagauuuuggcgaucuauucaacugucgccaguucauugguacugguagucucccugggggcaaucagcuucuggaugugcucuaaugggucucuacaguguagaauauguauuuaa

SEQ ID NO: 41859 - RNA, 1701 nt, Artificial Sequence
  derived and/or modified CDS sequence (wt) from hemagglutinin__InfluenzaA__AGE89371
augaagaccaucauugcuuugagcuacauucuaugucugguuuucgcucaaaaacuuccuggaaaugauaacagcacagcaacgcugugccuugggcaccaugcaguaccaaacggaacgauagugaaaacaaucacgaaugaccaaauugaaguuacuaaugcuacugagcugguucagaguuccucagcaggugaaauaugcgacaguccucaucauauccuugauggagaaaacugcacacuaauagaugcucuauugggagacccucagugugauggcuuccaaaauaagaaaugggaccuuuuuguugaacgaagcagagccuacagcaacuguuacccuuaugaugugccggauuaugccucccuuaggucacuaguugccucauccggcacacuggaguuuaacaaugaaagcuucaauuggacuggagucacucaaaacggaacaagcucugcuugcauaaggagaucuaauaauaguuucuuuaguagauugaauugguugacccacuuaaacuucaaauacccagcauugaacgugacuaugccaaacaaugaacaauuugacaaauuguacauuugggggguucaccacccggguacggacaaggaccaaaucuuccuguaugcucaagcaucaggaagaaucacaguaucuaccaaaagaagccaacaagcuguaaucccgaauaucggaucuagacccagaguaaggaauaucccuagcagaauaagcaucuauuggacaauaguaaaaccgggagacauacuuuugauuaacagcacagggaaucuaauugcuccuagggguuacuucaaaauacgaagugggaaaagcucaauaaugagaucagaugcacccauuggcaaaugcaauucugaaugcaucacuccaaauggaagcauucccaaugacaaaccauuccaaaauguaaacaggaucacauacggggccugucccagauauguuaagcaaagcacucugaaauuggcaacaggaaugcgaaauguaccagagaaacaaacuagaggcauauuuggcgcaauagcggguuucauagaaaaugguugggagggaaugauggaugguugguacgguuucaggcaucaaaauucugagggaagaggacaagcagcagaucucaaaagcacucaagcagcaaucgaucaaaucaauggaaagcugaauagauugaucgggaaaaccaacgagaaauuccaucagauugaaaaagaauucucagaagucgaagggagaauucaggaccuugaaaaauauguugaggacacuaaaauagaucucuggucauacaacgcggagcuucuuguugcccuggagaaccaacauacaauugaucuaacugacucagaaaugaacaaacuguuugaaaaaacaaagaagcaacugagggaaaaugcugaggauaugggcaaugguuguuucaaaauauaccacaaaugugacaaugccugcauaggaucaaucagaaauggaacuuaugaccacgauguauacagagaugaagcauuaaacaaccgguuccagaucaagggaguugagcugaagucaggguacaaagauuggauccuauggauuuccuuugccauaucauguuuuuugcuuuguguugcuuuguugggguucaucaugugggccugccaaaaaggcaacauuaggugcaacauuugcauuuga

SEQ ID NO: 41860 - RNA, 1701 nt, Artificial Sequence
  derived and/or modified CDS sequence (wt) from hemagglutinin__InfluenzaA__AGE89382
augaaggcaauacuaguaguucugcuauauacauuugcaaccgcaaaugcagacacauuauguauagguuaucaugcgaacaauucaacagacacuguagacacaguacuagaaaagaauguaacaguaacacacucuguuaaccuucuagaagacaagcauaacgggaaacuaugcaaacugagagggguagccccauugcauuuggguaaauguaacauugcuggcuggauccugggaaauccagagugugaaucacucuccacagcaagcucaugguccuacauuguggaaacaucuaguucagacaauggaacguguuacccaggagauuucaucaauuaugaagagcuaagagagcaauugagcucagugucaucauuugaaagguuugagauauuccccaagacaaguucauggcccaaucaugacucgaacaaaggugugacggcagcauguccucaugcuggagcaaaaagcuucuacaaaaauuuaauauggcuaguuaaaaaaggaaauucauacccaaagcucagcaaauccuacauuaacgauaaagggaaagaaguccucgugcuauggggcauucaccauccaucuacuagugcugaccaacaaagucucuaucagaaugcagaugcauauguuuuuguggggacaucaaaauacagcaagaaguucaagccggaaauagcaguaagacccaaagugagggaucaagaagggagaaugaacuauuacuggacacuaguaaagccgggagacaaaauaacauucgaagcaacuggaaaucuauugguaccgagauaugcauucgcaauggaaagaaaugcuggaucugguauuaucauuucagauacaccaguccacgauugcaauacaacuugucagacacccaagggugcuauaaacaccagccucccauuucagaauauacauccgaucacaauuggaaaauguccaaaauaugugaaaagcacaaaauugagacuggccacaggauugaggaaugucccgucuauucaaucuagaggccuauuuggggccauugccgguuucauugaagggggguggacagggaugguagauggaugguacgguuaucaccaucaaaaugagcaggggucaggauaugcagccgaccugaagagcacacagaaugccauugacaagauuacuaacaaaguaaauucuguuauugaaaagaugaauacacaguucacagcaguagguaaagaguucaaccaccuggaaaaaagaauagagaauuuaaauaaaaaaguugaugaugguuuccuggacauuuggacuuacaaugccgaacuguugguucuauuggagaaugaaagaacuuuggacuaccacgauucaaaugugaaaaacuuauaugaaaagguaagaagccaguuaaaaaacaaugccaaggaaauuggaaacggcugcuuugaauuuuaccacaaaugcgauaacacgugcauggaaagugucaaaaaugggacuuaugacuacccaaaauacucagaggaagcaaaauuaaacagagaagaaauagaugggguaaagcuggaaucaacaaggauuuaccagauuuuggcgaucuauucaacugucgccaguucauugguacugguagucucccugggggcaaucaguuucuggaugugcucuaaugggucucuacaguguagaauauguauuuaa

SEQ ID NO: 41861 - RNA, 1701 nt, Artificial Sequence
  derived and/or modified CDS sequence (wt) from hemagglutinin__InfluenzaA__AGE89392
augaagaccaucauugcuuugagcuacauucuaugucugguuuucgcucaagaacuuccuggaaaugacaacagcacggcaacgcugugccuugggcaccaugcagugccaaacggaacgauagugaaaacaaucacgaaugaccaaauugaaguuacuaaugcuacugagcugguucagaguuccucaacaggugaaauaugcaacaguccucaucagauccuugauggagaaaacugcacacuaauagaugcucuauugggagacccucagugugauggcuuccaaaacaagaaaugggaccuuuuuguugaacgaagcaaagcccacagcaacuguuacccuuaugaugugccggauuaugccucccuuaggucacuaguugccucauccggcacacuggaguuuaacaaugaaagcuucaauuggacuggagucacucaaaacggaacaagcucugcuugcauaaggagaucuaauaauaguuucuuuaguagauugaauugguugacccacuuaaacuucaaauacccagcauugaacgugacuaugccaaacaaugaacaauuugacaaauuguacauuugggggguucaccacccggguacggacaaggaccaaaucuuccuguaugcucaagcaucaggaagaaucacaguaucuaccaaaagaagccaacaagcuguaauuccgaauaucggaucuagacccagaguaaggaauaucccuagcagaguaagcaucuauuggacaauaguaaaaccgggagacauacuuuugauuaacagcacagggaaucuaauugcuccuagggguuacuucaaaauacgaagugggaaaagcucaauaaugagaucagaugcacccauuggcaaaugcaauucugcaugcaucacuccaaauggaagcauucccaaugacaaaccauuccaaaauguaaacaggaucacauacggggccugucccagauaugucaagcaaaacacucugaaauuggcaacaggaaugagaaauguaccagagaaacaaacuagaggcauauuuggcgcaauagcggguuucauagaaaaugguugggagggaaugguggaugguugguacgguuucaggcaucaaaauucugagggaaggggacaggcagcagaucucaaaagcacucaagcagcaaucgaucaaaucaaugggaagcugaauagauugaucgggaaaaccaacgagaaauuccaucagauugaaaaagaauucucagaagucgaagggagaauucaggaccuugagaaauauguugaggacacuaaaauagaucucuggucauacaacgcggagcuucuuguugcccuggagaaccaacacacaauugaucuaacugacucagaaaugaacaaacuguuugaaaaaacaaagaagcaacugagggaaaaugcugaggauaugggcaaugguuguuucaaaauauaccacaaaugugacaaugccugcauaggaucaaucagaaauggaacuuaugaucacgauguguacagagaugaagcauuaaacaaccgauuccagaucaagggaguugagcugaagucaggguacaaagauuggauccuauggauuuccuuugccauaucauguuuuuugcuuuguguugcuuuguugggguucaucaugugggccugccaaaaaggcaacauuaggugcaacauuugcauuuga

SEQ ID NO: 41862 - RNA, 1701 nt, Artificial Sequence; identical to SEQ ID NO: 41849
  derived and/or modified CDS sequence (wt) from hemagglutinin__InfluenzaA__AGE89422

SEQ ID NO: 41863 - RNA, 1701 nt, Artificial Sequence
  derived and/or modified CDS sequence (wt) from hemagglutinin__InfluenzaA__AGE89719
augaagaccaucauugcuuugagcuacauucuaugucugguuuucgcucaaaaacuuccuggaaaugacaacagcacggcaacgcugugccuugggcaccaugcagugccaaacggaacgauagugaaaacaaucacgaaugaccaaauugaaguuacuaaugcuacugagcugguucagaguuccucaacaggugaaauaugcaacaguccucaucagauccuugauggagaaaacugcacacuaauagaugcucuauugggagacccucagugugauggcuuccaaaacaagaaaugggaccuuuuuguugaacgaagcaaagcccacagcaacuguuacccuuaugaugugccggauuaugccucccuuaggucacuaguugccucauccggcacacuggaguuuaacaaugaaagcuucaauuggacuggagucacucaaaacggaacaagcucugcuugcauaaggagaucuaauaauaguuucuuuaguagauugaauugguugacucacuuaaacuucaaauacccagcauugaacgugacuaugccaaacaaugaacaauuugacaaauuguacauuugggggguucaccacccggguacggacaaggaccaaaccuuccuguaugcucaagcaucaggaagaaucacaguaucuaccaaaagaagccaacaagcuguaauuccgaauaucggaucuagacccagaguaaggaauaucccuagcagaguaagcaucuauuggacaauaguaaaaccgggagacauacuuuugauuaacagcacagggaaucuaauugcuccuagggguuacuucaaaauacgaagugggaaaagcucaauaaugagaucagaugcacccauuggcaaaugcaauucugcaugcaucacuccaaauggaagcauucccaaugacaaaccauuccaaaauguaaacaggaucacauacggggccugucccagauauguuaagcaaaacacucugaaauuggcaacaggaaugagaaauguaccagagaaacaaacuagaggcauauuuggcgcaauagcggguuucauagaaaaugguugggagggaaugguggaugguugguacgguuucaggcaucaaaauucugagggaaggggacaagcagcagaucucaaaagcacucaagcagcaaucgaucaaaucaaugggaagcugaauagauugaucgggaaaaccaacgagaaauuccaucagauugaaaaagaauucucagaagucgaagggagaauucaggaccuugagaaauauguugaggacacuaaaauagaucucuggucauacaacgcggagcuucuuguugcccuggagaaccaacacacaauugaucuaacugacucagaaaugaacaaacuguuugaaaaaacaaagaagcaacugagggaaaaugcugaggauaugggcaaugguuguuucaaaauauaccacaaaugugacaaugccugcauaggaucaaucagaaauggaacuuaugaccacgauguguacagagaugaagcauuaaacaaccgauuccagaucaagggaguugagcugaagucaggguacaaagauuggauccuauggauuuccuuugccauaucauguuuuuugcuuuguguugcuuuguugggguucaucaugugggccugccaaaaaggcaacauuaggugcaacauuugcauuuga

SEQ ID NO: 41864 - RNA, 1701 nt, Artificial Sequence
  derived and/or modified CDS sequence (wt) from hemagglutinin__InfluenzaA__AGE89730
augaaggcaauacuaguaguucugcuauauacauuugcaaccgcaaaugcagacacauuauguauagguuaucaugcgaacaauucaacagacacuguagacacaguacuagaaaagaauguaacaguaacacacucuguuaaccuuuuagaagacaagcauaacgggaaacuaugcaaacugagagggguagccccauugcauuuggguaaauguaacauugcuggcuggauccugggaaauccagagugugaaucacucuccacagcaagcucaugguccuacauuguggaaacaucuaguucagacaauggaacguguuacccaggagauuucaucaauuaugaagagcuaagagagcaauugagcucagugucaucauuugaaagguuugagauauuccccaagacaaguucauggcccaaucaugacucgaacaaagguguaacggcagcauguccucaugcuggagcaaaaagcuucuacaaaaauuuaauauggcuaguuaaaaaaggaaauucauacccaaagcucagcaaauccuacauuaacgauaaagggaaagaaguccucgugcuauggggcauucaccauccaucuacuagugcugaccaacaaagucucuaucagaaugcagaugcauauguuuuuguggggacaucaaaauacagcaagaaguucaagccggaaauagcaguaagacccaaagugagggaucaagaagggagaaugaacuauuacuggacacuaguagagccgggagacaaaauaacauucgaagcaacuggaaaucuauugguaccgagauaugcauucgcaauggaaagaaaugcuggaucugguauuaucauuucagauacaccaguccacgauugcaauacaacuugucagacacccaagggugcuauaaacaccagccucccauuucagaauauacauccgaucacaauuggaaaauguccaaaauauguaaaaagcacaaaauugagacuggccacaggauugaggaaugucccgucuauucaaucuagaggccuauuuggggccauugccgguuucauugaagggggguggacagggaugguagauggaugguacgguuaucaccaucaaaaugggcaggggucaggauaugcagccgaccugaagagcacacagaaugccauugacaagauuacuaacaaaguaaauucuguuauugaaaagaugaauacacaguucacagcaguagguaaggaguucaaccaccuggaaaaaagaauagagaauuuaaauaaaaaaguugaugaugguuuccuggacauuuggacuuacaaugccgaacuguugguucuauuggaaaaugaaagaacuuuggacuaccacgauucaaaugugaaaaacuuauaugaaaagguaagaagccaguuaaaaaacaaugccaaggaaauuggaaacggcugcuuugaauuuuaccacaaaugcgauaacacgugcauggaaagugucaaaaaugggacuuaugacuacccaaaauacucagaggaagcaaaauuaaacagagaagaaauagaugggguaaagcuggaaucaacaaggauuuaccagauuuuggcgaucuauucaacugucgccaguucauugguacugguagucucccugggggcaaucaguuucuggaugugcucuaaugggucucuacaguguagaauauguauuuaa

SEQ ID NO: 41865 - RNA, 1701 nt, Artificial Sequence; identical to SEQ ID NO: 40384
  derived and/or modified CDS sequence (wt) from hemagglutinin__InfluenzaA__AGE89740

SEQ ID NO: 41866 - RNA, 1701 nt, Artificial Sequence
  derived and/or modified CDS sequence (wt) from hemagglutinin__InfluenzaA__AGE89751
augaagaccaucauugcuuugagcuacauucuaugucugguuuucgcucaaaaacuuccuggaaaugacaacagcacggcaacgcugugccuugggcaccaugcaguaccaaacggaacgauagugaaaacaaucacgaaugaccaaauugaaguuacuaaugcuacugagcugguucagaguuccucagcaggugaaauaugcgacaguccucaucauauccuugauggagaaaacugcacacuaauagaugcucuauugggagacccucagugugauggcuuccaaaauaagaaaugggaccuuuuuguugaacgaagcagagccuacagcaacuguuacccuuaugaugugccggauuaugccucccuuaggucacuaguugccucauccggcacacuggaguuuaacaaugaaagcuucaauuggacuggagucacucaaaacggaacaagcucugcuugcauaaggagaucuaauaauaguuucuuuaguagauugaauugguugacccacuuaaacuucaaauacccagcauugaacgugacuaugccaaacaaugaacaauuugacaaauuguacauuugggggguucaccacccggguacggacaaggaccaaaucuuccuguaugcucaagcaucaggaagaaucacaguaucuaccaaaagaagccaacaagcuguaaucccgaauaucggaucuagacccagaguaaggaauaucccuagcagaauaagcaucuauuggacaauaguaaaaccgggagacauacuuuugauuaacagcacagggaaucuaauugcuccuagggguuacuucaaaauacgaagugggaaaagcucaauaaugagaucagaugcacccauuggcaaaugcaauucugaaugcaucacuccaaauggaagcauucccaaugacaaaccauuccaaaauguaaacaggaucacauacggggccugucccagauauguuaagcaaagcacucugaaauuggcaacaggaaugcgaaauguaccagagaaacaaacuagaggcauauuuggcgcaauagcggguuucauagaaaaugguugggagggaaugauggaugguugguacgguuucaggcaucaaaauucugagggaagaggacaagcagcagaucucaaaagcacucaagcagcaaucgaucaaaucaauggaaagcugaauagauugaucgggaaaaccaacgagaaauuccaucagauugaaaaagaauucucagaagucgaagggagaauucaggaccuugagaaauauguugaggacacuaaaauagaucucuggucauacaacgcggagcuucuuguugccauggagaaccaacauacaauugaucuaacugacucagaaaugaacaaacuguuugaaaaaacaaagaagcaacugagggaaaaugcugaggauaugggcaaugguuguuucaaaauauaccacaaaugugacaaugccugcauaggaucaaucagaaauggaacuuaugaccacgauguauacagagaugaagcauuaagcaaccguuuccagaucaagggaguugagcuaaagucaggguacaaagauuggauccuauggauuuccuuugccauaucauguuuuuugcuuuguguugcuuuguugggguucaucaugugggccugccaaaaaggcaacauuaggugcaacauuugcauuuga

SEQ ID NO: 41867 - RNA, 1701 nt, Artificial Sequence; identical to SEQ ID NO: 40366
  derived and/or modified CDS sequence (wt) from hemagglutinin__InfluenzaA__AGE89762

SEQ ID NO: 41868 - RNA, 1701 nt, Artificial Sequence
  derived and/or modified CDS sequence (wt) from hemagglutinin__InfluenzaA__AGF44891
augaaggcaauacuaguaguucugcuauacacauuugcaaccgcaaaugcagacacauuauguauagguuaucaugcgaacaauucaacagacacuguagacacaguacuagaaaagaauguaacaguaacacacucuguuaaccuucuagaagacaagcauaacgggaaacuaugcaaacuaagagggguagccccauugcauuuggguaaauguaacauugcuggcuggauccugggaaauccagagugugaaucacucuccacagcaaguucaugguccuacauuguggaaacaucuaguucagacaaugggacguguuacccaggagauuucaucaauuaugaggagcuaagagagcaauugagcucagugucaucauuugaaagguuugagauauuccccaagacaaguucauggcccaaucaugacucgaacaaagguguaacggcagcauguccucaugcuggagcaaaaagcuucuacaaaaauuuaauauggcuaguuaaaaaaggaaauucauacccaaagcucagcaaauccuacauuaaugauaaagggaaagaaguccucgugcuguggggcauucaccauccaucuacuacugcugaccaacaaagucucuaucagaaugcagaugcauauguuuuuguggggacaucaagauacagcaagaaguucaagccggaaauagcaauaagacccaaagugagggaucaagaagggagaaugaacuauuacuggacacuaauagagccgggagacaaaauaacauucgaagcaacuggaaaucuagugguaccgagauaugcauucgcaauggaaagaaaugcuggaucugguauuaucauuucagauacaccaguccacgauugcaauacaacuugccagacacccgagggugcuauaaacaccagccucccauuucagaauauacauccgaucacaauuggaaaauguccaaaguauguaaaaagcacaaaauugagacuggccacaggauugaggaaugucccgucuauucaaucuagaggccuauucggggccauugccggcuucauugaagggggguggacagggaugguagauggaugguacgguuaucaccaucaaaaugagcaggggucaggauaugcagccgaccugaagagcacacaaaaugccguugacaagauuacuaacaaaguaaauucuguuauugaaaagaugaauacacaguucacagcaguggguaaagaguucaaccaccuggaaaaaagaauagagaauuuaaauaaaaaaguugaugaugguuuccuggacauuuggacuuacaaugccgaacuguugguucuauuggaaaaugaaagaacuuuggacuaccacgauucaaaugugaagaacuuguaugaaaagguaagaaaccaguuaaaaaacaaugccaaggaaauuggaaacggcugcuuugaauuuuaccacaaaugcgauaacacgugcauggaaagugucaaaaaugggacuuaugacuacccaaaauacucagaggaagcaaaauuaaacagagaaaaaauagaugggguaaagcuggaaucaacaaggauuuaccagauuuuggcgaucuauucaacugucgccaguucauugguacugguagucucccugggggcaaucaguuucuggaugugcucuaaugggucucuacaguguagaauauguauuuaa

SEQ ID NO: 41869 - RNA, 1701 nt, Artificial Sequence; identical to SEQ ID NO: 41868
  derived and/or modified CDS sequence (wt) from hemagglutinin__InfluenzaA__AGF44892

SEQ ID NO: 41870 - RNA, 1701 nt, Artificial Sequence
  derived and/or modified CDS sequence (wt) from hemagglutinin__InfluenzaA__AGF44895
augaagacuaucauugcuuugagcuacauucuaugucugguuuucgcucaaaaacuuccuggaaaugacaauagcacggcaacgcugugccuugggcaccaugcaguaccaaacggaacgauagugaaaacaaucacgaaugaccgaauugaaguuacuaaugcuacugagcugguucagaauuccucaauaggugaaauaugcgacaguccucaucagauucuugauggagaaaacugcacacuaauagaugcucuauugggagacccucagugugauggcuuucaaaauaagaaaugggaccuuuuuguugaacgaagcaaagccuacagcaacuguuacccuuaugaugugccggauuaugccucccuuaggucacuaguugccucauccggcacacuggaguuuaacaaugaaagcuucaauuggacuggagucacucaaaacggaacaaguucugcuugcauaaggagaucuaauaguaguuucuuuaguagauuaaauugguugacccacuuaaacuucaaauacccagcauugaacgugacuaugccaaacaaugaacaauuugacaaauuguacauuugggggguucaccacccagguacggacaaggaccaaaucuuccuguaugcucaaucaucaggaagaaucacaguaucuaccaaaagaagccaacaagcuguaaucccaaauaucggaucuagacccagaauaaggaauaucccuagcagaauaagcaucuauuggacaauaguaaaaccgggagacauacuuuugauuaacagcacagggaaucuaauugcuccuagggguuacuucaaaauacgaagugggaaaagcucaauaaugagaucagaugcacccauuggcaaaugcaagucugaaugcaucacuccaaauggaagcauucccaaugacaaaccauuccaaaauguaaacaggaucacauacggggccugucccagauauguuaagcaaagcacucugaaauuggcaacaggaaugcgaaauguaccagagaaacaaacuagaggcauauuuggcgcaauagcagguuucauagaaaaugguugggagggaaugguggaugguugguacgguuucaggcaucaaaauucugagggaagaggacaagcagcagaucucaaaagcacccaagcagcaaucgaucaaaucaaugggaagcugaaucgauugaucgggaaaaccaacgagaaauuccaucagauugaaaaagaauucucagaaguagaagggagaauucaggaccuugagaaauauguugaggacacuaaaauagaucucuggucauacaacgcggagcuucuuguugcccuggagaaccaacauacaauugaucuaacugacucagaaaugaacaaacuguuugaaaaaacaaagaagcaacugagggaaaaugcugaggauaugggcaaugguuguuucaaaauauaccacaaaugugacaaugccugcauaggaucaauaagaaauggaacuuaugaccacaauguguacagggaugaagcauuaaacaaccgguuccagaucaagggaguugagcugaagucaggguacaaagauuggauccuauggauuuccuuugccauaucauguuuuuugcuuuguguugcuuuguugggguucaucaugugggccugccaaaagggcaacauuaggugcaacauuugcauuuga

SEQ ID NO: 41871 - RNA, 1701 nt, Artificial Sequence
  derived and/or modified CDS sequence (wt) from hemagglutinin__InfluenzaA__AGF44896
augaagaccaucauugcuuugagcuacauucuuugucuaguuuucgcucaagaacuuccuggaaaugacgacagcacggcaacgcugugccuugggcaccaugcagugccaaacggaacgauagugaaaacaaucacgaaugaccaaauugaaguuacuaaugcuacugagcugguucagaguuccucaacaggugaaauaugcaacaguccucaucagauccuugauggagaaaacugcacacuaauagaugcucuauugggagacccucagugugauggcuuccaaaacaagaaaugggaccuuuuuguugaacgaagcaaagcccacagcaacuguuacccuuaugaugugccggauuaugccucccuuaggucacuaguugccucauccggcacacuggaguuuaacaaugaaagcuucaauuggacuggagucacucaaaacggaacaagcucugcuugcauaaggagaucuaauaauaguuucuuuaguagauugaauugguugacccacuuaaacuucaaauacccagcauugaacgugacuaugccaaacaaugaacaauuugacaaauuguacauuugggggguucaccacccggguacggacaaggaccaaaucuuccuguaugcucaagcaucaggaagaaucacaguaucuaccaaaagaagccaacaagcuguaauuccgaauaucggaucuagacccagaguaaggaauaucccuagcagaguaagcaucuauuggacaauaguaaaaccaggagacauacuuuugauuaacagcacagggaaucuaauugcuccuagggguuacuucaaaauacgaagugggaaaagcucaauaaugagaucagaugcacccauuggcaaaugcaauucugcaugcaucacuccaaauggaagcauucccaaugacaaaccauuccaaaauguaaacaggaucacauacggggccugucccagauaugucaagcaaaacacucugaaauuggcaacaggaaugagaaauguaccagagaaacaaacuagaggcauauuuggcgcaauagcggguuucauagaaaaugguugggagggaaugguggaugguugguacgguuucaggcaucaaaauucugagggaaggggacaagcagcagaucucaaaagcacucaagcagcaaucgaucaaaucaaugggaagcugaauagauugaucgggaaaaccaacgagaaauuccaucagauugaaaaagaauucucagaagucgaagggagaauucaggaccuugagaaauauguugaggacacuaaaauagaucucuggucauacaacgcggagcuucuuguugcccuggagaaccaacacacaauugaucuaacugacucagaaaugaacaaacuguuugaaaaaacaaagaagcaacugagggaaaaugcugaggauaugggcaaugguuguuucaaaauauaccacaaaugugacaaugccugcauaggaucaaucagaaauggaacuuaugaucacgauguguacagagaugaagcauuaaacaaccgauuccagaucaaaggaguugagcugaagucaggguacaaagauuggauccuauggauuuccuuugccauaucauguuuuuuacuuuguguugcuuuguugggguucaucaugugggccugccaaaaaggcaacauuaggugcaacauuugcauuuga

SEQ ID NO: 41872 - RNA, 1701 nt, Artificial Sequence
  derived and/or modified CDS sequence (wt) from hemagglutinin__InfluenzaA__AGF44897
augaagaccaucauugcuuugagcuacauucuaugucuaguuuucgcucaagaacuuccuggaaaugacgacagcacggcaacgcugugccuugggcaccaugcagugccaaacggaacgauagugaaaacaaucacgaaugaccaaauugaaguuacuaaugcuacugagcugguucagaguuccucaacaggugaaauaugcaacaguccucaucagauccuugauggagaaaacugcacacuaauagaugcucuauugggagacccucagugugauggcuuccaaaacaagaaaugggaccuuuuuguugaacgaagcaaagcccacagcaacuguuacccuuaugaugugccggauuaugccucccuuaggucacuaguugccucauccggcacacuggaguuuaacaaugaaagcuucaauuggacuggagucacucaaaacggaacaagcucugcuugcaugaggagaucuaauaauaguuucuuuaguagauugaauugguugacccacuuaaacuucaaauacccagcauugaacgugacuaugccaaacaaugaacaauuugacaaauuguacauuugggggguucaccacccggguacggacaaggaccaaaucuuccuguaugcucaagcaucaggaagaaucacaguaucuaccaaaagaagccaacaagcuguaauuccgaauaucggauccagacccagaguaaggaauaucccuagcagaguaagcaucuauuggacaauaguaaaaccgggagacauacuuuugauuaacagcacagggaaucuaauugcuccuagggguuacuucaaaauacaaagugggaaaagcucaauaaugagaucagaugcacccauuggcaaaugcaauucugcaugcaucacuccaaauggaagcauucccaaugacaaaccauuccaaaauguaaacaggaucacauacggggccugucccagauaugucaagcaaaacacucugaaauuggcaacaggaaugagaaauguaccagagaaacaaacuagaggcauauuuggcgcaauagcggguuucauagaaaaugguugggagggaaugguggaugguugguacgguuucaggcaucaaaauucugagggaaggggacaagcagcagaucucaaaagcacucaagcagcaaucgaucaaaucaaugggaagcugaauagauugaucgggaaaaccaacgagaaauuccaucagauugaaaaagaauucucagaagucgaagggagaauucaggaccuugagaaauauguugaggacacuaaaauagaucucuggucauacaacgcggagcuucuuguugcccuggagaaccaacacacaauugaucuaacugacucagaaaugaacaaacuguuugaaaaaacaaagaagcaacugagggaaaaugcugaggauaugggcaaugguuguuucaaaauauaccacaaaugugacaaugcuugcauaggaucaaucagaaauggaacuuaugaucacgauguguacagagaugaagcauuaaacaaccgauuccagaucaagggaguugagcugaagucaggguacaaagauuggauccuauggauuuccuuugccauaucauguuuuuugcuuuguguugcuuuguugggguucaucaugugggccugccaaaaaggcaacauuaggugcaacauuugcauuuga

SEQ ID NO: 41873 - RNA, 1701 nt, Artificial Sequence
  derived and/or modified CDS sequence (wt) from hemagglutinin__InfluenzaA__AGF44900
augaagacuaucauugcuuugagcuacauucuaugucugguuuucgcucaaaaacuuccuggaaaugacaauagcacggcaacgcugugccuugggcaccaugcaguaccaaacggaacgauagugaaaacaaucacgaaugaccgaauugaaguuacuaaugcuacugagcugguucagaauuccucaauaggugaaauaugcgacaguccucaucagauucuugauggagaaaacugcacacuaauagaugcucuauugggagacccucagugugauggcuuucaaaauaagaaaugggaccuuuuuguugaacgaagcaaagccuacagcaacuguuacccuuaugaugugccggauuaugccucccuuaggucacuaguugccucauccggcacacuggaguuuaacaaugaaagcuucaauuggacuggagucacucaaaacggaacaaguucugcuugcauaaggagaucuaauaguaguuucuuuaguagguuaaauugguugacccacuuaaacuucaaauacccagcauugaacgugacuaugccaaacaaugaacaauuugacaaauuguacauuugggggguucaccacccagguacggacaaggaccaaaucuuccuguaugcucaaucaucaggaagaaucacaguaucuaccaaaagaagccaacaagcuguaaucccaaauaucggaucuagacccagaauaaggaauaucccuagcagaauaagcaucuauuggacaauaguaaaaccaggagacauacuuuugauuaacagcacagggaaucuaauugcuccuagggguuacuucaaaauacgaagugggaaaagcucaauaaugagaucagaugcacccauuggcaaaugcaagucugaaugcaucacuccaaauggaagcauucccaaugacaaaccauuccaaaauguaaacaggaucacauacggggccugucccagauauguuaagcaaagcacucugaaauuggcaacaggaaugcgaaauguaccagagaaacaaacuagaggcauauuuggcgcaauagcagguuucauagaaaaugguugggagggaaugguggaugguugguacgguuucaggcaucaaaauucugagggaagaggacaagcagcagaucucaaaagcacccaagcagcaaucgaucaaaucaaugggaagcugaaucgauugaucgggaaaaccaacgagaaauuccaucagauugaaaaagaauucucagaaguagaagggagaauucaggaccuugagaaauauguugaggacacuaaaauagaucucuggucauacaacgcggagcuucuuguugcccuggagaaccaacauacaauugaucuaacugacucagaaaugaacaaacuauuugaaaaaacaaagaagcaacugagggaaaaugcugaggauaugggcaaugguuguuucaaaauauaccacaaaugugacaaugccugcauaggaucaauaagaaauggaacuuaugaccacaauguguacagggaugaagcauuaaacaaccgguuccagaucaagggaguugagcugaagucaggguacaaagauuggauccuauggauuuccuuugccauaucauguuuuuugcuuuguguugcuuuguugggguucaucaugugggccugccaaaagggcaacauuaggugcaacauuugcauuuga

SEQ ID NO: 41874 - RNA, 1701 nt, Artificial Sequence
  derived and/or modified CDS sequence (wt) from hemagglutinin__InfluenzaA__AGF44901
augaagacuaucauugcuuugagcuacauucuaugucugguuuucgcucaaaaacuuccuggaaaugacaauagcacggcaacgcugugccuugggcaccaugcaguaccaaauggaacgauagugaaaacaaucacgaaugaccgaauugaaguuacuaaugcuacugagcugguucagaauuccucaauaggugaaauaugcgacaguccucaucagauucuugauggagaaaacugcacacuaauagaugcucuauugggagacccucagugugauggcuuucaaaauaagaaaugggaccuuuuuguugaacgaagcaaagccuacagcaacuguuacccuuaugaugugccggauuaugccucccuuaggucacuaguugccucauccggcacacuggaguuuaacaaugaaagcuucaauuggacuggagucacucaaaacggaacaaguucugcuugcauaaggagaucuaauaguaguuucuuuaguagauuaaauugguugacccacuuaaacuucaaauacccagcauugaacgugacuaugccaaacaaugaacaauuugacaaauuguacauuugggggguucaccacccggguacggacaaggaccaaaucuuccuguaugcucaaucaucaggaagaaucacaguaucuaccaaaagaagccaacaagcuguaaucccaaauaucggaucuagacccagaauaaggaauauuccuagcagaauaagcaucuauuggacaauaguaaaaccgggagacauacuuuugauuaacagcacagggaaucuaauugcuccuagggguuacuucaaaauacgaagugggaaaagcucaauaaugagaucagaugcacccauuggcaaaugcaagucugaaugcaucacuccaaauggaagcauucccaaugacaaaccauuccaaaauguaaacaggaucacauacggggccugucccagauauguuaagcaaagcacucugaaauuggcaacaggaaugcgaaauguaccagagaaacaaacuagaggcauauuuggcgcaauagcagguuucauagaaaaugguugggaggggaugguggaugguugguacgguuucaggcaucaaaauucugagggaagaggacaagcagcagaucucaaaagcacccaagcagcaaucgaucaaaucaaugggaagcugaaucgauugaucgggaaaaccaacgagaaauuccaucagauugaaaaagaauucucagaaguagaagggagaauucaggaccuugagaaauauguugaggacacuaaaauagaucucuggucauacaacgcggagcuucuuguugcccuggagaaccaacauacaauugaucuaacugacucagaaaugaacaaacuguuugaaaaaacaaagaagcaacugagggaaaaugcugaggauaugggcaaugguuguuucaaaauauaccacaaaugugacaaugccugcauaggaucaauaagaaauggaacuuaugaccacaauguguacagggaugaagcauuaaacaaccgguuccagaucaagggaguugagcugaagucaggguacaaagauuggauccuauggauuuccuuugccauaucauguuuuuugcuuuguguugcuuuguugggguucaucaugugggccugccaaaagggcaacauuaggugcaacauuugcauuuga

SEQ ID NO: 41875 - RNA, 1701 nt, Artificial Sequence; identical to SEQ ID NO: 41874
  derived and/or modified CDS sequence (wt) from hemagglutinin__InfluenzaA__AGF44902

SEQ ID NO: 41876 - RNA, 1701 nt, Artificial Sequence; identical to SEQ ID NO: 41874
  derived and/or modified CDS sequence (wt) from hemagglutinin__InfluenzaA__AGF44903

SEQ ID NO: 41877 - RNA, 1701 nt, Artificial Sequence; identical to SEQ ID NO: 41874
  derived and/or modified CDS sequence (wt) from hemagglutinin__InfluenzaA__AGF44904

SEQ ID NO: 41878 - RNA, 1701 nt, Artificial Sequence
  derived and/or modified CDS sequence (wt) from hemagglutinin__InfluenzaA__AGF44905
augaagacuaucauugcuuugagcuacauucuaugucugguuuucgcucaaaaacuuccuggaaaugacaauagcacggcaacgcugugccuugggcaccaugcaguaccaaacggaacgauagugaaaacaaucacgaaugaccgaauugaaguuacuaaugcuacugagcugguucagaauuccucaauaggugaaauaugcgacaguccucaucagauucuugauggagaaaacugcacacuaauagaugcucuauugggagacccucagugugauggcuuucaaaauaagaaaugggaccuuuuuguugaacgaagcaaagccuacagcaacuguuacccuuaugaugugccggauuaugccucccuuaggucacuaguugccucauccggcacacuggaguuuaacaaugaaagcuucaauuggacuggagucacucaaaacggaacaaguucugcuugcauaaggagaucuaauaguaguuucuuuaguagauuaaauugguugacccacuuaaacuucaaauacccagcauuaaacgugacuaugccaaacaaugaacaauuugacaaauuguacauuugggggguucaccacccagguacggacaaggaccaaaucuuccuguaugcucaaucaucaggaagaaucacaguaucuaccaaaagaagccaacaagcuguaaucccaaauaucggaucuagacccagaauaaggaauaucccuagcagaauaagcaucuauuggacaauaguaaaaccgggagacauacuuuugauuaacagcacagggaaucuaauugcuccuagggguuacuucaaaauacgaagugggaaaagcucaauaaugagaucagaugcacccauuggcaaaugcaagucugaaugcaucacuccaaauggaagcauucccaaugacaaaccauuccaaaauguaaacaggaacacauacggggccugucccagauauguuaagcaaagcacucugaaauuggcaacaggaaugcgaaauguaccagagaaacaaacuagaggcauauuuggcgcaauagcagguuucauagaaaaugguugggagggaaugguggaugguugguacgguuucaggcaucaaaauucugagggaagaggacaagcagcagaucucaaaagcacccaagcagcaaucgaucaaaucaaugggaagcugaaucgauugaucgggaaaaccaacgagaaauuccaucagauugaaaaagaauucucagaaguagaagggagaauucaggaccuugagaaauauguugaggacacuaaaauagaucucuggucauacaacgcggagcuucuuguugccuuggagaaccaacauacaauugaucuaacugacucagaaaugaacaaacuguuugaaaaaacaaagaagcaacugagggaaaaugcugaggauaugggcaaugguuguuucaaaauauaccacaaaugugacaaugccugcauaggaucaauaagaaauggaacuuaugaccacaauguguacagggaugaagcauuaaacaaccgguuccagaucaagggaguugagcugaagucaggguacaaagauuggauccuauggauuuccuuugccauaucauguuuuuugcuuuguguugcuuuguugggguucaucaugugggccugccaaaagggcaacauuaggugcaacauuugcauuuga

SEQ ID NO: 41879 - RNA, 1701 nt, Artificial Sequence
  derived and/or modified CDS sequence (wt) from hemagglutinin__InfluenzaA__AGF44906
augaagacuaucauugcuuugagcuacauucuaugucugguuuucgcucaaaaacuuccuggaaaugacaauagcacggcaacgcugugccuugggcaccaugcaguaccaaacggaacgauagugaaaacaaucacgaaugaccgaauugaaguuacuaaugcuacugagcugguucagaauuccucaauaggugaaauaugcgacaguccucaucagauccuugauggagaaaauugcacacuaauagaugcucuauugggagacccucagugugauggcuuucaaaauaagaaaugggaccuuuuuguugaacgaagcaaagccuacagcaacuguuacccuuaugaugugccggauuaugccucccuuaggucacuaguugccucauccggcacacuggaguuuaacaaugaaagcuucaauuggacuggagucacucaaaacggaacaaguucugcuugcauaaggagaucuaauaguaguuucuuuaguagauuaaauugguugacccacuuaaacuucaaauacccagcauugaacgugacuaugccaaacaaugaacaauuugacaaauuguacauuuggggaguucaccacccggguacggacaaggaccaaaucuuccuguaugcucaaucaucaggaagaaucacaguaucuaccaaaagaagccaacaagcuguaaucccaaauaucggaucuagacccagaauaaggaauaucccuagcagaauaagcaucuauuggacaauaguaaaaccgggagacauacuuuugauuaacagcacagggaaucuaauugcuccuagggguuacuucaaaauacgaagugggaaaagcucaauaaugagaucagaugcacccauuggcaaaugcaagucugaaugcaucacuccaaauggaagcauucccaaugacaaaccauuccaaaauguaaacaggaucacauacggggccugucccagauauguuaagcaaagcacucugaaauuggcaacaggaaugcgaaauguaccagagaaacaaacuagaggcauauuuggcgcaauagcggguuucauagaaaaugguugggagggaaugguggaugguugguacgguuucaggcaucaaaauucugagggaagaggacaagcagcagaucucaaaagcacucaagcagcaaucgaucaaaucaaugggaagcugaaucgauugaucgggaaaaccaacgagaaauuccaucagauugaaaaagaauucucagaaguagaagggagaauucaggaccuugagaaauauguugaggacacuaaaauagaucucuggucauacaacgcggagcuucuuguugcccuggagaaucaacauacaauugaucuaacugacucagaaaugaacaaacuguuugaaaaaacaaagaagcaacugagggaaaaugcugaggauaugggcaaugguuguuucaaaauauaccacaaaugugacaaugccugcauaggaucaaucagaaauggaacuuaugaccacaauguguacagggaugaagcauuaaacaaccgguuccagaucaagggaguugagcuuaagucaggguacaaagauuggauccuauggauuuccuuugccauaucauguuuuuugcuuuguguugcuuuguugggguucaucaugugggccugccaaaagggcaacauuaggugcaacauuugcauuuga

SEQ ID NO: 41880 - RNA, 1701 nt, Artificial Sequence
  derived and/or modified CDS sequence (wt) from hemagglutinin__InfluenzaA__AGF44908
augaagacuaucauugcuuugagcuacauucuaugucugguuuucgcucaaaaacuuccuggaaaugacaauagcacggcaacgcugugccuugggcaccaugcaguaccaaacggaacgauagugaaaacaaucacgaaugaccgaauugaaguuacuaaugcuacugagcugguucagaauuccucaauaggugaaauaugcgacaguccucaucagauccuugauggagaaaacugcacacuaauagaugcucuauugggagacccucagugugauggcuuucaaaauaagaaaugggaccuuuuuguugaacgaagcaaagccuacagcaacuguuacccuuaugaugugccggauuaugccucccuuaggucacuaguugccucauccggcacacuggaguuuaacaaugaaagcuucaauugggcuggagucacucaaaacggaacaaguucugcuugcauaaggggaucuaauaguaguuucuuuaguagauuaaauugguugacccacuuaaacuucaaauacccagcauugaacgugacuaugccaaacaaugaacaauuugacaaauuguacauuugggggguucaccacccggguacggacaaggaccaaaucuuccuguaugcucaaucaucaggaagaaucacaguaucuaccaaaagaagccaacaagcuguaaucccgaauaucggaucuagacccagaauaaggaauaucccuagcagaauaagcaucuauuggacaauaguaaaaccgggagacauacuuuugauuaacagcacagggaaucuaauugcuccuagggguuacuucaaaauacgaagugggaaaagcucaauaaugagaucagaugcacccauuggcaaaugcaagucugaaugcaucacuccaaauggaagcauucccaaugacaaaccauuccaaaauguaaacaggaucacauacggggccugucccagauauguuaagcaaagcacucugaaauuggcaacaggaaugcgaaauguaccagagaaacaaacuagaggcauauuuggcgcaauagcggguuucauagaaaaugguugggagggaaugauggaugguugguacgguuucaggcaucaaaauucugagggaagaggacaagcagcagaucucaaaagcacucaagcagcaaucgaucaaaucaaugggaagcugaaucgauugaucgggaaaaccaacgagaaauuccaucagauugaaaaagaauucucagaaguagaagggagaauucaggaccuugagaaauauguugaggacacaaaaauagaucucuggucauacaacgcggagcuucuuguugcccuggagaaccaacauacaauugaucuaacugacucagaaaugaacaaacuguuugaaaaaacaaagaagcaacugagggaaaaugcugaggauaugggcaaugguuguuucaaaauauaccacaaaugugacaaugccugcauaggaucaaucagaaauggaacuuaugaccacgauguauacagggaugaagcauuaaacaaccgguuccagaucaagggaguugagcugaagucaggguacaaagauuggauccuauggauuuccuuugccauaucauguuuuuugcuuuguguugcuuuguugggguucaucaugugggccugccaaaagggcaacauuaggugcaacauuugcauuuga

SEQ ID NO: 41881 - RNA, 1701 nt, Artificial Sequence; identical to SEQ ID NO: 41874
  derived and/or modified CDS sequence (wt) from hemagglutinin__InfluenzaA__AGF44909

SEQ ID NO: 41882 - RNA, 1701 nt, Artificial Sequence; identical to SEQ ID NO: 41874
  derived and/or modified CDS sequence (wt) from hemagglutinin__InfluenzaA__AGF44910

SEQ ID NO: 41883 - RNA, 1701 nt, Artificial Sequence
  derived and/or modified CDS sequence (wt) from hemagglutinin__InfluenzaA__AGF44911
augaagacuaucauugcuuugagcuacauucuaugucugguuuucgcucaaaaacuuccuggaaaugacaauagcacggcaacgcugugccuugggcaccaugcaguaccaaacggaacgauagugaaaacaaucacgaaugaccgaauugaaguuacuaaugcuacugagcugguucagaauuccucaauaggugaaauaugcgacaguccucaucagauccuugauggagaaaacugcacacuaauagaugcucuauugggagacccucagugugauggcuuucaaaauaagaaaugggaccuuuuuguugaacgaagcaaagccuacagcaacuguuacccuuaugaugugccggauuaugccucccuuaggucacuaguugccucauccggcacacuggaguuuaacaaugaaagcuucaauugggcuggagucacucaaaacggaacaaguucugcuugcauaaggggaucuaauaguaguuucuuuaguagauuaaauugguugacccacuuaaacuucaaauacccagcauugaacgugacuaugccaaacaaugagcaauuugacaaauuguacauuugggggguucaccacccggguacggacaaggaccaaaucuuccuguaugcucaaucaucaggaagaaucacaguaucuaccaaaagaagccaacaagcuguaaucccgaauaucggaucuagacccagaauaaggaauaucccuagcagaauaagcaucuauuggacaauaguaaaaccgggagacauacuuuugauuaacagcacagggaaucuaauugcuccuagggguuacuucaaaauacgaagugggaaaagcucaauaaugagaucagaugcacccauuggcaaaugcaaaucugaauguaucacuccaaauggaagcauucccaaugacaaaccauuccaaaauguaaacaggaucacauauggggccugucccagauauguuaagcaaagcacucugaaauuggcaacaggaaugcgaaauguaccagagaaacaaacuagaggcauauuuggcgcaauagcggguuucauagaaaaugguugggagggaaugguggaugguugguacgguuucaggcaucaaaauucugagggaagaggacaagcagcagaucucaaaagcacucaagcagcaaucgaucaaaucaaugggaagcugaaucgauugaucgggaaaaccaacgagaaauuccaucagauugaaaaagaauucucagaaguagaagggagaauucaggaccuugagaaauauguugaggacacaaaaauagaucucuggucauacaacgcggagcuucuuguugcccuggagaaccaacauacaauugaucuaacugacucagaaaugaacaaacuguuugaaaaaacaaagaagcaacugagggaaaaugcugaggauaugggcaaugguuguuucaaaauauaccacaaaugugacaaugccugcauaggaucaaucagaaauggaacuuaugaccacgauguauacagggaugaagcauuaaacaaccgguuccagaucaagggaguugagcugaagucaggguacaaagauuggauccuauggauuuccuuugccacaucauguuuuuugcuuuguguugcuuuguugggguucaucaugugggccugccaaaagggcaacauuaggugcaacauuugcauuuga

SEQ ID NO: 41884 - RNA, 1701 nt, Artificial Sequence; identical to SEQ ID NO: 41874
  derived and/or modified CDS sequence (wt) from hemagglutinin__InfluenzaA__AGF44912

SEQ ID NO: 41885 - RNA, 1701 nt, Artificial Sequence; identical to SEQ ID NO: 41879
  derived and/or modified CDS sequence (wt) from hemagglutinin__InfluenzaA__AGF44913

SEQ ID NO: 41886 - RNA, 1701 nt, Artificial Sequence
  derived and/or modified CDS sequence (wt) from hemagglutinin__InfluenzaA__AGF44914
augaagacuaucauugcuuugagcuacauucuaugucugguuuucgcucaaaaacuuccuggaaaugacaauagcacggcaacgcugugccuugggcaccaugcaguaccaaacggaacgauagugaaaacaaucacgaaugaccgaauugaaguuacuaaugcuacugagcugguucagaauuccucaauaggugaaauaugcgacaguccucaucagauccuugauggagaaaauugcacacuaauagaugcucuauugggagacccucagugugauggcuuucaaaauaagaaaugggaccuuuuuguugaacgaagcaaagccuacagcaacuguuacccuuaugaugugccggauuaugccucccuuaggucacuaguugccucauccggcacacuggaguuuaacaaugaaagcuucaauuggacuggagucacucaaaacggaacaaguucugcuugcauaaggagaucuaauaguaguuucuuuaguagauuaaauugguugacccacuuaaacuucaaauacccagcauugaacgugacuaugccaaacaaugaacaauuugacaaauuguacauuuggggaguucaccacccggguacggacaaggaccaaaucuuccuguaugcucaaucaucaggaagaaucacaguaucuaccaaaagaagccaacaagcuguaaucccaaauauuggaucuagacccagaauaaggaauaucccuagcagaauaagcaucuauuggacaauaguaaaaccgggagacauacuuuugauuaacagcacagggaaucuaauugcuccuagggguuacuucaaaauacgaagugggaaaagcucaauaaugagaucagaugcacccauuggcaaaugcaagucugaaugcaucacuccaaauggaagcauucccaaugacaaaccauuccaaaauguaaacaagaucacauacggggccugucccagauauguuaagcaaagcacucugaaauuggcaacaggaaugcgaaauguaccagagaaacaaacuagaggcauauuuggcgcaauagcggguuucauagaaaaugguugggagggaaugguggaugguugguacgguuucaggcaucaaaauucugagggaagaggacaagcagcagaucucaaaagcacucaagcagcaaucgaucaaaucaaugggaagcugaaucgauugaucgggaaaaccaacgagaaauuccaucagauugaaaaagaauucucagaaguagaagggagaauucaggaccuugagaaauauguugaggacacuaaaauagaucucuggucauacaacgcggagcuucuuguugcccuggagaaucaacauacaauugaucuaacugacucagaaaugaacaaacuguuugaaaaaacaaagaagcaacugagggaaaaugcugaggauaugggcaaugguuguuucaaaauauaccacaaaugugacaaugccugcauaggaucaaucagaaauggaacuuaugaccacaauguguacagggaugaagcauuaaacaaccgguuccagaucaagggaguugagcuuaagucaggguacaaagauuggauccuauggauuuccuuugccauaucauguuuuuugcuuuguguugcuuuguugggguucaucaugugggccugccaaaagggcaacauuaggugcaacauuugcauuuga

SEQ ID NO: 41887 - RNA, 1701 nt, Artificial Sequence
  derived and/or modified CDS sequence (wt) from hemagglutinin__InfluenzaA__AGF44916
augaagaccaucauugcuuugagcuacauucuaugucuaguuuuugcucaagaacuuccuggaaaugacgacagcacggcaacgcugugccuugggcaccaugcagugccaaacggaacgauagugaaaacaaucacgaaugaccaaauugaaguuacuaaugcuacugaacugguucagaguuccucaacaggugaaauaugcaacaguccucaucagauccuugauggagaaaacugcacacuaauagaugcucuauugggagacccucagugugauggcuuccaaaacaagaaaugggaccuuuuuguugaacgaagcaaagcccacagcaacuguuacccuuaugaugugccggauuaugccucccuuaggucacuaguugccucauccggcacacuggaguuuaacaaugaaagcuucaauuggacuggagucacucaaaacggaacaagcucugcuugcauaaggagaucuaauaauaguuucuuuaguagauugaauugguugacccacuuaaacuucaaauacccagcauugaacgugacuaugccaaacaaugaacaauuugacaaauuguacauuugggggguucaccacccggguacggacaaggaccaaaucuuccuguaugcucaagcaucaggaagaaucacaguaucuaccaaaagaagccaacaagcuguaauuccgaauaucggaucuagacccagaguaaggaauaucccuagcagaguaagcaucuauuggacaauaguaaaaccgggagacauacuuuugauuaacagcacagggaaucuaauugcuccuagggguuacuucaaaauacgaagugggaaaagcucaauaaugagaucagaugcacccauuggcaaaugcaauucugcaugcaucacuccaaauggaagcauucccaaugacaaaccauuccaaaauguaaacaggaucacauacggggccugucccagauaugucaagcaaaacacucugaaauuggcaacaggaaugagaaauguaccagagaaacaaacuagaggcauauuuggcgcaauagcggguuucauagaaaaugguugggagggaaugguggaugguugguacgguuucaggcaucaaaauucugagggaaggggacaagcagcagaucucaaaagcacucaagcagcaaucgaucaaaucaaugggaagcugaauagauugaucgggaaaaccaacgagaaauuccaucagauugaaaaagaauucucagaagucgaagggagaauucaggaccuugagaaauauguugaggacacuaaaauagaucucuggucauacaacgcggagcuucuuguugcccuggagaaccaacacacaauugaucuaacugacucagaaaugaacaaacuguuugaaaaaacaaagaagcaacugagggaaaaugcugaggauaugggcaacgguuguuucaaaauauaccacaaaugugacaaugccugcauaggaucaaucagaaauggaacuuaugaucacgauguguacagagaugaagcauuaaacaaccgauuccagaucaagggaguugagcugaagucaggguacaaagauuggauccuauggauuuccuuugccauaucauguuuuuugcuuuguguugcuuuguugggguucaucaugugggccugccaaaaaggcaacauuaggugcaacauuugcauuuga

SEQ ID NO: 41888 - RNA, 1701 nt, Artificial Sequence
  derived and/or modified CDS sequence (wt) from hemagglutinin__InfluenzaA__AGF44917
augaagacuaucauugcuuugagcuacauucuaugucugguuuucgcucaaaaaauuccuggaaaugacaacagcacggcaacgcugugccuugggcaccaugcaguaccaaacggaacgauagugaaaacaauuacgaaugaacaaauugaaguuacuaaugcuacugagcugguucagaguuccucaacaggcgaaauaugcaacaguccucaucagauccuugauggagaaaacugcacacuaauagaugcucuauugggagacccucagugugauggcuuccaaaauaagaaaugggaccuuuuuguugaacgaagcaaagccuacagcaacuguuacccuuaugaugugccggauuaugccucccuuaggucacuaguugccucauccggcacacuggaguuuaacaaugaaagcuucaauuggacuggagucacucaaaacggaacaagcucugcuugcauaaggggaucugauaguaguuucuuuaguagauugaauugguugacccacuuaaacuucaaauacccagcauuaaacgugacuaugccaaacaaugaacaauuugacaaauuguacauuugggggguucaccacccggguacggacaaggaccaaaucuuccuguaugcucaagcaucaggaagaaucacaguaucuaccaaaagaagccaacaagcugugaucccgaauaucggaucuagacccagaauaaggaauaucccuagcagaauaagcaucuauuggacaauaguaaaaccgggagacauacuuuugauuaacagcacagggaaucuaauugcuccuagggguuacuucaaaauacgaagugggaaaagcucaauaaugagaucagaugcacccauuggaaaaugcaauucugaaugcaucacuccaaauggaagcauucccaaugacaaaccauuccaaaauguaaacaggaucacauacggggccugucccagauacguuaagcaaaacacucugaaauuggcaacaggaaugcgaaauguaccagagaaacaaacuagaggcauauuuggcgcaauagcggguuucauagaaaaugguugggagggaaugauggaugguugguacgguuucaggcaucaaaauucugagggaagaggacaagcagcagaucucaaaagcacucaagcagcuaucgaucaaaucaaugggaagcugaauagauugaucgggaaaaccaacgagaaauuccaucagauugaaaaagaauucucagaagucgaagggagaauucaggaccuugagaaauauguugaggacacuaaaauagaucucuggucauacaacgcggagcuucuuguugcccuggaaaaccaacauacaauugaucuaacugacucagaaaugaacaaacuguuugaaaaaacaaagaagcaacugagggaaaaugcugaggauaugggcaauggcuguuucaaaauauaccacaaaugugacaaugccugcauaggaucaaucagaaauggaacuuauaaccacgauguauacagagaugaagcauuaaacaaccgguuccagaucaagggaguugagcugaagucgggguacaaagauuggauccuauggauuuccuuugccauaucauguuuuuugcuuuguguugcuuuguugggguucaucaugugggccugccaaaaaggcaacauuaggugcaacauuugcauuuga

SEQ ID NO: 41889 - RNA, 1701 nt, Artificial Sequence
  derived and/or modified CDS sequence (wt) from hemagglutinin__InfluenzaA__AGF44918
augaagaccaucauugcuuugagcuacauucuaugucuaguuuucgcucaagaacuuccuggaaaugacgacagcacggcaacgcugugccuugggcaccaugcagugccaaacggaacgauagugaaaacaaucacgaaugaccaaauugaaguuacuaaugcuacugagcugguucagaguuccucaacaggugaaauaugcaacaguccucaucagauccuugauggagaaaacugcacacuaauagaugcucuauugggagacccucagugugauggcuuccaaaacaagaaaugggaccuuuuuguugaacgaagcaaagcccacagcaacuguuacccuuaugaugugccggauuaugccucccuuaggucacuaguugccucauccggcacacuggaguuuaacaaugaaagcuucaauuggacuggagucacucaaaacggaacaagcucugcuugcauaaggagaucuaauaauaguuucuuuaguagauugaauugguugacccacuuaaacuucaaauacccagcauugaacgugacuaugccaaacaaugaacaauuugacaaauuguacauuugggggguucaccacccggguacggacaaggaccaaaucuuccuguaugcucaagcaucaggaagaaucacaguaucuaccaaaagaagccaacaagcuguaauuccgaauaucggauccagacccagaguaaggaauaucccuagcagaguaagcaucuauuggacaauaguaaaaccgggagacauacuuuugauuaacagcacagggaaucuaauugcuccuagggguuacuucaaaauacgaagugggaaaagcucaauaaugagaucagaugcacccauuggcaaaugcaauucugcaugcaucacuccaaauggaagcauucccaaugacaaaccauuccaaaauguaaacaggaucacauacggggccugucccagauaugucaagcaaaacacucugaaauuggcaacaggaaugagaaauguaccagagaaacaaacuagaggcauauuuggcgcaauagcggguuucauagaaaaugguugggagggaaugguggaugguugguacgguuucaggcaucaaaauucugagggaaggggacaagcagcagaucucaaaagcacucaagcagcaaucgaucaaaucaaugggaagcugaauagauugaucgggaaaaccaacgagaaauuccaucagauugaaaaagaauucucagaagucgaagggagaauucaggaccuugagaaauauguugaggacacuaaaauagaucucuggucauacaacgcggagcuucuuguugcccuggagaaccaacacacaauugaucuaacugacucagaaaugaacaaacuguuugaaaaaacaaagaagcaacugagggaaaaugcugaggauaugggcaaugguuguuucaaaauauaccacaaaugugacaaugcuugcauaggaucaaucagaaauggaacuuaugaucacgauguguacagagaugaagcauuaaacaaccgauuccagaucaagggaguugagcugaagucaggguacaaagauuggauccuauggauuuccuuugccauaucauguuuuuugcuuuguguugcuuuguugggguucaucaugugggccugccaaaaaggcaacauuaggugcaacauuugcauuuga

SEQ ID NO: 41890 - RNA, 1701 nt, Artificial Sequence
  derived and/or modified CDS sequence (wt) from hemagglutinin__InfluenzaA__AGF44919
augaagacuaucauugcuuugagcuacauucuaugucugguuuucgcucaaaaacuuccuggaaaugacaauagcacggcaacgcugugccuugggcaccaugcaguaccaaacggaacgauagugaaaacaaucacgaaugaccgaauugaaguuacuaaugcuacugagcugguucagaauuccucaauaggugaaauaugcgacaguccucaucagauccuugauggagaaaacugcacacuaauagaugcucuauugggagacccucagugugauggcuuucaaaauaagaaaugggaccuuuuuguugaacgaagcaaagccuacagcaacuguuacccuuaugaugugccggauuaugccucccuuaggucacuaguugccucauccggcacacuggaguuuaacaaugaaagcuucaauugggcuggagucacucaaaacggaacaaguucugcuugcauaaggggaucuaauaguaguuucuuuaguagauuaaauugguugacccacuuaaacuucaaauacccagcauugaacgugacuaugccaaacaaugagcaauuugacaaauuguacauuugggggguucaccacccggguacggacaaggaccaaaucuuccuguaugcucaaucaucaggaagaaucacaguaucuaccaaaagaagccaacaagcuguaaucccgaauaucggaucuagacccagaauaaggaauaucccuagcagaauaagcaucuauuggacaauaguaaaaccgggagacauacuuuugauuaacagcacagggaaucuaauugcuccuagggguuacuucaaaauacgaagugggaaaagcucaauaaugagaucagaugcacccauuggcaaaugcaaaucugaauguaucacuccaaauggaagcauucccaaugacaaaccauuccaaaauguaaacaggaucacauacggggccugucccagauauguuaagcaaagcacucugaaauuggcaacaggaaugcgaaauguaccagagaaacaaacuagaggcauauuuggcgcaauagcggguuucauagaaaaugguugggagggaaugguggaugguugguacgguuucaggcaucaaaauucugagggaagaggacaagcagcagaucucaaaagcacucaagcagcaaucgaucaaaucaaugggaagcugaaucgauugaucgggaaaaccaacgagaaauuccaucagauugaaaaagaauucucagaaguagaagggagaauucaggaccuugagaaauauguugaggacacaaaaauagaucucuggucauacaacgcggagcuucuuguugcccuggagaaccaacauacaauugaucuaacugacucagaaaugaacaaacuguuugaaaaaacaaagaagcaacugagggaaaaugcugaggauaugggcaaugguuguuucaaaauauaccacaaaugugacaaugccugcauaggaucaaucagaaauggaacuuaugaccacuauguauacagggaugaagcauuaaacaaccgguuccagaucaagggaguugagcugaagucaggguacaaagauuggauccuauggauuuccuuugccauaucauguuuuuugcuuuguguugcuuuguugggguucaucaugugggccugccaaaagggcaacauuaggugcaacauuugcauuuga

SEQ ID NO: 41891 - RNA, 1701 nt, Artificial Sequence; identical to SEQ ID NO: 41889
  derived and/or modified CDS sequence (wt) from hemagglutinin__InfluenzaA__AGF44920

SEQ ID NO: 41892 - RNA, 1701 nt, Artificial Sequence
  derived and/or modified CDS sequence (wt) from hemagglutinin__InfluenzaA__AGF44921
augaagacuaucauugcuuugagcuacauucuaugucugguuuucgcucaaaaacuuccuggaaaugacaauagcacggcaacgcugugccuugggcaccaugcaguaccaaacggaacgauagugaaaacaaucacgaaugaccgaauugaaguuacuaaugcuacugagcugguucagaauuccucaauaggugaaauaugcgacaguccucaucagauccuugauggagaaaauugcacacuaauagaugcucuauugggagacccucagugugauggcuuucaaaauaagaaaugggaccuuuuuguugaacgaagcaaagccuacagcaacuguuacccuuaugaugugccggauuaugccucccuuaggucacuaguugccucauccggcacacuggaguuuaacaaugaaagcuucaauuggacuggagucacucaaaacggaacaaguucugcuugcauaaggagaucuaauaguaguuucuuuaguagauuaaauugguugacccacuuaaacuucaaauacccagcauugaacgugacuaugccaaacaaugaacaauuugacaaauuguacauuuggggaguucaccacccagguacggacaaggaccaaaucuuccuguaugcucaaucaucaggaagaaucacaguaucuaccaaaagaagccaacaagcuguaaucccaaauaucggaucuagacccagaauaaggaauaucccuagcagaauaagcaucuauuggacaauaguaaaaccgggagacauacuuuugauuaacagcacagggaaucuaauugcuccuagggguuacuucaaaauacgaagugggaaaagcucaauaaugagaucagaugcacccauuggcaaaugcaagucugaaugcaucacuccaaauggaagcauucccaaugacaaaccauuccaaaauguaaacaggaucacauacggggccugucccagauauguuaagcaaagcacucugaaauuggcaacaggaaugcgaaauguaccagagaaacaaacuagaggcauauuuggcgcaauagcggguuucauagaaaaugguugggagggaaugguggaugguugguacgguuucaggcaucaaaauucugagggaagaggacaagcagcagaucucaaaagcacucaagcagcaaucgaucaaaucaaugggaagcugaaucgauugaucgggaaaaccaacgagaaauuccaucagauugaaaaagaauucucagaaguagaagggagaauucaggaccuugagaaauauguugaggacacuaaaauagaucucuggucauacaacgcggagcuucuuguugcccuggagaaucaacauacaauugaucuaacugacucagaaaugaacaaacuguuugaaaaaacaaagaagcaacugagggaaaaugcugaggauaugggcaaugguuguuucaaaauauaccacaaaugugacaaugccugcauaggaucaaucagaaauggaacuuaugaccacaauguguacagggaugaagcauuaaacaaccgguuccagaucaagggaguugagcuuaagucaggguacaaagauuggauccuauggauuuccuuugccauaucauguuuuuugcuuuguguugcuuuguugggguucaucaugugggccugccaaaagggcaacauuaggugcaacauuugcauuuga

SEQ ID NO: 41893 - RNA, 1701 nt, Artificial Sequence
  derived and/or modified CDS sequence (wt) from hemagglutinin__InfluenzaA__AGG13411
augaagaccaucauugcuuugagcuacauucuaugucuaguuuucgcucaagaacuuccuggaaaugacgacagcacggcaacgcugugccuugggcaccaugcagugccaaacggaacgauagugaaaacaaucacgaaugaccgaauugaaguuacuaaugcuacugagcugguucagaguuccucaacaggugaaauaugcaacaguccucaucagauccuugauggagaaaacugcacacuaauagaugcucuauugggagacccucagugugauggcuuccaaaacaagaaaugggaccuuuuuguugaaagaagcaaagcccacagcaacuguuacccuuaugaugugccggauuaugccucccuuaggucacuaguugccucauccggcacacuggaguuuaacaaugaaagcuucaauuggacuggagucacucaaaacggaacaagcucugcuugcauaaggagaucuaauaauaguuucuuuaguagauugaauugguugacccacuuaaacuucaaauacccagcauugaacgugacuaugccaaacaaugaacaauuugacaaauuguacauuugggggguucaccacccggguacggacaaggaccaaaucuuccuguaugcucaagcaucaggaagaaucacaguaucuaccaaaagaaaccaacaaacuguaauuccgaauaucggaucuagacccagaguaaggaauaucccuagcagaguaagcaucuauuggacaauaguaaaaccaggagacauacuuuugauuaacagcacagggaaucuaauugcuccuagggguuacuucaaaauacgaaguggaaaaagcucaauaaugagaucagaugcacccauuggcaaaugcaauucugcaugcaucacuccaaauggaagcauucccaaugacaaaccauuccaaaauguaaacaggaucacauacggggccugucccagauaugucaagcaaaacacucugaaauuggcaacaggaaugagaaauguaccagagaaacaaacuagaggcauauuuggugcaauagcggguuucauagaaaaugguugggagggaaugguggaugguugguacgguuucaggcaucaaaauucugagggaaggggacaagcagcagaucucaaaagcacucaagcagcaaucgaucaaaucaaugggaagcugaauagauugaucgggaaaaccaacgagaaauuccaucagauugaaaaagaauucucagaagucgaagggagaauucaggaccuugagaaauauguugaggacacuaaaauagaucucuggucauacaacgcggagcuucuuguugcccuggagaaccaacacacaauugaucuaacugacucagaaaugaacaaacuguuugaaaaaacaaagaagcaacugagggaaaaugcugaggauaugggcaaugguuguuucaaaauauaccacaaaugugacaaugccugcauaggaucaaucagaaauggaacuuaugaucacgauguguacagagaugaagcauuaaacaaccgauuccagaucaagggaguugagcugaagucaggguacaaagauuggauccuauggauuuccuuugccauaucauguuuuuugcuuuguguugcuuuguugggguucaucaugugggccugccaaaaaggcaacauuaggugcaacauuugcauuuga

SEQ ID NO: 41894 - RNA, 1701 nt, Artificial Sequence
  derived and/or modified CDS sequence (wt) from hemagglutinin__InfluenzaA__AGG13447
augaagaccaucauugcuuugagcuacauucuaugucuaguuuucgcucaagaacuuccuggaaaugacgacagcacggcaacgcugugccuugggcaccaugcagugccaaacggaacgauagugaaaacaaucacgaaugaccgaauugaaguuacuaaugcuacugagcugguucagaguuccucaacaggugaaauaugcaacaguccucaucagauccuugauggagaaaacugcacacuaauagaugcucuauugggagacccucagugugauggcuuccaaaacaagaaaugggaccuuuuuguugaaagaagcaaagcccacagcaacuguuacccuuaugaugugccggauuaugccucccuuaggucacuaguugccucauccggcacacuggaguuuaacaaugaaagcuucaauuggacuggagucacucaaaacggaacaagcucugcuugcauaaggagaucuaauaauaguuucuuuaguagauugaauugguugacccacuuaaacuucaaauacccagcauugaacgugacuaugccaaacaaugaacaauuugacaaauuguacauuugggggguucaccacccggguacggacaaggaccaaaucuuccuguaugcucaagcaucaggaagaaucacaguaucuaccaaaagaagccaacaaacuguaauuccgaauaucggaucuagacccagaguaaggaauaucccuagcagaguaagcaucuauuggacaauaguaaaaccaggagacauacuuuugauuaacagcacagggaaucuaauugcuccuagggguuacuucaaaauacgaaguggaaaaagcucaauaaugagaucagaugcacccauuggcaaaugcaauucugcaugcaucacuccaaauggaagcauucccaaugacaaaccauuccaaaauguaaacaggaucacauacggggccugucccagauaugucaagcaaaacacucugaaauuggcaacaggaaugagaaauguaccagagaaacaaacuagaggcauauuuggugcaauagcggguuucauagaaaaugguugggagggaaugguggaugguugguacgguuucaggcaucaaaauucugagggaaggggacaagcagcagaucucaaaagcacucaagcagcaaucgaucaaaucaaugggaagcugaauagauugaucgggaaaaccaacgagaaauuccaucagauugaaaaagaauucucagaagucgaagggagaauucaggaccuugagaaauauguugaggacacuaaaauagaucucuggucauacaacgcggagcuucuuguugcccuggagaaccaacacacaauugaucuaacugacucagaaaugaacaaacuguuugaaaaaacacagaagcaacuuagggaaaaugcugaggauaugggcaaugguuguuucaaaauauaccacaaaugugacaaugccugcauaggaucaaucagaaauggaacuuaugaucacgauguguacagagaugaagcauuaaacaaccgauuccagaucaagggaguugagcugaagucaggguacaaagauuggauccuauggauuuccuuugccauaucauguuuuuugcuuuguguugcuuuguugggguucaucaugugggccugccaaaaaggcaacauuaggugcaacauuugcauuuga

SEQ ID NO: 41895 - RNA, 1701 nt, Artificial Sequence
  derived and/or modified CDS sequence (wt) from hemagglutinin__InfluenzaA__AGG13459
augaagacuaucauugcuuugagcuacauucuaugucugguuuucgcucaaaaacuuccuggaaaugacaauagcacggcaacgcugugccuugggcaccaugcaguaccaaacggaacgauagugaaaacaaucacgaaugaccgaauugaaguuacuaaugcuacugagcugguucagaauuccucaauaggugaaauaugcgacaguccucaucagauccuugauggagaaaacuguacacuaauagaugcucuauugggagacccucagugugauggcuuucaaaauaagaaaugggaccuuuuuguugaacgaagcaaagccuacagcaacuguuacccuuaugaugugccggauuaugccucccuuaggucacuaguugccucauccggcacacuggaguuuaacaaugaaagcuucaauuggacuggagucacucaaaacggaacaaguucugcuugcauaaggagaucuaauaguaguuucuuuaguagauuaaauugguugacccacuuaaacuucaaauacccagcauugaacgugacuaugccaaacaaugaacaauuugacaaauuguacauuugggggguucaccacccggguacggacaaggaccaaaucuuccuguaugcucaaucaucaggaagaaucacaguaucuaccaaaagaagccaacaagcuguaaucccgaauaucggaucuagacccagaauaaggaauaucccuagcagaauaagcaucuauuggacaauaguaaaaccaggagacauacuuuugauuaacagcacagggaaucuaauugcuccuagggguuacuucaaaauacgaagugggaaaagcucaauaaugagaucagaugcacccauuggcaaaugcaagucugaaugcaucacuccaaauggaagcauuccaaaugacaaaccauuccaaaauguaaacaggaucacauacggggccugucccagauauguuaagcaaagcacucugaaauuggcaacaggaaugcgaaauguaccagagaaacaaacuagaggcauauuuggcgcaauagcggguuucauagaaaaugguugggagggaaugguggaugguugguacgguuucaggcaucaaaauucugagggaagaggacaagcagcagaucucaaaagcacucaagcagcaaucgaucaaaucaaugggaagcugaaucgauugaucgggaaaaccaacgagaaauuccaucagauugaaaaagaauucucagaaguagaagggagaauucaggaccuugagaaauauguugaggacacuaaaauagaucucuggucauacaacgcggagcuucuuguugcccuggagaaccaacauacaauugaucuaacugacucagaaaugaacaaacuguuugaaaaaacaaagaagcaacuaagggaaaaugcugaggauaugggcaaugguuguuucaaaauauaccacaaaugugacaaugccugcauaggaucaaucagaaauggaacuuacgaccacgauguauacagggaugaagcauuaaacaaccgguuccagaucaagggaguugagcugaagucaggguacaaagauuggauccuauggauuuccuuugccauaucauguuuuuugcuuuguguugcuuuguugggguucaucaugugggccugccaaaagggcaacauuaggugcaacauuugcauuuga

SEQ ID NO: 41896 - RNA, 1701 nt, Artificial Sequence
  derived and/or modified CDS sequence (wt) from hemagglutinin__InfluenzaA__AGG13495
augaagacuaucauugcuuugagcuacauucuaugucuaguuuucgcccaaaaacuuccuggaaaugacaacagcacggcaacgcugugccuugggcaccaugcaguaccaaacggaacgauagugaaaacaaucacgaaugaccaaauugaaguuacuaaugcuacugagcugguucagaguuccucaacaggugaaauaugcgacaguccucaucagauccuugauggagaaaacugcacacuaauagaugcucuauugggagacccucagugugauggcuuccaaaauaagaaaugggaccuuuuuguugaacgaagcaaagccuacagcaacuguuacccuuaugaugugccggauuaugccucccuuaggucacuaguugccucauccggcacacuggaguuuaacaaugaaagcuucaauuggacuggagucacucaaaacggaacaagcucugcuugcauaaggagaucugauaguaguuucuuuaguagauugaauugguugacccacuuaaacuucaaauacccagcauugaacgugacuaugccaaacaaugaacaauuugacaaauuguacauuugggggguucaccacccggguacggacaaggaccaaaucuuccuguaugcucaagcaucaggaagaaucacaguaucuaccaaaagaagccaacaaucugugaucccgaauaucggaucuagacccagaauaaggaauaucccuagcagaauaagcaucuauuggacaauaguaaaaccgggagacauacuuuugauuaacagcacagggaaucuaauugcuccuagggguuacuucaaaauacaaagugggaaaagcucaauaaugagaucagaugcacccauuggaaaaugcaauucugaaugcaucacuccaaauggaagcauucccaaugacaaaccauuccaaaauguaaacaggaucacauacggggccuguccuagauauguuaagcaaaacacucugaaauuggcaacaggaaugcgaaauguaccagagaaacaaacuagaggcauauuuggcgcaauagcggguuucauagaaaaugguugggagggaaugguggaugguugguacgguuucaggcaucaaaauucugagggaagaggacaagcagcagaucucaaaagcacucaagcagcaaucgaucaaaucaaugggaagcugaauagauugaucgggaaaaccaacgagaaauuccaucagauugaaaaagaauucucagaagucgaagggagaauucaggaccuugagaaauauguugaggacacuaaaauagaucucuggucauacaacgcggagcuucuuguugcccuggaaaaccaacauacaauugaucuaacugacucagaaaugaacaaacuguuugaaaaaacaaagaagcaacugagagaaaaugcugaagauaugggcaauggcuguuucaaaauauaccacaaaugugacaaugccugcauaggaucaaucagaaauggaacuuauaaccacgauguauacagagaugaagcauuaaacaaccgguuccagaucaagggaguugagcugaagucaggguacaaagauuggauccuauggauuuccuuugccauaucauguuuuuugcuuuguguugcuuuguugggguucaucaugugggccugccaaaaaggcaacauuaggugcaacauuugcauuuga

SEQ ID NO: 41897 - RNA, 1701 nt, Artificial Sequence
  derived and/or modified CDS sequence (wt) from hemagglutinin__InfluenzaA__AGG13507
augaagacuaucauugcuuugagcuacauucuaugucugguuuucgcucaaaaacuuccuggaaaugacaauagcacggcaacgcugugccuugggcaccaugcaguaccaaacggaacgauagugaaaacaaucacgaaugaccgaauugaaguuacuaaugcuacugagcugguucagaauuccucaauaggugaaauaugcgacaguccucaucagauccuugauggagaaaacuguacacuaauagaugcucuauugggagacccucagugugauggcuuucaaaauaagaaaugggaucuuuuuguugaacgaagcaaagccuacagcaacuguuacccuuaugaugugccggauuaugccucccuuaggucacuaguugccucauccggcacacuggaguuuaacaaugaaagcuucaauuggacuggagucacucaaaacggaacaaguucugcuugcauaaggagaucuaauaguaguuucuuuaguagauuaaauugguugacccacuuaaacuucaaauacccagcauugaacgugacuaugccaaacaaugaacaauuugacaaauuguacauuugggggguucaccacccggguacggacaaggaccaaaucuuccuguaugcucaaucaucaggaagaaucacaguaucuaccaaaagaagccaacaagcuguaaucccgaauaucggaucuagacccagaauaaggaauaucccuagcagaauaagcaucuauuggacaauaguaaaaccaggagacauacuuuugauuaacagcacagggaaucuaauugcuccuagggguuacuucaaaauacgaagugggaaaagcucaauaaugagaucagaugcacccauuggcaaaugcaagucugaaugcaucacuccaaauggaagcauuccaaaugacaaaccauuccaaaauguaaacaggaucacauacggggccugucccagauauguuaagcaaagcacucugaaauuggcaacaggaaugcgaaauguaccagagaaacaaacuagaggcauauuuggcgcaauagcggguuucauagaaaaugguugggagggaaugguggaugguugguacgguuucaggcaucaaaauucugagggaagaggacaagcagcagaucucaaaagcacucaagcagcaaucgaucaaaucaaugggaagcugaaucgauugaucgggaaaaccaacgagaaauuccaucagauugaaaaagaauucucagaaguagaagggagaauucaggaccuugagaaauauguugaggacacuaaaauagaucucuggucauacaacgcggagcuucuuguugcccuggagaaccaacauacaauugaucuaacugacucagaaaugaacaaacuguuugaaaaaacaaagaagcaacugagggaaaaugcugaggauaugggcaaugguuguuucaaaauauaccacaaaugugacaaugccugcauaggaucaaucagaaauggaacuuaugaccacgauguauacagggaugaagcauuaaacaaccgguuccagaucaagggaguugagcugaagucaggguacaaagauuggauccuauggauuuccuuugccauaucauguuuuuugcuuuguguugcuuuguugggguucaucaugugggccugccaaaagggcaacauuaggugcaacauuugcauuuga

SEQ ID NO: 41898 - RNA, 1701 nt, Artificial Sequence
  derived and/or modified CDS sequence (wt) from hemagglutinin__InfluenzaA__AGG13519
augaagacuaucauugcuuugagcuacauucuaugucuaguuuucgcccaaaaacuuccuggaaaugacaacagcacggcaacgcugugccuugggcaccaugcaguaccaaacggaacgauagugaaaacaaucacgaaugaccaaauugaaguuacuaaugcuacugagcugguucagaguuccucaacaggugaaauaugcgacaguccucaucagauccuugauggagaaaacugcacacuaauagaugcucuauugggagacccucagugugauggcuuccaaaauaagaaaugggaccuuuuuguugaacgaagcaaagccuacagcaacuguuacccuuaugaugugccggauuaugccucccuuaggucacuaguugccucauccggcacacuggaguuuaacaaugaaagcuucaauuggacuggagucacucaaaacggaacaagcucugcuugcauaaggagaucugauaguaguuucuuuaguagauugaauugguugacccacuuaaacuucaaauacccagcauugaacgugacuaugccaaacaaugaacaauuugacaaauuguacauuugggggguucaccacccggguacggacaaggaccaaaucuuccuguaugcucaagcaucaggaagaaucacaguaucuaccaaaagaagccaacaaucugugaucccgaauaucggaucuagacccagaauaaggaauaucccuagcagaauaagcaucuauuggacaauaguaaaaccgggagacauacuuuugauuaacagcacagggaaucuaauugcuccuagggguuacuucaaaauacaaagugggaaaagcucaauaaugagaucagaugcacccauuggaaaaugcaauucugaaugcaucacuccaaauggaagcauucccaaugacaaaccauuccaaaauguaaacaggaucacauacggggccuguccuagauauguuaagcaaaacacucugaaauuggcaacaggaaugcgaaauguaccagagaaacaaacuagaggcauauuuggcgcaauagcggguuucauagaaaauggaugggagggaaugguggaugguugguacgguuucaggcaucaaaauucugagggaagaggacaagcagcagaucucaaaagcacucaagcagcaaucgaucaaaucaaugggaagcugaauagauugaucgggaaaaccaacgagaaauuccaucagauugaaaaagaauucucagaagucgaagggagaguucaggaccuugagaaauauguugaggacacuaaaauagaucucuggucauacaacgcggagcuucuuguugcccuggaaaaccaacauacaauugaucuaacugacucagaaaugaacaaacuguuugaaaaaacaaagaagcaacugagagaaaaugcugaagauaugggcaauggcuguuucaaaauauaccacaaaugugacaaugccugcauaggaucaaucagaaauggaacuuauaaccacgauguauacagagaugaagcauuaaacaaccgguuccagaucaagggaguugagcugaagucaggguacaaagauuggauccuauggauuuccuuugccauaucauguuuuuugcuuuguguugcuuuguugggguucaucaugugggccugccaaaaaggcaacauuaggugcaacauuugcauuuga

SEQ ID NO: 41899 - RNA, 1701 nt, Artificial Sequence
  derived and/or modified CDS sequence (wt) from hemagglutinin__InfluenzaA__AGG13531
augaagacuaucauugcuuugagcuacauucuaugucugguuuucgcucaaaaacuuccuggaaaugacaauagcacggcaacgcugugccuugggcaccaugcaguaccaaacggaacgauagugaaaacaaucacgaaugaccgaauugaaguuacuaaugcuacugagcugguucagaauuccucaauaggugaaauaugcgacaguccucaucagauccuugauggagaaaacuguacacuaauagaugcucuauugggagacccucagugugauggcuuucaaaauaagaaaugggaccuuuuuguugaacgaagcaaagccuacagcaacuguuacccuuaugaugugccggauuaugccucccuuaggucacuaguugccucauccggcacacuggaguuuaacaaugaaagcuucaauuggacuggagucacucaaaacggaacaaguucugcuugcauaaggagaucuaauaguaguuucuuuaguagauuaaauugguugacccacuuaaacuucaaauacccagcauugaacgugacuaugccaaacaaugaacaauuugacaaauuguacauuugggggguucaccacccggguacggacaaggaccaaaucuuccuguaugcucaaucaucaggaagaaucacaguaucuaccaaaagaagccaacaagcuguaaucccgaauaucggaucuagacccagaauaaggaauaucccuagcagaauaagcaucuauuggacaauaguaaaaccaggagacauacuuuugauuaacagcacagggaaucuaauugcuccuagggguuacuucaaaauacgaagugggaaaagcucaauaaugagaucagaugcacccauuggcaaaugcaagucugaaugcaucacuccaaauggaagcauuccaaaugacaaaccauuccaaaauguaaacaggaucacauacggggccugucccagauauguuaagcaaagcacucugaaauuggcaacaggaaugcgaaauguaccagagaaacaaacuagaggcauauuuggcgcaauagcggguuucauagaaaaugguugggagggaaugguggaugguugguacgguuucaggcaucaaaauucugagggaagaggacaagcagcagaucucaaaagcacucaagcagcaaucgaucaaaucaaugggaagcugaaucgauugaucgggaaaaccaacgagaaauuccaucagauugaaaaagaauucucagaaguagaagggagaauucaggaccuugagaaauauguugaggacacuaaaauagaucucuggucauacaacgcggagcuucuuguugcccuggagaaccaacauacaauugaucuaacugacucagaaaugaacaaacuguuugaaaaaacaaagaagcaacuaagggaaaaugcugaggauaugggcaaugguuguuucaaaauauaccacaaaugugacaaugccugcauaggaucaaucagaaauggaacuuaugaccacgauguauacagggaugaagcauuaaacaaccgguuccagaucaagggaguugagcugaagucaggguacaaagauuggauccuauggauuuccuuugccauaucauguuuuuugcuuuguguugcuuuguugggguucaucaugugggccugccaaaagggcaacauuaggugcaacauuugcauuuga

SEQ ID NO: 41900 - RNA, 1701 nt, Artificial Sequence
  derived and/or modified CDS sequence (wt) from hemagglutinin__InfluenzaA__AGG13543
augaagacuaucauugcuuugagcuacauucuaugucugguuuucgcucaaaaacuuccuggaaaugacaauagcacggcaacgcugugccuugggcaccaugcaguaccaaacggaacgauagugaaaacaaucacgaaugaccgaauugaaguuacuaaugcuacugagcugguucagaauuccucaauaggugaaauaugcgacaguccucaucagauucuugauggagaaaacugcacacuaauagaugcucuauugggagacccucagugugauggcuuucaaaauaagaaaugggaccuuuuuguugaacgaagcaaagccuacagcaacuguuacccuuaugaugugccggauuaugccucccuuaggucacuaguugccucauccggcacacuggaguuuaacaaugaaagcuucaauuggacuggagucacucaaaacggaacaaguucugcuugcauaaggagaucuaauaguaguuucuuuaguagauuaaauugguugacccacuuaaacuucaaauacccagcauugaacgucacuaugccaaacaaugaacaauuugacaaauuguacauuugggggguucaccacccggguacggacaaggaccaaaucuuccuguaugcucaaucaucaggaagaaucacaguaucuaccaaaagaagccaacaagcuguaaucccaaauaucggaucuagacccagaauaaggaauaucccuagcagaauaagcaucuauuggacaauaguaaaaccgggagacauacuuuugauuaacagcacagggaaucuaauugcuccuagggguuacuucaaaauacgaagugggaaaagcucaauaaugagaucagaugcacccauuggcaaaugcaagucugaaugcaucacuccaaauggaagcauucccaaugacaaaccauuccaaaauguaaacaggaucacauacggggccugucccagauauguuaagcaaagcacucugaaauuggcaacaggaaugcgaaauguaccagagaaacaaacuagaggcauauuuggcgcaauagcagguuucauagaaaaugguugggagggaaugguggaugguugguacgguuucaggcaucaaaauucugagggaagaggacaagcagcagaucucaaaagcacccaagcagcaaucgaucaaaucaaugggaagcugaaucgauugaucgggaaaaccaacgagaaauuccaucagauugaaaaagaauucucagaaguagaagggagaauucaggacauugagaaauauguugaggacacuaaaauagaucucuggucauacaacgcggagcuucuuguugcccuggagaaccaacauacaauugaucuaacugacucagaaaugaacaaacuguuugaaaaaacaaagaagcaacugagggaaaaugcugaggauaugggcaaugguuguuucaaaauauaccacaaaugugacaaugccugcauaggaucaauaagaaauggaacuuaugaccacaauguguacagggaugaagcauuaaacaaccgguuccagaucaagggaguugagcugaagucaggguacaaagauuggauccuauggauuuccuuugccauaucauguuuuuugcuuuguguugcuuuguugggguucaucaugugggccugccaaaagggcaacauuaggugcaacauuugcauuuga

SEQ ID NO: 41901 - RNA, 1701 nt, Artificial Sequence
  derived and/or modified CDS sequence (wt) from hemagglutinin__InfluenzaA__AGG13555
augaagacuaucauugcuuugagcuacauucuaugucugguuuucgcucaaaaacuuccuggaaaugacaauagcacggcaacgcugugccuugggcaccaugcaguaccaaacggaacgauagugaaaacaaucacgaaugaccgaauugaaguuacuaaugcuacugagcugguucagaauuccucaauaggugaaauaugcgacaguccucaucagauccuugauggagaaaacuguacacuaauagaugcucuauugggagacccucagugugauggcuuucaaaauaagaaaugggaccuuuuuguugaacgaagcaaagccuacagcaacuguuacccuuaugaugugccggauuaugccucccuuaggucacuaguugccucauccggcacacuggaguuuaacaaugaaagcuucaauuggacuggagucacucaaaacggaacaaguucugcuugcauaaggagaucuaauaguaguuucuuuaguagauuaaauugguugacccacuuaaacuucaaauacccagcauugaacgugacuaugccaaacaaugaacaauuugacaaauuguacauuugggggguucaccacccggguacggacaaggaccaaaucuuccuguaugcucaaucaucaggaagaaucacaguaucuaccaaaagaagccaacaagcuguaaucccgaauaucggaucuagacccagaauaaggaauaucccuagcagaauaagcaucuauuggacaauaguaaaaccaggagacauacuuuugauuaacagcacagggaaucuaauugcuccuagggguuacuucaaaauacgaagugggaaaagcucaauaaugagaucagaugcacccauuggcaaaugcaagucugaaugcaucacuccaaauggaagcauuccaaaugacaaaccauuccaaaauguaaacaggaucacauacggggccugucccagauauguuaagcaaagcacucugaaauuggcaacaggaaugcgaaauguaccagagaaacaaacuagaggcauauuuggcgcaauagcggguuucauagaaaaugguugggagggaaugguggaugguugguacgguuucaggcaucaaaauucugagggaagaggacaagcagcagaucucaaaagcacucaagcagcaaucgaucaaaucaaugggaagcugaaucgauugaucgggaaaaccaacgagaaauuccaucagauugaaaaagaauucucagaaguagaagggagaauucaggaccuugagaaauauguugaggacacuaaaauagaucucuggucauacaacgcggagcuucuuguugcccuggagaaccaacauacaauugaucuaacugacucagaaaugaacaaacuguuugaaaaaacaaagaagcaacugagggaaaaugcugaggauaugggcaaugguuguuucaaaauauaccacaaaugugacaaugccugcauaggaucaaucagaaauggaacuuaugaccacgauguauacagggaugaagcauuaaacaaccgguuccagaucaagggaguugagcugaagucaggguacaaagauuggauccuauggauuuccuuugccauaucauguuuuuugcuuuguguugcuuuguugggguucaucaugugggccugccaaaagggcaacauuaggugcaacauuugcauuuga

SEQ ID NO: 41902 - RNA, 1701 nt, Artificial Sequence; identical to SEQ ID NO: 41901
  derived and/or modified CDS sequence (wt) from hemagglutinin__InfluenzaA__AGG13567

SEQ ID NO: 41903 - RNA, 1701 nt, Artificial Sequence
  derived and/or modified CDS sequence (wt) from hemagglutinin__InfluenzaA__AGG13591
augaagacuaucauugcuuugagcuacauucuaugucugguuuucgcucaaaaacuuccuggaaaugacaauagcacggcaacgcugugccuugggcaccaugcaguaccaaacggaacgauagugaaaacaaucacgaaugaccgaauugaaguuacuaaugcuacugagcugguucagaauuccucaauaggugaaauaugcgacaguccucaucaaauccuugauggagaaaacugcacgcuaauagaugcucuauugggagacccucagugugauggcuuucaaaauaagaaaugggaccuuuuuguugaacgaagcaaagccuacagcaacuguuacccuuaugaugugccggauuaugccucccuuaggucacuaguugccucauccggcacacuggaguuuaacaaugaaaacuucaauuggacuggagucacucaaaacggaacaaguucugcuugcauaaggagaucuaauaguaguuucuuuaguagauuaaauugguugacccacuuaaacuucaaauacccagcauugaacgugacuaugccaaacaaugaacaauuugacaaauuguacauuugggggguucaccacccgggcacagacaaggaccaaaucuuccuguaugcucaaucaucaggaagaaucacaguaucuaccaaaagaagccaacaagcuguaaucccgaauaucggaucuagacccagaauaaggaauaucccuagcagaauaagcaucuauuggacaauaguaaaaccgggagacauacuuuugauuaacagcacagggaaucuaauugcuccuagggguuacuucaaaauacgaagugggaaaagcucaauaaugagaucagaugcacccauuggcaaaugcaagucugaaugcaucacuccaaauggaagcauucccaaugacagaccauuccaaaauguaaacaggaucacauacggggccugucccagauauguuaagcaaagcacucugaaauuggcaacaggaaugcgaaauguaccagagaaacaaacuagaggcauauuuggcgcaauagcggguuucauagaaaaugguugggagggaaugguggaugguugguacgguuucaggcaucaaaauucugagggaagaggacaagcagcagaucucaaaagcacucaagcagcaaucgaucaaaucaaugggaagcugaaucgauugaucgggaaaaccaacgagaaauuccaucagauugaaaaagaauucucagaaguagaagggagaauucaggaccuugagaaauauguugaggacacuaaaauagaucucuggucauacaacgcggagcuucuuguugcccuggagaaccaacauacaauugaucuaacugacucagaaaugaacaaacuguuugaaaaaacaaagaagcaacugagggaaaaugcugaggauaugggcaaugguuguuucaaaauauaccacaaaugugacaaugccugcauaggaucaaucagaaauggaacuuaugaccacgauguguacagggaugaagcauuaaacaaccgguuccagaucaagggaguugagcugaagucaggguacaaagauuggauccuauggauuuccuuugccauaucauguuuuuugcuuuguguugcuuuguugggguucaucaugugggccugccaaaagggcaacauuaggugcaacauuugcauuuga

SEQ ID NO: 41904 - RNA, 1701 nt, Artificial Sequence
  derived and/or modified CDS sequence (wt) from hemagglutinin__InfluenzaA__AGG13615
augaagacuaucauugcuuugagcuacauucuaugucugguuuucgcucaaaaaauuccuggaaaugacaauagcacggcaacgcugugccuugggcaccaugcaguaccaaacggaacgauagugaaaacaaucacgaaugaccgaauugaaguuacuaaugcuacugagcugguucagaauuccucaauaggugaaauaugcgacaguccucaucagauccuugauggagaaaacugcacacuaauagaugcucuauugggagacccucagugugauggcuuucaaaauaagaaaugggaccuuuuuguugaacgaagcaaagccuacagcaacuguuacccuuaugaugugccggauuaugccucccuuaggucacuaguugccucauccggcacacuggaguuuaacaaugaaagcuucaauuggacuggagucacucaaaacggaacaaguucugcuugcauaaggagaucuaauaguaguuucuuuaguagauuaaauugguugacccacuuaaacuucaaauacccagcauugaacgugacuaugccaaacaaugaacaauuugacaaauuguacauuugggggguucaccacccggguacggacaaggaccaaaucuuccuguaugcucaaucaucaggaagaaucacaguaucuaccaaaagaagccaacaagcuguaaucccgaauaucggaucuagacccagaauaaggaauaucccuagcagaauaagcaucuauuggacaauaguaaaaccgggagacauacuuuugauuaacagcacagggaaucuaauugcuccuagggguuacuucaaaauacgaagugggaaaagcucaauaaugagaucagaugcacccauuggcaaaugcaagucugaaugcaucacuccaaauggaagcauucccagugacaaaccauuccaaaauguaaacaggaucacauacggggccugucccagauauguuaagcaaagcacucugaaauuggcaacaggaaugcgaaauguaccagagaaacaaacuagaggcauauuuggcgcaauagcggguuucauagaaaaugguugggagggaaugguggaugguugguacgguuucaggcaucaaaauucugagggaagaggacaagcagcagaucucaaaagcacucaagcagcaaucgaucaaaucaaugggaagcugaaucgauugaucgggaaaaccaacgagaaauuccaucagauugaaaaagaauucucagaaguagaagggagaauucaggaccuugagaaauauguugaggacacuaaaauagaucucuggucauacaacgcggagcuucuuguugcccuggagaaccaacauacaauugaucuaacugacucagaaaugaacaaacuguuugaaaaaacaaagaagcaacugagggaaaaugcugaggauaugggcaaugguuguuucaaaauauaccacaaaugugacaaugccugcauaggaucaaucagaaauggaacuuaugaccacgauguguacagggaugaagcauuaaacaaccgguuccagaucaagggaguugagcugaagucaggguacaaagauuggauccuauggauuuccuuugccauaucauguuuuuugcuuuguguugcuuuguugggguucaucaugugggccugccaaaagggcaacauuaggugcaacauuugcauuuga

SEQ ID NO: 41905 - RNA, 1701 nt, Artificial Sequence
  derived and/or modified CDS sequence (wt) from hemagglutinin__InfluenzaA__AGG13627
augaagacuaucauugcuuugagcuacauucuaugucugguuuucgcucaaaaacuuccuggaaaugacaauagcacggcaacgcugugccuugggcaccaugcaguaccaaacggaacgauagugaaaacaaucacgaaugaccgaauugaaguuacuaaugcuacugagcugguucagaauuccucaauaggugaaauaugcgacaguccucaucaaauccuugauggagaaaacugcacgcuaauagaugcucuauugggagacccucagugugauggcuuucaaaauaagaaaugggaccuuuuuguugaacgaagcaaagccuacagcaacuguuacccuuaugaugugccggauuaugccucccuuaggucacuaguugccucauccggcacacuggaguuuaacaaugaaaacuucaauuggacuggagucacucaaaacggaacaaguucugcuugcauaaggagaucuaauaguaguuucuuuaguagauuaaauugguugacccacuuaaacuucaaauacccagcauugaacgugacuaugccaaacaaugaacaauuugacaaauuguacauuugggggguucaccacccgggcacggacaaggaccaaaucuuccuguaugcucaaucaucaggaagaaucacaguaucuaccaaaagaagccaacaagcuguaaucccgaauaucggaucuagacccagaauaaggaauaucccuagcagaauaagcaucuauuggacaauaguaaaaccgggagacauacuuuugauuaacagcacagggaaucuaauugcuccuagggguuacuucaaaauacgaagugggaaaagcucaauaaugagaucagaugcacccauuggcaaaugcaagucugaaugcaucacuccaaauggaagcauucccaaugacagaccauuccaaaauguaaacaggaucacauacggggccugucccagauauguuaagcaaagcacucugaaauuggcaacaggaaugcgaaauguaccagagaaacaaacuagaggcauauuuggcgcaauagcggguuucauagaaaaugguugggagggaaugguggaugguugguacgguuucaggcaucaaaauucugagggaagaggacaagcagcagaucucaaaagcacucaagcagcaaucgaucaaaucaaugggaagcugaaucgauugaucgggaaaaccaacgagaaauuccaucagauugaaaaagaauucucagaaguagaagggagaauucaggaccuugagaaauauguugaggacacuaaaauagaucucuggucauacaacgcggagcuucuuguugcccuggagaaccaacauacaauugaucuaacugacucagaaaugaacaaacuguuugaaaaaacaaagaagcaacugagggaaaaugcugaggauaugggcaaugguuguuucaaaauauaccacaaaugugacaaugccugcauaggaucaaucagaaauggaacuuaugaccacgauguguacagggaugaagcauuaaacaaccgguuccagaucaagggaguugagcugaagucaggguacaaagauuggauccuauggauuuccuuugccauaucauguuuuuugcuuuguguugcuuuguugggguucaucaugugggccugccaaaagggcaacauuaggugcaacauuugcauuuga

SEQ ID NO: 41906 - RNA, 1701 nt, Artificial Sequence
  derived and/or modified CDS sequence (wt) from hemagglutinin__InfluenzaA__AGG13639
augaagacuaucauugcuuugagcuacauucuaugucugguuuucgcucaaaaacuuccuggaaaugacaauagcacggcaacgcugugccuugggcaccaugcaguaccaaacggaacgauagugaaaacaaucacgaaugaccgaauugaaguuacuaaugcuacugagcugguucagaauuccucaauaggugaaauaugcgacaguccucaucagauccuugauggagaaaacugcacacuaauagaugcucuauugggagacccucagugugauggcuuucaaaauaagaaaugggaccuuuuuguugaacgaagcaaagccuacagcaacuguuacccuuaugaugugccggauuaugccucccuuaggucacuaguugccucauccggcacacuggaguuuaacaaugaaagcuucaauugggcuggagucacucaaaacggaacaaguucugcuugcauaaggggaucuaauaguaguuucuuuaguagauuaaauugguugacccacuuaaacuucaaauacccagcauugaacgugacuaugccaaacaaugaacaauuugacaaauuguacauuugggggguucaccacccggguacgaacaaggaccaaaucuuccuguaugcucaaucaucaggaagaaucacaguaucuaccaaaagaagccaacaagcuguaaucccgaauaucggaucuagacccagaauaaggaauaucccuagcagaauaagcaucuauuggacgauaguaaaaccgggagacauacuuuugauuaacagcacagggaaucuaauugcuccuagggguuacuucaaaauacgaagugggaaaagcucaauaaugagaucagaugcacccauuggcaaaugcaagucugaaugcaucacuccaaauggaagcauucccaaugacaaaccauuccaaaauguaaacaggaucacauacggggccugucccagauauguuaagcaaagcacucugaaauuggcaacaggaaugcgaaauguaccagagaaacaaacuagaggcauauuuggcgcaauagcggguuucauagaaaaugguugggagggaaugguggaugguugguacgguuucaggcaucaaaauucugagggaaggggacaagcagcagaucucaaaagcacucaagcagcaaucgaucaaaucaaugggaagcugaaucgauugaucgggaaaaccaacgagaaauuccaucagauugaaaaagaauucucagaaguagaagggagaauucaggaccuugagaaauauguugaggacacaaaaauagaucucuggucauacaacgcggagcuucuuguugcccuggagaaccaacauacaauugaucuaacugacucagaaaugaacaaacuguuugaaaaaacaaagaagcaacugagggaaaaugcugaggauaugggcaaugguuguuucaaaauauaccacaaaugugacaaugccugcauaggaucaaucagaaauggaacuuaugaccacgauguauacagggaugaagcauuaaacaaccgguuccagaucaagggaguugaguugaagucaggguacaaagauuggauccuauggauuuccuuugccauaucauguuuuuugcuuuguguugcuuuguugggguucaucaugugggccugccaaaagggcaacauuaggugcaacauuugcauuuga

SEQ ID NO: 41907 - RNA, 1701 nt, Artificial Sequence; identical to SEQ ID NO: 41896
  derived and/or modified CDS sequence (wt) from hemagglutinin__InfluenzaA__AGG13651

SEQ ID NO: 41908 - RNA, 1701 nt, Artificial Sequence; identical to SEQ ID NO: 41899
  derived and/or modified CDS sequence (wt) from hemagglutinin__InfluenzaA__AGG13663

SEQ ID NO: 41909 - RNA, 1701 nt, Artificial Sequence; identical to SEQ ID NO: 41896
  derived and/or modified CDS sequence (wt) from hemagglutinin__InfluenzaA__AGG13675

SEQ ID NO: 41910 - RNA, 1701 nt, Artificial Sequence; identical to SEQ ID NO: 41901
  derived and/or modified CDS sequence (wt) from hemagglutinin__InfluenzaA__AGG13687

SEQ ID NO: 41911 - RNA, 1701 nt, Artificial Sequence; identical to SEQ ID NO: 41896
  derived and/or modified CDS sequence (wt) from hemagglutinin__InfluenzaA__AGG13711

SEQ ID NO: 41912 - RNA, 1701 nt, Artificial Sequence
  derived and/or modified CDS sequence (wt) from hemagglutinin__InfluenzaA__AGG13723
augaagacuaucauugcuuugagcuacauucuaugucugguuuucgcucaaaaacuuccuggaaaugacaauagcacggcaacgcugugccuugggcaccaugcaguaccaaacggaacgauagugaaaacaaucacgaaugaccgaauugaaguuacuaaugcuacugagcugguucagaauuccucaauaggugaaauaugcgacaguccucaucagauccuugauggagaaaacuguacacuaauagaugcucuauugggagacccucagugugauggcuuucaaaauaagaaaugggaccuuuuuguugaacgaagcaaagccuacagcaacuguuacccuuaugaugugccggauuaugccucccuuaggucacuaguugccucauccggcacacuggaguuuaacaaugaaagcuucaauuggacuggagucacucaaaacggaacaaguucugcuugcauaaggagauccaauaguaguuucuuuaguagauuaaauugguugacccacuuaaacuucaaauacccagcauugaacgugacuaugccaaacaaugaacaauuugacaaauuguacauuugggggguucaccacccggguacggacaaggaccaaaucuuccuguaugcucaaucaucaggaagaaucacaguaucuaccaaaagaagccaacaagcuguaaucccgaauaucggaucuagacccagaauaaggaauaucccuagcagaauaagcaucuauuggacaauaguaaaaccaggagacauacuuuugauuaacagcacagggaaucuaauugcuccuagggguuacuucaaaauacgaagugggaaaagcucaauaaugagaucagaugcacccauuggcaaaugcaagucugaaugcaucacuccaaauggaagcauuccaaaugacaaaccauuccaaaauguaaacaggaucacauacggggccugucccagauauguuaagcaaagcacucugaaauuggcaacaggaaugcgaaauguaccagagaaacaaacuagaggcauauuuggcgcaauagcggguuucauagaaaaugguugggagggaaugguggaugguugguacgguuucaggcaucaaaauucugagggaagaggacaagcagcagaucucaaaagcacucaagcagcaaucgaucaaaucaaugggaagcugaaucgauugaucgggaaaaccaacgagaaauuccaucagauugaaaaagaauucucagaaguagaagggagaauucaggaccuugagaaauauguugaggacacuaaaauagaucucuggucauacaacgcggagcuucuuguugcccuggagaaccaacauacaauugaucuaacugacucagaaaugaacaaacuguuugaaaaaacaaagaagcaacugagggaaaaugcugaggauaugggcaaugguuguuucaaaauauaccacaaaugugacaaugccugcauaggaucaaucagaaauggaacuuaugaccacgauguauacagggaugaagcauuaaacaaccgguuccagaucaagggaguugagcugaagucaggguacaaagauuggauccuauggauuuccuuugccauaucauguuuuuugcuuuguguugcuuuguugggguucaucaugugggccugccaaaagggcaacauuaggugcaacauuugcauuuga

SEQ ID NO: 41913 - RNA, 1701 nt, Artificial Sequence; identical to SEQ ID NO: 41901
  derived and/or modified CDS sequence (wt) from hemagglutinin__InfluenzaA__AGG13735

SEQ ID NO: 41914 - RNA, 1701 nt, Artificial Sequence; identical to SEQ ID NO: 41901
  derived and/or modified CDS sequence (wt) from hemagglutinin__InfluenzaA__AGG13747

SEQ ID NO: 41915 - RNA, 1701 nt, Artificial Sequence
  derived and/or modified CDS sequence (wt) from hemagglutinin__InfluenzaA__AGG13759
augaagaccaucauugcuuugagcuacauucuaugucuaguuuucgcucaagaacuuccuggaaaugacgacagcacggcaacgcugugccuugggcaccaugcagugccaaacggaacgauagugaaaacaaucacgaaugaccgaauugaaguuacuaaugcuacugagcugguucagaguuccucaacaggugaaauaugcaacaguccucaucagauccuugauggagaaaacugcacacuaauagaugcucuauugggagacccucagugugauggcuuccaaaacaagaaaugggaccuuuuuguugaaagaagcaaagcccacagcaacuguuacccuuaugaugugccggauuaugccucccuuaggucacuaguugccucauccggcacacuggaguuuaacaaugaaagcuucaauuggacuggagucacucaaaacggaacaagcucugcuugcauaaggagaucuaauaauaguuucuuuaguagauugaauugguugacccacuuaaacuucaaauacccagcauugaacgugacuaugccaaacaaugaacaauuugacaaauuguacauuugggggguucaccacccggguacggacaaggaccaaaucuuccuguaugcucaagcaucaggaagaaucacaguaucuaccaaaagaagccaacaaacuguaauuccgaauaucggaucuagacccagaguaaggaauaucccuagcagaguaagcaucuauuggacaauaguaaaaccaggagacauacuuuugauuaacagcacagggaaucuaauugcuccuagggguuacuucaaaauacgaaguggaaaaagcucaauaaugagaucagaugcacccauuggcaaaugcaauucugcaugcaucacuccaaauggaagcauucccaaugacaaaccauuccaaaauguaaacaggaucacauacggggccugucccagauaugucaagcaaaacacucugaaauuggcaacaggaaugagaaauguaccagagaaacaaacuagaggcauauuuggugcaauagcggguuucauagaaaaugguugggagggaaugguggaugguugguacgguuucaggcaucaaaauucugagggaaggggacaagcagcagaucucaaaagcacucaagcagcaaucgaucaaaucaaugggaagcugaauagauugaucgggaaaaccaacgagaaauuccaucagauugaaaaagaauucucagaagucgaagggagaauucaggaccuugagaaauauguugaggacacuaaaauagaucucuggucauacaacgcggagcuucuuguugcccuggagaaccaacacacaauugaucuaacugacucagaaaugaacaaacuguuugaaaaaacaaagaagcaacugagggaaaaugcugaggauaugggcaaugguuguuucaaaauauaccacaaaugugacaaugccugcauaggaucaaucagaaauggaacuuaugaucacgauguguacagagaugaagcauuaaacaaccgauuccagaucaagggaguugagcugaagucaggguacaaagauuggauccuauggauuuccuuugccauaucauguuuuuugcuuuguguugcuuuguugggguucaucaugugggccugccaaaaaggcaacauuaggugcaacauuugcauuuga

SEQ ID NO: 41916 - RNA, 1701 nt, Artificial Sequence
  derived and/or modified CDS sequence (wt) from hemagglutinin__InfluenzaA__AGG13771
augaagacuaucauugcuuugagcuacauucuaugucuaguuuucgcccaaaaacuuccuggaaaugacaacagcacggcaacgcugugccuugggcaccaugcaguaccaaacggaacgauagugaaaacaaucacgaaugaccaaauugaaguuacuaaugcuacugagcugguucagaguuccucaacaggugaaauaugcgacaguccucaucagauccuugauggagaaaacugcacacuaauagaugcucuauugggagacccucagugugauggcuuccaaaauaagaaaugggaccuuuuuguugaacgaagcaaagccuacagcaacuguuacccuuaugaugugccggauuaugccucccuuaggucacuaguugccucauccggcacacuggaguuuaacaaugaaagcuucaauuggacuggagucacucaaaacggaacaagcucugcuugcauaaggagaucugauaguaguuucuuuaguagauugaauugguugacccacuuaaacuucaaauacccagcauugaacgugacuaugccaaacaaugaacaauuugacaaauuguacauuugggggguucaccacccggguacggacaaggaccaaaucuuccuguaugcucaagcaucaggaagaaucacaguaucuaccaaaagaagccaacaaucugugaucccgaauaucggaucuagacccagaauaaggaauaucccuagcagaauaagcaucuauuggacaauaguaaaaccgggagacauacuuuugauuaacagcacagggaaucuaauugcuccuagggguuacuucaaaauacaaagugggaaaagcucaauaaugagaucagaugcacccauuggaaaaugcaauucugaaugcaucacuccaaauggaagcauucccaaugacaaaccauuccaaaauguaaacaggaucacauacggggccuguccuagauauguuaagcaaaacacucugaaauuggcaacaggaaugcgaaauguaccagagaaacaaacuagaggcauauuuggcgcaauagcggguuucauagaaaaugguugggagggaaugguggaugguugguacgguuucaggcaucaaaauucugagggaagaggacaagcagcagaucucaaaagcacucaagcagcaaucgaucaaaucaaugggaagcugaauagauugaucgggaaaaccaacgagaaauuccaucagauugaaaaagaauucucagaagucgaagggagaauucaggaccuugagaaauauguugaggauaauaaaauagaucucuggucauacaacgcggagcuucuuguugcccuggaaaaccaacauacaauugaucuaacugacucagaaaugaacaaacuguuugaaaaaacaaagaagcaacugagagaaaaugcugaagauaugggcaauggcuguuucaaaauauaccacaaaugugacaaugccugcauaggaucaaucagaaauggaacuuauaaccacgauguauacagagaugaagcauuaaacaaccgguuccagaucaagggaguugagcugaagucaggguacaaagauuggauccuauggauuuccuuugccauaucauguuuuuugcuuuguguugcuuuguugggguucaucaugugggccugccaaaaaggcaacauuaggugcaacauuugcauuuga

SEQ ID NO: 41917 - RNA, 1701 nt, Artificial Sequence
  derived and/or modified CDS sequence (wt) from hemagglutinin__InfluenzaA__AGG13783
augaagacuaucauugcuuugagcuacauucuaugucugguuuucgcucaaaaacuuccuggaaaugacaauagcacggcaacgcugugccuugggcaccaugcaguaccaaacggaacgauagugaaaacaaucacgaaugaccaaauugaaguuacuaaugcuacugagcugguucagaauuccucaaugggugaaauaugcgacaguccucaucagauccuugauggagaaaacugcacacuaauagaugcucuauugggagacccucagugugauggcuuucaaaauaagaaaugggaccuuuuuguugaacgaagcaaagccuacagcaacuguuacccuuaugaugugccggauuaugccucccuuaggucacuaguugccucauccggcacacuggaguuuaacaaugaaagcuucaauugggcuggagucacucaaaacggaacaaguucugcuugcauaaggggaucuaauaguaguuucuuuaguagauuaaauugguugacccacuuaaacuucaaguacccagcauugaacgugacuaugccaaacaaugaacaauuugacaaauuguacauuugggggguucaccacccggguacggacaaggaccaaaucuuccuguaugcucaaucaucaggaagaaucacaguaucuaccaaaagaagccaacaagcuguaaucccgaauaucggaucuagacccagaauaaggaaugucccuagcagaauaagcaucuauuggacaauaguaaaaccgggagacauacuuuugauuaacagcacagggaaucuaauugcuccuagggguuacuucaaaauacgaagugggaaaagcucaauaaugagaucagaugcacccauuggcaaaugcaagucugaaugcaucacuccaaauggaagcauucccaaugacaaaccauuccaaaauguaaacaggaucacauacggggccugucccagauauguuaagcaaagcacucugaaauuggcaacaggaaugcgaaauguaccagagaaacaaacuagaggcauauuuggcgcaauagcggguuucauagaaaaugguugggagggaaugguggaugguugguacgguuucaggcaucaaaauucugagggaagaggacaagcagcagaucucaaaagcacucaagcagcaaucgaucaaaucaaugggaagcugaaucgauugaucgggaaaaccaacgagaaauuccaucagauugagaaagaauucucagaaguagaagggagaauucaggaccuugagaaauauguugaggacacaaaaauagaucucuggucauacaacgcagagcuucuuguugcccuggagaaccaacauacaauugaucuaacugacucagaaaugaacaaacuguuugaaaaaacaaagaagcaacugagggaaaaugcugaggauaugggcaaugguuguuucaaaauauaccacaaaugugacaaugccugcauaggaucaaucagaaauggaacuuaugaccacgauguauacagggaugaagcauuaaacaaccgguuccagaucaagggaguugagcugaagucagguuacaaagauuggauccuauggauuuccuuugccauaucauguuuuuugcuuuguguugcuuuguugggguucaucaugugggccugccaaaagggcaacauuaggugcaacauuugcauuuga

SEQ ID NO: 41918 - RNA, 1701 nt, Artificial Sequence
  derived and/or modified CDS sequence (wt) from hemagglutinin__InfluenzaA__AGG13795
augaagacuaucauugcuuugagcuacauucuaugucuaguuuucgcccaaaaacuuccuggaaaugacaacagcacggcaacgcugugccuugggcaccaugcaguaccaaacggaacgauagugaaaacaaucacgaaugaccaaauugaaguuacuaaugcuacugagcugguucagaguuccucaacaggugaaauaugcgacaguccucaucagauccuugauggagaaaacugcacacuaauagaugcccuauugggagacccucagugugauggcuuccaaaauaagaaaugggaccuuuuuguugaacgaagcaaagccuacagcaacuguuacccuuaugaugugccggauuaugccucccuuaggucacuaguugccucauccggcacacuggaguuuaacaaugaaagcuucaauuggacuggagucacucaaaacggaacaagcucugcuugcauaaggagaucugauaguaguuucuuuaguagauugaauugguugacccacuuaaacuucaaauacccagcauugaacgugacuaugccaaacaaugaacaauuugacaaauuguacauuugggggguucaccacccggguacggacaaggaccaaaucuuccuguaugcucaagcaucaggaagaaucacaguaucuaccaaaagaagccaacaaucugugaucccgaauaucggaucuagacccagaauaaggaauaucccuagcagaauaagcaucuauuggacaauaguaaaaccgggagacauacuuuugauuaacagcacagggaaucuaauugcuccuagggguuacuucaaaauacaaagugggaaaagcucaauaaugagaucagaugcacccauuggaaaaugcaauucugaaugcaucacuccaaauggaagcauucccaaugacaaaccauuccaaaauguaaacaggaucacauacggggccuguccuagauauguuaagcaaaacacucugaaauuggcaacaggaaugcgaaauguaccagagaaacaaacuagaggcauauuuggcgcaauagcggguuucauagaaaaugguugggagggaaugguggaugguugguacgguuucaggcaucaaaauucugagggaagaggacaagcagcagaucucaaaagcacucaagcagcaaucgaucaaaucaaugggaagcugaauagauugaucgggaaaaccaacgagaaauuccaucagauugaaaaagaauucucagaagucgaagggagaauucaggaccuugagaaauauguugaggacacuaaaauagaucucuggucauacaacgcggagcuucuuguugcccuggaaaaccaacauacaauugaucuaacugacucagaaaugaacaaacuguuugaaaaaacaaagaagcaacugagagaaaaugcugaagauaugggcaauggcuguuucaaaauauaccacaaaugugacaaugccugcauaggaucaaucagaaauggaacuuauaaccacgauguauacagagaugaagcauuaaacaaccgguuccagaucaagggaguugagcugaagucaggguacaaagauuggauccuauggauuuccuuugccauaucauguuuuuugcuuuguguugcuuuguugggguucaucaugugggccugccaaaaaggcaacauuaggugcaacauuugcauuuga

SEQ ID NO: 41919 - RNA, 1701 nt, Artificial Sequence
  derived and/or modified CDS sequence (wt) from hemagglutinin__InfluenzaA__AGG13807
augaagaccaucauugcuuugagcuacauucuuugucuaguuuucgcucaagaacuuccuggaaaugacgacagcacggcaacgcugugccuugggcaccaugcagugccaaacggaacgauagugaaaacaaucacgaaugaccaaauugaaguuacuaaugcuacugagcugguucagaguuccucaacaggugaaauaugcaacaguccucaucagauccuugauggagaaaacugcacacuaauagaugcucuauugggagacccucagugugauggcuuccaaaacaagaaaugggaccuuuuuguugaacgaagcaaagcccacagcaacuguuacccuuaugaugugccggauuaugccucccuuaggucacuaguugccucauccggcacacuggaguuuaacaaugaaagcuucaauuggacuggagucacucaaaacggaacaagcucugcuugcauaaggagaucuaauaauaguuucuuuaguagguugaauugguugacccacuuaaacuucaaauacccagcauugaacgugacuaugccaaacaaugaacaauuugacaaauuguacauuugggggguucaccacccggguacggacaaggaccaaaucuuccuguaugcucaagcaucaggaagaaucacaguaucuaccaaaagaagccaacaagcuguaauuccgaauaucggaucuagacccagaguaaggaauaucccuagcagaguaagcaucuauuggacaauaguaaaaccaggagacauacuuuugauuaacagcacagggaaucuaauugcuccuagggguuacuucaaaauacgaagugggaaaagcucaauaaugagaucagaugcacccauuggcaaaugcaauucugcaugcaucacuccaaauggaagcauucccaaugacaaaccauuccaaaauguaaacaggaucacauacggggccugucccagauaugucaagcaaaacacucugaaauuggcaacaggaaugagaaauguaccagagaaacaaacuagaggcauauuuggcgcaauagcggguuucauagaaaaugguugggagggaaugguggaugguugguacgguuucaggcaucaaaauucugagggaaggggacaagcagcagaucucaaaagcacucaagcagcaaucgaucaaaucaaugggaagcugaauagauugaucgggaaaaccaacgagaaauuccaucagauugaaaaagaauucucagaagucgaagggagaauucaggaccuugagaaauauguugaggacacuaaaauagaucucuggucauacaacgcggagcuucuuguugcccuggagaaccaacacacaauugaucuaacugacucagaaaugaacaaacuguuugaaaaaacaaagaagcaacugagggaaaaugcugaggauaugggcaaugguuguuucaaaauauaccacaaaugugacaaugccugcauaggaucaaucagaaauggaacuuaugaucacgauguguacagagaugaagcauuaaacaaccgauuccagaucaaaggaguugagcugaagucaggguacaaagauuggauccuauggauuuccuuugccauaucauguuuuuugcuuuguguugcuuuguugggguucaucaugugggccugccaaaaaggcaacauuaggugcaacauuugcauuuga

SEQ ID NO: 41920 - RNA, 1701 nt, Artificial Sequence; identical to SEQ ID NO: 41896
  derived and/or modified CDS sequence (wt) from hemagglutinin__InfluenzaA__AGG13819

SEQ ID NO: 41921 - RNA, 1701 nt, Artificial Sequence; identical to SEQ ID NO: 41896
  derived and/or modified CDS sequence (wt) from hemagglutinin__InfluenzaA__AGG13831

SEQ ID NO: 41922 - RNA, 1701 nt, Artificial Sequence
  derived and/or modified CDS sequence (wt) from hemagglutinin__InfluenzaA__AGG13855
augaagacuaucauugcuuugagcuacauucuaugucugguuuucgcucaaaaacuuccuggaaaugacaauagcacggcaacgcugugccuugggcaccaugcaguaccaaacggaacgauagugaaaacaaucacgaaugaccgaauugaaguuacuaaugcuacugagcugguucagaauuccucaauaggugaaauaugcgacaguccucaucagauccuugauggagaaaacuguacacuaauagaugcucuauugggagacccucagugugauggcuuucaaaauaagaaaugggaccuuuuuguugaacgaagcaaagccuacagcaacuguuacccuuaugaugugccggauuaugccucccuuaggucacuaguugccucauccggcacacuggaguuuaacaaugaaagcuucaauuggacuggagucacucaaaacggaacaaguucugcuugcauaaggagaucuaauaguaguuucuuuaguagauuaaauugguugacccacuuaaacuucaaauacccagcauugaacgugacuaugccaaacaaugaacaauuugacaaauuguacauuugggggguucaccacccggguacggacaaggaccaaaucuuccuguaugcucaaucaucaggaagaaucacaguaucuaccaaaagaagccaacaagcuguaaucccgaauaucggaucuagacccagaauaaggaauaucccuagcagaauaagcaucuauuggacaauaguaaaaccaggagacauacuuuugauuaacagcacagggaaucuaauugcuccuagggguuacuucaaaauacgaagugggaaaagcucaauaaugagaucagaugcacccauuggcaaaugcaagucugaaugcaucacuccaaauggaagcauuccaaaugacaaaccauuccaaaauguaaacaggaucacauacggggccugucccagauauguuaagcaaagcacucugaaguuggcaacaggaaugcgaaauguaccagagaaacaaacuagaggcauauuuggugcaauagcggguuucauagaaaaugguugggagggaaugguggaugguugguacgguuucaggcaucaaaauucugagggaagaggacaagcagcagaucucaaaagcacucaagcagcaaucgaucaaaucaaugggaagcugaaucgauugaucgggaaaaccaacgagaaauuccaucagauugaaaaagaauucucagaaguagaagggagaauucaggaccuugagaaauauguugaggacacuaaaauagaucucuggucauacaacgcggagcuucuuguugcccuggagaaccaacauacaauugaucuaacugacucagaaaugaacaaacuguuugaaaaaacaaagaagcaacugagggaaaaugcugaggauaugggcaaugguuguuucaaaauauaccacaaaugugacaaugccugcauaggaucaaucagaaauggaacuuaugaccacgauguauacagggaugaagcauuaaacaaccgguuccagaucaagggaguugagcugaagucaggguacaaagauuggauccuauggauuuccuuugccauaucauguuuuuugcuuuguguugcuuuguugggguucaucaugugggccugccaaaagggcaacauuaggugcaacauuugcauuuga

SEQ ID NO: 41923 - RNA, 1701 nt, Artificial Sequence
  derived and/or modified CDS sequence (wt) from hemagglutinin__InfluenzaA__AGG13867
augaagacuaucauugcuuugagcuacauucuaugucugguuuucgcucaaaaacuuccuggaaaugacaauagcacggcaacgcugugccuugggcaccaugcaguaccaaacggaacgauagugaaaacaaucacgaaugaccgaauugaaguuacuaaugcuacugagcugguucagaauuccucaauagguaaaauaugcgacaguccucaucagauccuugauggagaaaauugcacacuaauggaugcucuauugggagacccucagugugauggcuuucaaaauaagaaaugggaccuuuuuguugaacgaagcaaagccuacagcaacuguuacccuuaugaugugccggauuaugccucccuuaggucacuaguugccucauccggcacacuggaguuuaacaaugaaagcuucaauuggacuggagucacucaaaacggaacaaguucugcuugcauaaggagauccaauaguaguuucuuuaguagauuaaauugguugacccacuuaaacuucaaauacccagcauugaacgugacuaugccaaacaaugaacaauuugacaaauuguacauuuggggaguucaccacccggguacggacaaggaccaaaucuuccuguaugcucaaucaucaggaagaaucacaguaucuaccaaaagaagccaacaagcuguaaucccaaauaucggaucuagacccagaauaaggaauaucccuagcagaauaagcaucuauuggacaauaguaaaaccgggagacauacuuuugauuaacagcacagggaaucuaauugcuccuagggguuacuucaaaauacgaagugggaaaagcucaauaaugagaucagaugcacccauuggcaaaugcaagucugaaugcaucacuccaaauggaagcauucccaaugacaaaccauuccaaaauguaaacaggaucacauacggggccugucccagauauguuaagcaaagcacucugaaauuggcaacaggaaugcgaaauguaccagagaaacaaacuagaggcauauuuggcgcaauagcggguuucauagaaaaugguugggagggaaugguggaugguugguacgguuucaggcaucaaaauucugagggaagaggacaagcagcagaucucaaaagcacucaagcagcaaucgaucaaaucaaugggaagcugaaucgauugaucgggaaaaccaacgagaaauuccaucagauugaaaaagaauucucagaaguagaagggagaauucaggaccuugagaaauauguugaggacacuaaaauagaucucuggucauacaacgcggagcuucuuguugcccuggagaaucaacauacaauugaucuaacugacucagaaaugaacaaacuguuugaaaaaacaaagaagcaacugagggaaaaugcugaggauaugggcaaugguuguuucaaaauauaccacaaaugugacaaugccugcauaggaucaaucagaaauggaacuuaugaccacaauguguacagggaugaagcauuaaacaaccgguuccagaucaagggaguugagcuuaagucaggguacaaagauuggauccuauggauuuccuuugccauaucauguuuuuugcuuuguguugcuuuguugggguucaucaugugggccugccaaaagggcaacauuaggugcaacauuugcauuuga

SEQ ID NO: 41924 - RNA, 1701 nt, Artificial Sequence
  derived and/or modified CDS sequence (wt) from hemagglutinin__InfluenzaA__AGG13879
augaagacuaucauugcuuugagcuacauucuaugucugguuuucgcucaaaaacuuccuggaaaugacaauagcacggcaacgcugugccuugggcaccaugcaguaccaaacggaacgauagugaaaacaaucacgaaugaccgaauugaaguuacuaaugcuacugagcugguucagaauuccucaauaggugaaauaugcgacaguccucaucagauccuugauggagaaaacuguacacuaauagaugcucuauugggagacccucagugugauggcuuucaaaauaagaaaugggaccuuuuuguugaacgaagcaaagccuacagcaacuguuacccuuaugaugugccggauuaugccucccuuaggucacuaguugccucauccggcacacuggaguuuaacaaugaaagcuucaauuggacuggagucacucaaaacggaacaaguucugcuugcauaaggagaucuaauaguaguuucuuuaguagauuaaauugguugacccacuuaaacuucaaauacccagcauugaacgugacuaugccaaacaaugaacaauuugacaaauuguacauuugggggguucaucacccggguacggacaaggaccaaaucuuccuguaugcucaaucaucaggaagaaucacaguaucuaccaaaagaagccaacaagcuguaaucccgaauaucggaucuagacccagaauaaggaauaucccuagcagaauaagcaucuauuggacaauaguaaaaccaggagacauacuuuugauuaacagcacagggaaucuaauugcuccuagggguuacuucaaaauacgaagugggaaaagcucaauaaugagaucagaugcacccauuggcaaaugcaagucugaaugcaucacuccaaauggaagcauuccaaaugacaaaccauuccaaaauguaaacaggaucacauacggggccugucccagauauguuaagcaaagcacucugaaauuggcaacaggaaugcgaaauguaccagagaaacaaacuagaggcauauuuggcgcaauagcggguuucauagaaaaugguugggagggaaugguggaugguugguacgguuucaggcaucaaaauucugagggaagaggacaagcagcagaucucaaaagcacucaagcagcaaucgaucaaaucaaugggaagcugaaucgauugaucgggaaaaccaacgagaaauuccaucagauugaaaaagaauucucagaaguagaagggagaauucaggaccuugagaaauauguugaggacacuaaaauagaucucuggucauacaacgcggagcuucuuguugcccuggagaaccaacauacaauugaucuaacugacucagaaaugaacaaacuguuugaaaaaacaaagaagcaacuaagggaaaaugcugaggauaugggcaaugguuguuucaaaauauaccacaaaugugacaaugccugcauaggaucaaucagaaauggaacuuaugaccacgauguauacagggaugaagcauuaaacaaccgguuccagaucaagggaguugagcugaagucaggguacaaagauuggauccuauggauuuccuuugccauaucauguuuuuugcuuuguguugcuuuguugggguucaucaugugggccugccaaaagggcaacauuaggugcaacauuugcauuuga

SEQ ID NO: 41925 - RNA, 1701 nt, Artificial Sequence; identical to SEQ ID NO: 41899
  derived and/or modified CDS sequence (wt) from hemagglutinin__InfluenzaA__AGG13891

SEQ ID NO: 41926 - RNA, 1701 nt, Artificial Sequence
  derived and/or modified CDS sequence (wt) from hemagglutinin__InfluenzaA__AGG13903
augaagacuaucauugcuuugagcuacauucuaugucuaguuuucgcccaaaaacuuccuggaaaugacaacagcacggcaacgcugugccuugggcaccaugcaguaccaaacggaacgauagugaaaacaaucacgaaugaccaaauugaaguuacuaaugcuacugagcugguucagaguuccucaacaggugaaauaugcgacaguccucaucagauccuugauggagaaaacugcacacuaauagaugcucuauugggagacccucagugugauggcuuccaaaauaagaaaugggaccuuuuuguugaacgaagcaaagccuacagcaacuguuacccuuaugaugugccggauuaugccucccuuaggucacuaguugccucauccggcacacuggaguuuaacaaugaaagcuucaauuggacuggagucacucaaaacggaacaagcucugcuugcauaaggagaucugauaguaguuucuuuaguagauugaauugguugacccacuuaaacuucaaauacccagcauugaacgugacuaugccaaacaaugaacaauuugacaaauuguacauuugggggguucaccacccggguacggacaaggaccaaaucuuccuguaugcucaagcaucaggaagaaucacaguaucuaccaaaagaagccaacaaucugugcucccgaauaucggaucuagacccagaauaaggaauaucccuagcagaauaagcaucuauuggacaauaguaaaaccgggagacauacuuuugauuaacagcacagggaaucuaauugcuccuagggguuacuucaaaauacaaagugggaaaagcucaauaaugagaucagaugcacccauuggaaaaugcaauucugaaugcaucacuccaaauggaagcauucccaaugacaaaccauuccaaaauguaaacaggaucacauacggggccuguccuagauauguuaagcaaaacacucugaaauuggcaacaggaaugcgaaauguaccagagaaacaaacuagaggcauauuuggcgcaauagcggguuucauagaaaaugguugggagggaaugguggaugguugguacgguuucaggcaucaaaauucugagggaagaggacaagcagcagaucucaaaagcacucaagcagcaaucgaucaaaucaaugggaagcugaauagauugaucgggaaaaccaacgagaaauuccaucagauugaaaaagaauucucagaagucgaagggagaauucaggaccuugagaaauauguugaggacacuaaaauagaucucuggucauacaacgcggagcuucuuguugcccuggaaaaccaacauacaauugaucuaacugacucagaaaugaacaaacuguuugaaaaaacaaagaagcaacugagagaaaaugcugaagauaugggcaauggcuguuucaaaauauaccacaaaugugacaaugccugcauaggaucaaucagaaauggaacuuauaaccacgauguauacagagaugaagcauuaaacaaccgguuccagaucaagggaguugagcugaagucaggguacaaagauuggauccuauggauuuccuuugccauaucauguuuuuugcuuuguguugcuuuguugggguucaucaugugggccugccaaaaaggcaacauuaggugcaacauuugcauuuga

SEQ ID NO: 41927 - RNA, 1701 nt, Artificial Sequence; identical to SEQ ID NO: 41901
  derived and/or modified CDS sequence (wt) from hemagglutinin__InfluenzaA__AGG13927

SEQ ID NO: 41928 - RNA, 1701 nt, Artificial Sequence
  derived and/or modified CDS sequence (wt) from hemagglutinin__InfluenzaA__AGG13939
augaagacuaucauugcuuugagcuacauucuaugucugguuuucgcucaaaaacuuccuggaaaugacaauagcacggcaacgcugugccuugggcaccaugcaguaccaaacggaacgauagugaaaacaaucacgaaugaccgaauugaaguuacuaaugcuacugagcugguucagaauuccucaauaggugaaauaugcgacaguccucaucaaauccuugauggagaaaacugcacgcuaauagaugcucuauugggagacccucagugugauggcuuucaaaauaagaaaugggaccuuuuuguugaacgaagcaaagccuacagcaacuguuacccuuaugaugugccggauuaugccucccuuaggucacuaguugccucauccggcacacuggaguuuaacaaugaaaacuucaauuggacuggagucacucaaaacggaacaaguucugcuugcauaaggagaucuaauaguaguuucuuuaguagauuaaauugguugacccacuuaaacuucaaauacccagcauugaacgugacuaugccaaacaaugaacaauuugacaaauuguacauuugggggguucaccacccgggcacggacaaggaccaaaucuuccuguaugcucaaucaucaggaagaaucacaguaucuaccaaaagaagccaacaagcuguaaucccgaauaucggaucuagacccagaauaaggaauaucccuagcagaauaagcaucuauuggacaauaguaaaaccgggagacauacuuuugauuaacagcacagggaaucuaauugcuccuagggguuacuucaaaauacgaagugggaaaagcucaauaaugagaucagaugcacccauuggcaaaugcaagucugaaugcaucacuccaaauggaagcauucccaaugacagaccauuccaaaauguaaacaggaucacauacggggccugucccagauauguuaagcaaagcacucugaaauuggcaacaggaaugcgaaauguaccagagaaacaaacuagaggcauauuuggcgcaauagcggguuucauagaaaaugguugggagggaaugguggaugguugguacgguuucaggcaucaaaauucugagggaagaggacaagcagcagaucucaaaagcacucaagcagcaaucgaucaaaucaaugggaagcugaaucgauugaucgggaaaaccaacgagaaauuccaucagauugaaaaagaauucucagaaguagaagggagaauucaggaccuugagaaauauguugaggacacuaaaauagaucucuggucauacaacgcggagcuucuuguugcccuggagaaccaacauacaauugaucuaacugacucagaaaugaacaaacuguuugaaaaaacaaagaagcaacugagggaaaaugcugaggauaugggcaaugguuguuucaaaauauaccacaaaugugacaaugccugcauaggaucaaucagaaauggaacuuaugaccacgauguguacagggaugaagcauuaaacaaccgguuccagaucaagggaguugagcugaagucaggguacaaagauuggauccuauggauuuccuuugccauaucauguuuuuugcuuuguguugcuuuguugggguucauuaugugggccugccaaaagggcaacauuaggugcaacauuugcauuuga

SEQ ID NO: 41929 - RNA, 1701 nt, Artificial Sequence
  derived and/or modified CDS sequence (wt) from hemagglutinin__InfluenzaA__AGG13962
augaaggcaauacuaguaguucugcuauacacauuugcaaccgcaaaugcagacacauuauguauagguuaucaugcgaacaauucaacagacacuguagacacaguacuagaaaagaauguaacaguaacacacucuguuaaccuucuagaagacaagcauaacgggaaacuaugcaaacuaagagggguagccccauugcauuuggguaaauguaacauugcuggcuggauccugggaaauccagagugugaaucacucuccacagcaaguucaugguccuacauuguggaaacaucuaguucagacaauggaacguguuacccaggagauuucaucaauuaugaggagcuaagagagcaauugagcucagugucaucauuugaaggguuugagauauuccccaagacaaguucauggcccaaucaugacucgaacaaagguguaacggcagcauguccucaugcuggagcaaaaagcuucuacaaaaauuuaauauggcuaguuaaaaaaggaaauucauacccaaagcucagcaaauccuacauuaaugauaaagggaaagaaguccucgugcuguggggcauucaccauccaucuacuacugcugaccaacaaagucucuaucagaaugcagaugcauauguuuuuguggggacaucaagauacagcaagaaguucaagccggaaauagcaauaagacccaaagugagggaucaagaagggagaaugaacuauuacuggacacuaauagagccgggagacaaaauaacauucgaagcaacuggaaaucuagugguaccgagauaugcauucgcaauggaaagaaaugcugaaucugguauuaucauuucagauacaccaguccacgauugcaauacaacuugucagacacccgagggugcuauaaacaccagccucccauuucagaauauacauccgaucacaauuggaaaauguccaaaguauguaaaaagcacaaaauugagacuggccacaggauugaggaaugucccgucuauucaaucuagaggccuauucggggccauugccggcuucauugaagggggguggacagggaugguagauggaugguacgguuaucaccaucaaaaugagcagggaucaggauaugcagccgaccugaagagcacacaaaaugccauugacaagauuacuaacaaaguaaauucuguuauugaaaagaugaauacacaguucacagcaguggguaaagaguucaaccaccuggaaaaaagaauagagaauuuaaauaaaaaaguugaugaugguuuccuggacauuuggacuuacaaugccgaacuguugguucuauuggaaaaugaaagaacuuuggacuaccacgauucaaaugugaagaacuuguaugaaaagguaagaaaccaguuaaaaaacaaugccaaggaaauuggaaacggcugcuuugaauuuuaccacaaaugcgauaacacgugcauggaaagugucaaaaaugggacuuaugacuacccaaaauacucagaggaagcaaaauuaaacagagaaaaaauagaugggguaaagcuggaaucaacaaggauuuaccagauuuuggcgaucuauucaacugucgccaguucauugguacugguagucucccugggggcaaucaguuucuggaugugcucuaaugggucucuacaguguagaauauguauuuaa

SEQ ID NO: 41930 - RNA, 1701 nt, Artificial Sequence
  derived and/or modified CDS sequence (wt) from hemagglutinin__InfluenzaA__AGG13973
augaagacuaucauugcuuugagcuacauucuaugucugguuuucgcucaaaaacuuccuggaaaugacaauagcacggcaacgcugugccuugggcaccaugcaguaccaaacggaacgauagugaaaacaaucacgaaugaccgaauugaaguuacuaaugcuacugagcugguucagaauuccucaauaggugaaauaugcgacaguccucaucagauccuugauggagaaaacuguacacuaauagaugcucuauugggagacccucagugugauggcuuucaaaauaagaaaugggaccuuuuuguugaacgaagcaaagccuacagcaacuguuacccuuaugaugugccggauuaugccucccuuaggucacuaguugccucauccggcacacuggaguuuaacaaugaaagcuucaauuggacuggagucacucaaaacggaacaaguucugcuugcauaaggagaucuaauaguaguuucuuuaguagauuaaauugguugacccacuuaaacuucaaauacccagcauugaacgugacuaugccaaacaaugaacaauuugacaaauuguacauuugggggguucaccacccggguacggacaaggaccaaaucuuccuguaugcucaaucaucaggaagaaucacaguaucuaccaaaagaagccaacaagcuguaaucccgaauaucggaucuaggcccagaauaaggaauaucccuagcagaauaagcaucuauuggacaauaguaaaaccaggagacauacuuuugauuaacagcacagggaaucuaauugcuccuagggguuacuucaaaauacgaagugggaaaagcucaauaaugagaucagaugcacccauuggcaaaugcaagucugaaugcaucacuccaaauggaagcauuccaaaugacaaaccauuccaaaauguaaacaggaucacauacggggccugucccagauauguuaagcaaagcacucugaaauuggcaacaggaaugcgaaauguaccagagaaacaaacuagaggcauauuuggcgcaauagcggguuucauagaaaaugguugggagggaaugguggaugguugguacgguuucaggcaucaaaauucugagggaagaggacaagcagcagaucucaaaagcacucaagcagcaaucgaucaaaucaaugggaagcugaaucgauugaucgggaaaaccaacgagaaauuccaucagauugaaaaagaauucucagaaguagaagggagaauucaggaccuugagaaauauguugaggacacuaaaauagaucucuggucauacaacgcggagcuucuuguugcccuggagaaccaacauacaauugaucuaacugacucagaaaugaacaaacuguuugaaaaaacaaagaagcaacuaagggaaaaugcugaggauaugggcaaugguuguuucaaaauauaccacaaaugugacaaugccugcauaggaucaaucagaaauggaacuuaugaccacgauguauacagggaugaagcauuaaacaaccgguuccagaucaagggaguugagcugaagucaggguacaaagauuggauccuauggauuuccuuugccauaucauguuuuuugcuuuguguugcuuuguugggguucaucaugugggccugccaaaagggcaacauuaggugcaacauuugcauuuga

SEQ ID NO: 41931 - RNA, 1701 nt, Artificial Sequence
  derived and/or modified CDS sequence (wt) from hemagglutinin__InfluenzaA__AGG13985
augaagacuaucauugcuuugagcuacauucuaugucugguuuucgcucaaaaacuuccuggaaaugacaauagcacggcaacgcugugccuugggcaccaugcaguaccaaacggaacgauagugaaaacaaucacgaaugaccgaauugaaguuacuaaugcuacugagcugguucagaauuccucaauaggugaaauaugcgacagcccucaucagauccuugauggagaaaacuguacacuaauagaugcucuauugggagacccucagugugauggcuuucaaaauaagaaaugggaccuuuuuguugaacgaagcaaagccuacagcaacuguuacccuuaugaugugccggauuaugccucccuuaggucacuaguugccucauccggcacacuggaguuuaacaaugaaagcuucaauuggacuggagucacucaaaacggaacaagcucugcuugcauaaggagaucuaauaguaguuucuuuaguagauuaaauugguugacccacuuaaacuucaaauacccagcauugaacgugacuaugccaaacaaugaacaauuugacaaauuguacauuugggggguucaccacccggguacggacaaggaccaaaucuuccuguaugcucaaucaucaggaagaaucacaguaucuaccaaaagaagccaacaagcuguaaucccgaauaucggaucuagacccagaauaaggaauaucccuagcagaauaagcaucuauuggacaauaguaaaaccaggagacauacuuuugauuaacagcacagggaaucuaauugcuccuagggguuacuucaaaauacgaagugggaaaagcucaauaaugagaucagaugcacccauuggcaaaugcaagucugaaugcaucacuccaaauggaagcauuccaaaugacaaaccauuccaaaauguaaacaggaucacauacggggccugucccagauauguuaagcaaagcacucugaaauuggcaacaggaaugcgaaauguaccagagaaacaaacuagaggcauauuuggcgcaauagcggguuucauagaaaaugguugggagggaaugguggaugguugguacgguuucaggcaucaaaauucugagggaagaggacaagcagcagaucucaaaagcacucaagcagcaaucgaucaaaucaaugggaagcugaaucgauugaucgggaaaaccaacgagaaauuccaucagauugaaaaagaauucucagaaguagaagggagaauucaggaccuugagaaauauguugaggacacuaaaauagaucucuggucauacaacgcggagcuucuuguugcccuggagaaccaacauacaauugaucuaacugacucagaaaugaacaaacuguuugaaaaaacaaagaagcaacugagggaaaaugcugaggauaugggcaaugguuguuucaaaauauaccacaaaugugacaaugcuugcauaggaucaaucagaaauggaacuuaugaccacgauguauacagggaugaagcauuaaacaaccgguuccagaucaagggaguugagcugaagucaggguacaaagauuggauccuauggauuuccuuugccauaucauguuuuuugcuuuguguugcuuuguugggguucaucaugugggccugccaaaagggcaacauuaggugcaacauuugcauuuga

SEQ ID NO: 41932 - RNA, 1701 nt, Artificial Sequence; identical to SEQ ID NO: 41931
  derived and/or modified CDS sequence (wt) from hemagglutinin__InfluenzaA__AGG13997

SEQ ID NO: 41933 - RNA, 1701 nt, Artificial Sequence; identical to SEQ ID NO: 41899
  derived and/or modified CDS sequence (wt) from hemagglutinin__InfluenzaA__AGG14009

SEQ ID NO: 41934 - RNA, 1701 nt, Artificial Sequence
  derived and/or modified CDS sequence (wt) from hemagglutinin__InfluenzaA__AGG14021
augaagaccaucauugcuuugagcuacauucuaugucuaguuuucgcucaagaacuuccuggaaaugacgacagcacggcaacgcugugccuugggcaccaugcagugccaaacggaacgauagugaaaacaaucacgaaugaccaaauugaaguuacuaaugcuacugagcugguucagaguuccucaacaggugaaauaugcaacaguccucaucagauccuugauggagaaaacugcacacuaauagaugcucuauugggagacccucagugugauggcuuccaaaacaagaaaugggaccuuuuuguugaacgaagcaaagcccacagcaacuguuacccuuaugaugugccggauuaugccucccuuaggucacuaguugccucauccggcacacuggaguuuaacaaugaaagcuucaauuggacuggagucacucaaaacggaacaagcucugcuugcauaaggagaucuaauaauaguuucuuuaguagauugaauugguugacccacuuaaacuucaaauacccagcauugaacgugacuaugccaaacaaugaacaauuugacaaauuguacauuugggggguucaccacccggguacggacaaggaccaaaucuuccuguaugcucaagcaucaggaagaaucacaguaucuaccaaaagaagccaacaagcuguaauuccgaauaucggaucuagacccagaguaaggaauaucccuagcagaguaagcaucuauuggacaauaguaaaaccgggagacauacuuuugauuaacagcacagggaaucuaauugcuccuagggguuacuucaaaauacgaagugggaaaagcucaauaaugagaucagaugcacccauuggcaaaugcaauucugcaugcaucacuccaaauggaagcauucccaaugacaaaccauuccaaaauguaaacaggaucacauacggggccugucccagauaugucaagcaaaacacucugaaauuggcaacaggaaugagaaauguaccagagaaacaaacuagaggcauauuuggcgcaauagcggguuucauagaaaaugguugggagggaaugguggaugguugguacgguuucaggcaucaaaauucugagggaaggggacaagcagcagaucucaaaagcacucaagcagcaaucgaucaaaucaaugggaagcugaauagauugaucgggaaaaccaacgagaaauuccaucagauugaaaaagaauucucagaagucgaagggagaauucaggaccuugagaaauauguugaggacacuaaaauagaucuuuggucauacaacgcggagcuucuuguugcccuggagaaccaacacacaauugaucuaacugacucagaaaugaacaaacuguuugaaaaaacaaagaagcaacugagggaaaaugcugaggauaugggcaaugguuguuucaaaauauaccacaaaugugacaaugccugcauaggaucaaucagaaauggaacuuaugaucacgauguguacagagaugaagcauuaaacaaccgauuccagaucaagggaauugagcugaagucaggguacaaagauuggauccuauggauuuccuuugccauaucauguuuuuugcuuuguguugcuuuguugggguucaucaugugggccugccaaaaaggcaacauuaggugcaacauuugcauuuga

SEQ ID NO: 41935 - RNA, 1701 nt, Artificial Sequence; identical to SEQ ID NO: 41896
  derived and/or modified CDS sequence (wt) from hemagglutinin__InfluenzaA__AGG14033

SEQ ID NO: 41936 - RNA, 1701 nt, Artificial Sequence; identical to SEQ ID NO: 41915
  derived and/or modified CDS sequence (wt) from hemagglutinin__InfluenzaA__AGG14318

SEQ ID NO: 41937 - RNA, 1701 nt, Artificial Sequence
  derived and/or modified CDS sequence (wt) from hemagglutinin__InfluenzaA__AGG14330
augaagacuaucauugcuuugagcuacauucuaugucugguuuucgcucaaaaacuuccuggaaaugacaauagcacggcaacgcugugccuugggcaccaugcaguaccaaacggaacgauagugaaaacaaucacgaaugaccgaauugaaguuacuaaugcuacugagcugguucagaauuccucaauaggugaaauaugcgacaguccucaucagauccuugauggagaaaacuguacacuaauagaugcucuauugggagacccucagugugauggcuuucaaaauaagaaaugggaccuuuuuguugaacgaagcaaagccuacagcaacuguuacccuuaugaugugccggauuaugccucccuuaggucacuaguugccucauccggcacacuggaguuuaacaaugaaagcuucaauuggacuggagucacucaaaacggaacaaguucugcuugcauaaggagaucuaauaguaguuucuuuaguagauuaaauugguugacccacuuaaacuucaaauacccagcauugaacgugacuaugccaaacaaugaacaauuugacaaauuguacauuugggggguucaccacccggguacggacaaggaccaaaucuuccuguaugcucaaucaucaggaagaaucacaguaucuaccaaaagaagccaacaagcuguaaucccgaauaucggaucuagacccagaauaaggaauaucccuagcagaauaagcaucuauuggacaauaguaaaaccaggagacauacuuuugauuaacagcacagggaaucuaauugcuccuagggguuacuucaaaauacgaagugggaaaagcucaauaauaagaucagaugcacccauuggcaaaugcaagucugaaugcaucacuccaaauggaagcauuccaaaugacaaaccauuccaaaauguaaacaggaucacauacggggccugucccagauauguuaagcaaagcacucugaaauuggcaacaggaaugcgaaauguaccagagaaacaaacuagaggcauauuuggcgcaauagcggguuucauagaaaaugguugggagggaaugguggaugguugguacgguuucaggcaucaaaauucugagggaagaggacaagcagcagaucucaaaagcacucaagcagcaaucgaucaaaucaaugggaagcugaaucgauugaucgggaaaaccaacgagaaauuccaucagauugaaaaagaauucucagaaguagaagggagaauucaggaccuugagaaauauguugaggacacuaaaauagaucucuggucauacaacgcggagcuucuuguugcccuggagaaccaacauacaauugaucuaacugacucagaaaugaacaaacuguuugaaaaaacaaagaagcaacugagggaaaaugcugaggauaugggcaaugguuguuucaaaauauaccacaaaugugacaaugccugcauaggaucaaucagaaauggaacuuaugaccacgauguauacagggaugaagcauuaaacaaccgguuccagaucaagggaguugagcugaagucaggguacaaagauuggauccuauggauuuccuuugccauaucauguuuuuugcuuuguguugcuuuguugggguucaucaugugggccugccaaaagggcaacauuaggugcaacauuugcauuuga

SEQ ID NO: 41938 - RNA, 1701 nt, Artificial Sequence
  derived and/or modified CDS sequence (wt) from hemagglutinin__InfluenzaA__AGG84179
augaagaccaucauugcuuugagcuacauucuaugucugguuuucgcucaaaaacuuccuggaaaugacaacagcacggcaacgcugugccuugggcaccaugcaguaccaaacggaacgauagugaaaacaaucacgaaugaccaaauugaaguuacuaaugcuacugagcugguucagaguuccucagcaagugaaauaugcgacaguccucaucauauccuugauggagaaaacugcacacuaauagaugcucuauugggagacccucagugugauggcuuccaaaauaagaaaugggaccuuuuuguugaacgaagcagagccuacagcaacuguuacccuuaugaugugccggauuaugccucccuuaggucacuaguugccucauccggcacacuggaguuuaacaaugaaagcuucaauuggacuggagucacucaaaacggaacaagcucugcuugcauaaggagaucuaauaauaguuucuuuaguagguugaauugguugacccacuuaaacuucaaauacccagcauugaacgugacuaugccaaacaaugaacaauuugacaaauuguacauuugggggguucaccacccggguacggacaaggaccaaaucuuccuguaugcucaagcaucaggaagaaucacaguaucuaccaaaagaagccaacaagcuguaaucccgaauaucggaucuagacccagaguaaggaauaucccuagcagaauaagcaucuauuggacaauaguaaaaccgggagacauacuuuugauuaacagcacagggaaucuaauugcuccuagggguuacuucaaaauacgaagugggaaaagcucaauaaugagaucagaugcacccauuggcaaaugcaauucugaaugcaucacuccaaauggaagcauucccaaugacaaaccauuccaaaauguaaacaggaucacauacggggccugucccagauauguuaagcaaagcacucugaaauuggcaacaggaaugcgaaauguaccagagaaacaaacuagaggcauauuuggcgcaauagcggguuucauagaaaaugguugggagggaaugauggaugguugguacgguuucaggcaucaaaauucugagggaagaggacaagcagcagaucucaaaagcacucaagcagcaaucgaucaaaucaauggaaagcugaauagauugaucgggaaaaccaacgagaaauuccaucagauugaaaaagaauucucagaagucgaaggaagaauucaggaccuugagaaauauguugaggacacuaaaauagaucucuggucauacaacgcggagcuucuuguugcccuggagaaccaacauacaauugaucuaacugacucagaaaugaacaaacuguuugaaaaaacaaagaagcaacugagggaaaaugcugaggauaugggcaaugguuguuucaaaauauaccacaaaugugacaaugccugcauaggaucaaucagaaauggaacuuaugaccacgauguauacagagaugaagcauuaaacaaccgguuccagaucaagggaguugagcugaagucaggguacaaagauuggauccuauggauuuccuuugccauaucauguuuuuugcuuuguguugcuuuguugggguucaucaugugggccugccaaaaaggcaacauuaggugcaacauuugcauuuga

SEQ ID NO: 41939 - RNA, 1704 nt, Artificial Sequence
  derived and/or modified CDS sequence (wt) from hemagglutinin__InfluenzaA__AGI02564
auggagaaaauagugcuucuucuugcaauagucagccuuguuaaaagugaucagauuugcauugguuaccaugcaaacaacucgacagagcagguugacacgauaauggaaaagaacguuacuguuacacaugcccaagacauacuggaaaagacacacaacgggaagcucugcgaucuagauggagugaagccucugauuuuaagagauuguaguguagcuggauggcuccucggaaacccaaugugugacgaauucaucaaugugccggaauggucuuacauaguggagaaggccaacccaaccaaugaccucuguuacccagggaauuucaacgacuaugaagaacugaaacaccuauugagcagaauaaaccauuuugagaaaauucagaucauccccaagaguucuugguccggccaugaagccucaucaggggugagcucagcauguccauaccagggaacgcccuccuuuuucagaaaugugguauggcuuaucaaaaagaacaauacauacccaacaauaaagagaagcuacaauaauaccaaccaggaagaucuuuugauacugugggggauucaucauucuaaugaugcggcagagcagacaaagcucuaucaaaacccaaccaccuauauuuccguugggacaucaacacuaaaccagagauugguaccaaaaauagcuacuagauccaaaguaaacgggcaaaguggaaggauggauuucuucuggacaauuuuaaaaccgaaugaugcaaucaacuucgagaguaauggaaauuuuauugcuccagaauaugcauacaaaauugucaagaaaggggacucagcaauuaugaaaagugaaguggaauaugguaacugcaacaccaagugucaaacuccaauaggggcgauaaacucuaguaugccauuccacaacauacacccucucaccaucggggaaugccccaaauaugugaaaucaaacaaauuaguccuugcgacugggcucagaaauaguccucuaagagaaagaagaagaaaaagaggacuauuuggagcuauagcagguuuuauagagggaggauggcagggaaugguagaugguugguauggguaccaccauagcaaugagcaggggaguggguacgcugcagacaaagaauccacucaaaaggcaauagauggaguuaccaauaaggucaacucgaucauugacaaaaugaacacucaguuugaggccguuggaagggaauuuaauaacuuagaaaggagaauagagaauuuaaacaagaaaauggaagacggauuccuagaugucuggacuuauaaugcugaacuucugguucucauggaaaaugagagaacucuagacuuccaugacucaaaugucaagaaccuuuacgacaagguccgacuacagcuuaggaauaaugcaaaggagcuggguaaugguuguuucgaguucuaucacaaaugugauaaugaauguauggaaaguguaagaaacggaacguaugacuacccacaguauucagaagaagcaagauuaaaaagagaggaaauaaguggaguaaaauuggaaucaauaggaacuuaccaaauacugucaauuuauucaacaguggcgaguucucuagcacuggcaaucaugguggcuggucuaucuuuauggaugugcuccaaugggucguuacaaugcagaauuugcaucuag

SEQ ID NO: 41940 - RNA, 1707 nt, Artificial Sequence
  derived and/or modified CDS sequence (wt) from hemagglutinin__InfluenzaA__AGI02565
auggagaaaauagugcuucuucuugcaauagucagucuuguuaaaagugaucagauuugcauugguuaccaugcaaacaacucgacagagcagguugacacaauaauggaaaagaacguuacuguuacacaugcccaagacauacuggaaaagacacacaacggaaagcucugcgaccucgauggagugaagccucuaauuuugagagauuguaguguagcuggauggcuccucgggaacccaaugugugacgaauucaucaauguaccggaauggucuuacauaguggagaaggccauuccagccaaugaccucuguuacccaggggauuucaacgacuaugaagaacugaaacaccuauugagcagaauaaaccauuuugagaaaauucagaucauccccaaaaguucuugguccaaucaugaagccucauuaggggugagcucagcauguccauaccugggaaagcccuccuuuuucagaaaugugguauggcuuaucaaaaagaacaguacauacccaacaauaaagaggagcuacaauaauaccaaccaagaagaucuuuugguacugugggggauucaccauccuaaugaugcggcagagcagacaaagcucuaucaaaacccaaccaccuauauuuccguuggaacaucaacacuaaaccagagauugguaccaaaaauagcuacuagauccaaaguaaacgggcaaaguggaaggauggaguucuucuggacaauuuugaaaccgaaugaugcaaucaacuucgagaguaauggaaauuucauugcuccagaauaugcauacaaaauugucaagaaaggggacucagcaauuaugaaaagugaauuggaauaugguaauugcaacaccaagugccaaacuccaaugggggcgauaaacucuaguaugccauuccacaacauacacccucucaccaucggggaaugccccaaauaugugaaaucaaacagauuaguccuugcuacugggcucagaaauagcccucaaggagagagaagaagaaaaaagagaggacuauuuggagcuauagcagguuuuauagagggaggauggcagggaaugguagaugguugguauggauaccaccauagcaaugagcaggggaguggauacgcugcagacaaagaauccacucaaaaggcaauagauggagucaccaauaaggucaacucgaucauugacaaaaugaacacucaguuugaggccguuggaagggaauuuaauaacuuagaaaggagaauagagaauuuaaacaagaagauggaagacggauuccuagaugucuggacuuauaaugcugaacuucugguucucauggaaaaugagagaacucuagacuuucaugauucaaaugucaagaaccuuuaugacaagguccgacuacagcuuagggauaaugcaaaagagcuggguaacgguuguuucgaguucuaucacaaaugugauaaugaauguauggaaaguguaagaaacggaacguaugacuacccgcaguauucagaagaagcaagacuaaaaagagaggaaauaaguggaguaaaauuggaaucaauaggaacuuaccaaauacugucaauuuauucaacaguggcgaguucccuagcacuggcaaucaugguagcuggucuaucuuuauggaugugcuccaaugguucguuacaaugcagaauuugcauuuaa

SEQ ID NO: 41941 - RNA, 1704 nt, Artificial Sequence
  derived and/or modified CDS sequence (wt) from hemagglutinin__InfluenzaA__AGI02566
auggagaaaauagugcuucuucuugcaauagucagccuuguuaaaagugaucagauuugcaucgguuaccaugcaaacaacucgacagagcagguugacacaauaauggaaaagaacguuacuguuacacaugcccaagacauacuggagaagacacauaacgggaaacucugcgaucuagauggagugaagccucugauucuacgagauuguaguguagcuggauggcuccucggaaacccaaugugugacgaauucaucaaugugccggaauggucuuacauaguggagaaggccaacccagccaaugaccucuguuacccagggaauuucaacgacuaugaagaacugaaacaccuauugagcagaauaaaccauuuugagaaaauucagaucauccccaaaaguucuugguccgaucaugaagccucaucaggggugagcucagcauguccauaccagggaacgcccuccuuuuucagaaaugugguauggcuuaucaaaaagaacaauacauacccaacaauaaagagaagcuacaauaauaccaaccaggaaaaucuuuugauacugugggggauucaucauuccaaugaugcagcagagcagauaaagcucuaucaaaacccaaccaccuauauuuccguugggacaucaacacuaaaccagagauugguaccaaaaauagccacuagauccaaaguaaacgggcaaaguggaaggauggauuucuucuggacaauuuuaaaaccgaaugaugcaaucaacuucgagaguaauggaaauuucauugcuccagaauaugcauacaaaauugucaaggaaggagacucagcaauuaugaaaagugaaguggaauaugguaacugcaacaccaagugucaaacuccaauaggggcgauaaacucuaguaugccauuccacaacauacacccucucaccaucggggaaugccccaaauaugugaaaucaaacaaauuaguccuugcuacugggcucagaaauaguccucuaagagaaagaagaagaaaaagaggacuauuuggagcuauagcaggguuuauagagggaggauggcagggaaugguagaugguugguauggguaccaccauagcaaugagcaggggaguggguacgcugcagacaaagaauccacucaaaaggcaauagauggagucaccaauaaggucaacucgaucauugauaaaaugaacacucaguuugaggccguuggaagggaauuuaauaacuuggaaaggagaauagagaacuuaaacaagaaaauggaagacggauuccuagaugucuggacuuauaaugcugaacuucugguucucauggaaaaugagagaacucuagacuuccaugacucaaaugucaagaaccuuuacgacaagguccgacuacagcuuagggauaaugcaaaggagcuggguaacgguuguuucgaguucuaucacaaaugugauaaugaauguauggaaaguguaagaaacggaacguaugacuacccgcaguauucagaagaagcaagauuaaaaagagaggaaauaaguggaguaaaauuggaaucaauaggaacuuaccaaauacugucaauuuauucaacaguugcgaguucucuagcacuggcaaucaugguggcuggucuaucuuuguggaugugcuccaaugggucguuacaaugcagaauuugcauuuaa

SEQ ID NO: 41942 - RNA, 1707 nt, Artificial Sequence
  derived and/or modified CDS sequence (wt) from hemagglutinin__InfluenzaA__AGI02567
auggagaaaauagugcuucuucuugcaauagucagucuuguuaaaagugaucagauuugcauugguuaccaugcaaacaacucgacagagcagguugacacaauaauggaaaagaacgucacuguuacacaugcccaagacauacuggaaaagacacacaacgggaagcucugcgaucuagauggagugaagccucuaauuuuaagagauuguaguguagcuggauggcuccucgggaacccaaugugugacgaauuccucaaugugccggaauggucuuacauaguggagaaggccaauccagccaaugaccucuguuacccagggaauuucaacgacuaugaagaacugaaacaccuauugagcagaauaaaccauuuugagaaaauucaaaucauccccaaaaguucuuggucagaucaugaagccucaucaggggugagcucagcauguccauaccagggaagguccuccuuuuucagaaaugugguauggcuuaucaaaaagaacaaugcauacccaacaauaaagagaaguuacaauaauaccaaccaagaagaucuuuugguacugugggggauucaccauccaaaugaugcggcagagcagacaaggcucuaucaaaacccaaccaccuauauuuccguugggacaucaacacuaaaccagagauugguaccaaaaauagcuacuagauccaaaguaaacgggcaaagugggaggauggaguucuucuggacaauuuuaaaaccgaaugaugcaaucaacuuugagaguaauggaaauuucauugcuccagaauaugcauacaaaauugucaagaaaggggacucaacaauuaugaaaagugaauuggaauaugguaacugcaacaccaagugucaaacuccaauaggggcgauaaacucuaguaugccauuccacaacauccacccucucaccaucggggaaugccccaaauaugugaaaucaaacagauuaguccuugcgacugggcucagaaauagcccucaaggagagagaagaagaaaaaagagaggacuauuuggagcuauagcagguuuuauagagggaggauggcagggaaugguagaugguugguauggguaccaccauagcaacgagcaggggaguggguacgcugcagacaaagaauccacucaaaaggcaauagauggagucaccaauaaggucaacucgaucauugacaaaaugaacacucaguuugaggccguuggaagggaauuuaauaacuuagaaaggagaauagaaaauuuaaacaagaagauggaagacggauuccuagaugucuggacuuauaaugcugaacuucugguucucauggaaaaugagagaacucuagacuuucaugacucaaaugucaagaaccuuuacgacaagguccgacuacagcuuagggauaaugcaaaggagcuugguaacgguuguuucgaguucuaucacagaugugauaaugaauguauggaaaguguaaggaacggaacguaugacuacccgcaguauucagaagaagcaagauuaaaaagagaggaaauaaguggaguaaaauuggagucaauaggaacuuaccaaauacugucaauuuauucaacaguggcgagcucccuagcacuggcaaucaugguggcuggucuaucuuuauggaugugcuccaauggaucguuacaaugcagaauuugcaucuag

SEQ ID NO: 41943 - RNA, 1704 nt, Artificial Sequence
  derived and/or modified CDS sequence (wt) from hemagglutinin__InfluenzaA__AGI02568
auggagaaaauagugcuucuucuugcaauagucagccuuguuaaaagugaucagauuugcaucgguuaccaugcaaacaacucgacagagcagguugacacaauaauggaaaagaacguuacuguuacacaugcccaagacauacuggagaagacacauaacgggaaacucugcgaucuagauggagugaagccucugauucuacgagauuguaguguagcuggauggcuccucggaaacccaaugugugacgaauucaucaaugugccggaauggucuuacauaguggagaaggccaacccagccaaugaccucuguuacccagggaauuucaacgacuaugaagaacugaaacaccuauugagcagaauaaaccauuuugagaaaauucagaucauccccaaaaguucuugguccgaucaugaagccucaucaggggugagcucagcauguccauaccagggaacgcccuccuuuuucagaaaugugguauggcuuaucaaaaagaacaauacauacccaacaauaaagagaagcuacaauaauaccaaccaggaaaaucuuuugauacugugggggauucaucauucuaaugaugcaacagagcagauaaagcucuaucaaaacccaaccaccuauauuuccguugggacaucaacacuaaaccagagauugguaccaaaaauaggcacuagauccaaaguaaacgggcaaaguggaaggauggauuucuucuggacaauuuuaaaaccgaaugaugcaaucaacuucgagaguaauggaaauuucauugcuccagaauaugcauacaaaauugucaaggaaggagacucagcaauuaugaaaagugaaguggaauaugguaacugcaacaccaagugucaaacuccaauaggggcgauaaacucuaguaugccauuccacaacauacacccucucaccaucggggaaugccccaaauaugugaaaucaaacaaauuaguccuugcuacugggcucagaaauaguccucuaagagaaagaagaagaaaaagaggacuauuuggagcuauagcaggguuuauagagggaggauggcagggaaugguagaugguugguauggguaccaccauagcaaugagcaggggaguggguacgcugcagacaaagaauccacucaaaaggcaauagauggagucaccaauaaggucaacucgaucauugacaaaaugaacacucaguuugaggccguuggaagggaauuuaauaacuuagaaaggagaauagagaacuuaaacaagaaaauggaagacggauuccuagaugucuggacuuauaaugcugaacuucugguucucauggaaaaugagagaacucuagacuuccaugacucaaaugucaagaaccuuuacgacaagguccgacuacagcuuagggauaaugcaaaggagcuggguaacgguuguuucgaguucuaucacaaaugugauaaugaauguauggaaaguguaagaaacggaacguaugacuacccgcaguauucagaggaagcaagauuaaaaagagaggaaauaaguggaguaaaauuggaaucaaugggaauuuaccaaauacugucaauuuauucaacaguugcgaguucucuagcacuggcaaucaugguggcuggucuaucuuuguggaugugcuccaaugggucguuacaaugcagaauuugcauuuaa

SEQ ID NO: 41944 - RNA, 1683 nt, Artificial Sequence
  derived and/or modified CDS sequence (wt) from hemagglutinin__InfluenzaA__AGI60301
augaacacucaaauccugguauucgcucugauugcgaucauuccaacaaaugcagacaaaaucugccucggacaucaugccgugucaaacggaaccaaaguaaacacauuaacugaaagaggaguggaagucgucaaugcaacugaaacaguggaacgaacaaacauccccaggaucugcucaaaagggaaaaggacaguugaccucggucaauguggacuccuggggacaaucacuggaccaccucaaugugaccaauuccuagaauuuucagccgauuuaauuauugagaggcgagaaggaagugaugucuguuauccugggaaauucgugaaugaagaagcucugaggcaaauucucagagaaucaggcggaauugacaaggaagcaaugggauucacauacaguggaauaagaacuaauggagcaaccagugcauguaggagaucaggaucuucauucuaugcagaaaugaaauggcuccugucaaacacagauaaugcugcauucccgcagaugacuaagucauauaaaaauacaagaaaaagcccagcucuaauaguaugggggauccaucauuccguaucaacugcagagcaaaccaagcuauaugggaguggaaacaaacuggugacaguugggaguucuaauuaucaacaaucuuuuguaccgaguccaggagcgagaccacaaguuaaugguauaucuggaagaauugacuuucauuggcuaaugcuaaaucccaaugauacagucacuuucaguuucaauggggcuuucauagcuccagaccgugcaagcuuccugagaggaaaaucuaugggaauccagaguggaguacagguugaugccaauugugaaggggacugcuaucauaguggagggacaauaauaaguaacuugccauuucagaacauagauagcagggcaguuggaaaauguccgagauauguuaagcaaaggagucugcugcuagcaacagggaugaagaauguuccugagauuccaaagggaagaggccuauuuggugcuauagcggguuucauugaaaauggaugggaaggccuaauugaugguugguaugguuucagacaccagaaugcacagggagagggaacugcugcagauuacaaaagcacucaaucggcaauugaucaaauaacaggaaaauuaaaccggcuuauagaaaaaaccaaccaacaauuugaguugaucgacaaugaauucaaugagguagagaagcaaaucgguaaugugauaaauuggaccagagauucuauaacagaaguguggucauacaaugcugaacucuugguagcaauggagaaccagcauacaauugaucuggcugauucagaaauggacaaacuguacgaacgagugaaaagacagcugagagagaaugcugaagaagauggcacugguugcuuugaaauauuucacaagugugaugaugacuguauggccaguauuagaaauaacaccuaugaucacagcaaauacagggaagaggcaaugcaaaauagaauacagauugacccagucaaacuaagcagcggcuacaaagaugugauacuuugguuuagcuucggggcaucauguuucauacuucuagccauuguaaugggccuugucuucauauguguaaagaauggaaacaugcggugcacuauuuguauauaa

SEQ ID NO: 41945 - RNA, 1683 nt, Artificial Sequence
  derived and/or modified CDS sequence (wt) from hemagglutinin__InfluenzaA__AGJ72861
augaacacucaaauccugguauucgcucugauugcgaucauuccaacaaaugcagacaaaaucugccucggacaucaugccgugucaaacggaaccaaaguaaacacuuuaacugaaagaggaggggaagucgucaaugcaacugaaacaguggaacgaacaaacauccccaggaucugcucaaaggggaaaaagacaguugaccucggucaagggggaccccgggggacaaucacuggaccaccucaaugugaccaauuccuagaauuuucagccgauuuaauuauggagaggcgagaaggaagugaugucuguuauccggggaaauucgugaaugaagaagcucugaggcaaauucucagagaaucaggcggaauugacaaggaagcaaugggauucacauacaguggaauaagaacuaauggagcaaccagugcauguaggagaucaggaucuucauucuaugcagaaaugaaauggcuccugucaaacacagauaaugcugcauucccgcagaugacuaagucauauaaaaauacaagaaaaagcccagcucuaauaguaugggggauccaucauuccguaucaacugcagagcaaaccaagcuauaugggaguggaaacaaacuggugacaguugggaguucuaauuaucaacaaucuuuuguaccgaguccaggagcgagaccacaaguuaauggucaaucuggaagaauugacuuucauuggcuaaugcuaaaucccaaugauacagucacuuucaguuucaauggggcuuucauagcuccagaccgugcaagcuuccugagaggaaaaucuaugggaauccagaguggaguacagguugaugccaauugugaaggggacugcuaucauaguggagggacaauaauaaguaacuugccauuucagaacauagauagcagggcaguuggaaaauguccgagauauguuaagcaaaggagucugcugcuagcaacagggaugaagaauguuccugagauuccaaagggaagaggccuauuuggugcuauagcggguuucauugaaaauggaugggaaggccuaauugaugguugguaugguuucagacaccagaaugcacagggagagggaacugcugcagauuacaaaagcacucaaucggcaauugaucaaauaacaggaaaauuaaaccggcuuauagaaaaaaccaaccaacaauuugaguugauagacaaugaauucaaugagguagagaagcaaaucgguaaugugauaaauuggaccagagauucuauaacagaaguguggucauacaaugcugaacucuugguagcaauggagaaccagcauacaauugaucuggcugauucagaaauggacaaacuguacgaacgagugaaaagacagcugagagagaaugcugaagaagauggcacugguugcuuugaaauauuucacaagugugaugaugacuguauggccaguauuagaaauaacaccuaugaucacagcaaauacagggaagaggcaaugcaaaauagaauacagauugacccagucaaacuaagcagcggcuacaaagaugugauacuuugguuuagcuucggggcaucauguuucauacuucuagccauuguaaugggccuugucuucauauguguaaagaauggaaacaugcggugcacuauuuguauauaa

SEQ ID NO: 41946 - RNA, 1701 nt, Artificial Sequence
  derived and/or modified CDS sequence (wt) from hemagglutinin__InfluenzaA__AGJ73327
augaaggcaauacuaguaguucugcuauauacauuugcaaccgcaaaugcagacacauuauguauagguuaucaugcgaacaauucaacagacacuguagacacaguacuagaaaagaauguaacaguaacacacucuguuaaccuucuagaagacaaacauaacgggaaacuaugcaaacuaagagggguagccccauugcauuuggguaaauguaacauugcuggcuggauccugggaaauccagagugugaaucacucuccacagcaaguucaugguccuacauuguggaaacaucuaguucagacaauggaacguguuacccaggagauuucaucaauuaugaggagcuaagagagcaauugagcucagugucaucauuugaaagguuugagauauuccccaagacaaguucauggcccaaucaugacucgaacaaagguguaacggcagcauguccucaugcuggagcaaaaaguuucuacaaaaauuuaauauggcuaguuaaaaaaggaaauucauacccaaagcucagcaaauccuacauuaaugauaaagggaaagaaguccucgugcuguggggcauucaccauccaucuacuacugcugaccaccaaagucucuaucagaaugcagaugcauauguuuuuguggggacaucaagauacagcaagaaguucaagccggaaauagcaauaagacccaaagugagggaucaagaagggagaaugaacuauuacuggacacuaauagagccaggagacaaaauaacauucgaagcaacuggaaaucuagugguaccgagauaugcauucgcaauggaaagaaaugcuggaucugguauuaucauuccagauacaccaguccacgauugcaauacaacuugucagacacccaagggugcuauaaacaccagccucccauuucagaauauacauccgaucacaauuggaaaauguccaaaguauguaaaaagcacaaaauugagacuggccacaggauugaggaaugucccgucuauucaaucuagaggccuauucggggccauugccggcuucauugaagggggguggacagggaugguagauggaugguacgguuaucaccaucaaaaugagcaggggucaggauaugcagccgaccugaagagcacacaaaaugccauugacaagauuacuaacaaaguaaauucuguuauugaaaagaugaauacacaguucacagcaguggguaaagaguucaaccaccuggaaaaaagaauagagaauuuaaauaaaaaacuugaugaugguuuccuggacauuuggacuuacaaugccgaacuguugguucuauuggaaaaugaaagaacuuuggacuaccacgauucaaaugugaagaacuuguaugaaaagguaagaaaccaguuaaaaaacaaugccaaggaaauuggaaacggcugcuuugaauuuuaccacaaaugcgauaacacgugcauggaaagugucaaaaaugggacuuaugacuacccaaaauacucagaggaagcaaaauuaaacagagaaaaaauagaugggguaaagcuggaaucaacaagaauuuaccagauuuuggcgaucuauucaacugucgccaguucauugguacugguagucucccugggggaaaucaguuucuggaugugcucuaaugggucucuacaguguagaauauguauuuaa

SEQ ID NO: 41947 - RNA, 1701 nt, Artificial Sequence
  derived and/or modified CDS sequence (wt) from hemagglutinin__InfluenzaA__AGJ73329
augaaggcaauacuaguaguucugcuauauacauuugcaaccgcaaaugcagacacauuauguauagguuaucaugcgaacaauucaacagacacuguagacacaguacuagaaaagaauguaacaguaacacacucuguuaaucuucuagaagacaagcauaacgggaaacuaugcaaacuaagagggguagccccauugcauuuggguaaauguaacauugcuggcuggauccugggaaauccagagugugaaucacucuccacagcaagcucaugguccuacauuguggaaacaucuaguucagacaauggaacguguuacccaggagauuucaucgauuaugaggagcuaagggagcaauugagcucagugucaucauuugaaagguuugagauauuccccaagacaaguucauggcccaaucaugacucgaacaaagguguaacggcagcauguccucaugcuggagcaaaaggcuucuacaaaaauuuaauauggcuaguuaaaaaaggaaauucauacccaaagcucagcaaauccuacauuaaugauaaagggaaagaaguccucgugcuauggggcauucaccauccaucuacuacugcugaccaacaaagucucuaucagaaugcagauacauauguuuuuguggggacaucaagauacagcaagaaguucaagccggaaauagcaauaagacccaaagugagggaucaagaagggagaaugaacuauuacuggacacuaguagagccgggagacaaaauaacauucgaagcaacuggaaaucuagugguaccgagauaugcauucgcaauggaaagaaaugcuggaucugguauuaucauuucagaugcaccaguccacgauugcaauacaacuugucagacacccaagggugcuauaaacaccagccucccauuucagaauauacauccgaucacaauuggaaaauguccaaaauauguaaaaagcacaaaauugagacuggccacaggauugaggaaugucccgucuauucaaucuagaggccuauuuggggccauugccggcuucauugaagggggguggacagggaugguagauggaugguacgguuaucaccaucaaaaugagcaggggucaggauaugcagccgaccugaagagcacacagaaugccauugacaagauuacuaacaaaguaaauucuguuauugaaaagaugaauacacaguucacagcaguagguaaagaguucaaccaccuggaaaaaagaauagagaauuuaaauaaaaaaguugaugaugguuuccuggacauuuggacuuacaaugccgaacuguugguucuauuggaaaaugaaagaacuuuggacuaccacgauucaaaugugaagaacuuauaugaaaagguaagaaaccaguuaaaaaacaaugccaaggaaauuggaaauggcugcuuugaauuuuaccacaaaugcgauaacacgugcauggaaagugucaaaaaugggacuuaugacuacccaaaauacucagaggaagcaaaauuaaacagagaagaaauagaugggguaaagcuggaaucaacaaggauuuaccagauuuuggcgaucuauucaacugucgccaguucauugguacugguagucucccugggggcaaucaguuucuggaugugcucuaaugggucucuacaguguagaauauguauuuaa

SEQ ID NO: 41948 - RNA, 1701 nt, Artificial Sequence
  derived and/or modified CDS sequence (wt) from hemagglutinin__InfluenzaA__AGJ73331
augaaggcaauacuaguaguucugcuauauacauuugcaaccgcaaaugcagacacauuauguauagguuaucaugcgaacaauucaacagacacuguagacacaguacuagaaaagaauguaacaguaacacacucuguuaaccuucuagaagacaagcauaacgggaaacuaugcaaacuaagagggguagccccauugcauuuggguaaauguaacauugcuggcuggauccugggaaauccagagugugaaucacucuccacagcaagcucaugguccuacauuguggaaacaucuaguucagacaauggaacguguuacccaggagauuucaucgauuaugaggagcuaagagagcaauugagcucagugucaucauuugaaagguuugagauauuccccaagacaaguucauggcccaaucaugacucgaacaaagguguaacgacagcauguccucaugcuggagcaaaaagcuucuacaaaaauuuaauauggcuaguuaaaaaaggaaauucauacccaaagcucagcaaauccuacauuaaugauaaagggaaagaaguccucgugcuauggggcauucaccauccaccuacuagugcugaccaacaaagucucuaucagaaugcagaugcauauguuuuuguggggacaucaagauacagcaagaaguucaagccggaaauagcaauaagacccaaagugaggggucaagaagggagaaugaacuauuacuggacacuaguagagccgggagacaaaauaacauucgaagcaacuggaaaucuagugguaccgagauaugcauucgcaauggaaagaaaugcuggaucugguauuaucauuucagauacaccaguccacgauugcaauacaacuugucagacacccaagggugcuauaaacaccagccucccauuucagaacauacauccgaucacaauuggaaaauguccaaaauauguaaaaagcacaaaauugagacuggccacaggauugaggaaugucccguccauucaaucuagaggccuauuuggggccauugccgguuucauugaagggggguggacagggaugguagauggaugguacgguuaucaccaucaaaaugagcaggggucaggauaugcagccgaccugaagagcacacagaaugccauugacgagauuacuaacaaaguaaacucuguuauugaaaaaaugaauacacaguucacagcaguagguaaagaguucaaccaccuggaaaaaagaauagagaauuuaaacaaaaaaguugaugaugguuuccuggacauuuggacuuacaaugccgaacuguugguucuauuggaaaaugaaagaacuuuggacuaccacgauucaaaggugaagaacuuauaugaaaagguaagaagccaguuaaaaaacaaugccaaggaaauuggaaacggcugcuuugaauuuuaccacaaaugugauaacacgugcauggaaagugucaaaaaugggacuuaugacuacccaaaauacucagaggaagcaaaauuaaacagagaagaaauagaugggguaaagcuggaaucaacaaggauuuaccagauuuuggcgaucuauucaacugucgccaguucauugguacugguagucucccugggggcaaucaguuucuggaugugcucuaaugggucucuacaguguagaauauguauuuaa

SEQ ID NO: 41949 - RNA, 1701 nt, Artificial Sequence
  derived and/or modified CDS sequence (wt) from hemagglutinin__InfluenzaA__AGJ73333
augaaggcaauacuaguaguucugcuauauacauuugcaaccgcaaaugcagacacauuauguauagguuaucaugcgaacaauucaacagacacuguagacacaguacuagaaaagaauguaacaguaacacacucuguuaaucuucuagaagacaagcauaacgggaaacuaugcaaacuaagagggguagccccauugcauuuggguaaauguaacauugcuggcuggauccugggaaauccagagugugaaucacucuccacagcaagcucaugguccuacauuguggaaacaucuaguucagacaauggaacguguuacccaggagauuucaucgauuaugaggagcuaagagagcaauugagcucagugucaucauuugaaagguuugagauauuccccaagacaaguucauggcccaaucaugacucgaacaaagguguaacggcagcauguccucaugcuggagcaaaaggcuucuacaaaaauuuaauauggcuaguuaaaaaaggaaauucauacccaaagcucagcaaauccuacauuaaugauaaagggaaagaaguccucgugcuauggggcauucaccauccaucuacuagugcugaccaacaaagucucuaucagaaugcagauacauauguuuuuguggggacaucaagauacagcaagaaguucaagccggaaauagcaauaagacccaaagugagggaucaagaagggagaaugaacuauuacuggacacuaguagagccgggagacaaaauaacauucgaagcaacuggaaaucuagugguaccgagauaugcauucgcaauggaaagaaaugcuggaucugguauuaucauuucagauacaccaguccacgauugcaauacaacuugucagacacccaagggugcuauaaacaccagccucccauuucagaauauacauccaaucacaauuggaaaauguccaaaauauguaaaaagcacaaaauugagacuggccacaggauugaggaaugucccgucuauucaaucuagaggccuauuuggggccauugccggcuucauugaagggggguggacagggaugguagauggaugguacgguuaucaccaucaaaaugagcaggggucaggauaugcagccgaccugaagagcacacagaaugccauugacaagauuacuaacaaaguaaauucuguuauugaaaagaugaauacacaguucacagcaguagguaaagaguucaaccaccuggaaaaaagaauagagaauuuaaauaaaaaaguugaugaugguuuccuggacauuuggacuuacaaugccgaacuguugguucuauuggaaaaugaaagaacuuuggacuaccacgauucaaaugugaagaacuuauaugaaaagguaagaaaccaguuaaaaaacaaugccaaggaaauuggaaauggcugcuuugaauuuuaccacaaaugcgauaacacgugcauggaaagugucaaaaaugggacuuaugacuacccaaaauacucagaggaagcaaaauuaaacagagaagaaauagaugggguaaagcuggaaucaacaaggauuuaccagauuuuggcgaucuauucaacugucgccaguucauugguacugguagucucccugggggcaaucaguuucuggaugugcucuaaugggucucuacaguguagaauauguauuuaa

SEQ ID NO: 41950 - RNA, 1701 nt, Artificial Sequence
  derived and/or modified CDS sequence (wt) from hemagglutinin__InfluenzaA__AGJ73335
augaaggcaauacuaguaguucugcuauauacauuugcaaccgcaaaugcagacacauuauguauagguuaucaugcgaacaauucaacagacacuguagacacaguacuagaaaagaauguaacaguaacacacucuguuaaucuucuagaagacaagcauaacgggaaacuaugcaaacuaagagggguagccccauugcauuuggguaaauguaacauugcuggcuggauccugggaaauccagagugugaaucacucuccacagcaagcucaugguccuacauuguggaaacaucuaguucagacaauggaacguguuacccaggagauuucaucgauuaugaggagcuaagagagcaauugagcucagugucaucauuugaaagguuugagauauuccccaagacaaguucauggcccaaucaugacucgaacaaagguguaacggcagcauguccucaugcuggagcaaaaagcuucuacaaaaauuuaauauggcuaguuaaaaaaggaaauucauacccaaagcucagcaaauccuacauuaaugauaaagggaaagaaguccucgugcuauggggcauucaccauccaucuacuacugcugaccaacaaagucucuaucagaaugcagauacauauguuuuuguggggacaucaagauacagcaagaaguucaagccggaaauagcaauaagacccaaagugagggaucaagaagggagaaugaacuauuacuggacacuaguagagccgagagacaaaauaacauucgaagcaacuggaaaucuagugguaccgagauaugcauucgcaauggaaagaaaugcuggaucugguauuaucauuucagauacaccaguccacgauugcaauacaacuugucagacacccaagggugcuauaaacaccagccucccauuucagaauauacauccgaucacaauuggaaaauguccaaaauauguaaaaagcacaaaauugagacuggccacaggauugaggaaugucccguccauucaaucuagaggccuauuuggggccauugccgguuucauugaagggggguggacagggaugguagauggaugguacgguuaucaccaucaaaaugagcaggggucaggauaugcagccgaccugaagagcacacagaaugccauugacaagauuacuaacaaaguaaauucuguuauugaaaagaugaauacacaguucacagcaguagguaaagaguucaaccaccuggaaaaaagaauagagaauuuaaauaaaaaaguugaugaugguuuccuggacauuuggacuuacaaugccgaacuguugguucuauuggaaaaugaaagaacuuuggacuaccacgauucaaaugugaagaacuuauaugaaaagguaagaaaccaguuaaaaaacaaugccaaggaaauuggaaauggcugcuuugaauuuuaccacaaaugcgauaacacgugcauggaaagugucaaaaaugggacuuaugacuacccaaaauacucagaggaagcaaaauuaaacagagaagaaauagaugggguaaagcuggaaucaacaaggauuuaccagauuuuggcgaucuauucaacugucgccaguucauugguacugguagucucccugggggcaaucaguuucuggaugugcucuaaugggucucuacaguguagaauauguauuuaa

SEQ ID NO: 41951 - RNA, 1701 nt, Artificial Sequence
  derived and/or modified CDS sequence (wt) from hemagglutinin__InfluenzaA__AGJ73337
augaaggcaauacuaguaguucugcuauauacauuugcaaccgcaaaugcagacacauuauguauagguuaucaugcgaacaauucaacagacacuguagacacaguacuagaaaagaauguaacaguaacacacucuguuaaucuucuagaagacaagcauaacgggaaacuaugcaaacuaagagggguagccccauugcauuuggguaaauguaacauugcuggcuggauccugggaaauccagagugugaaucacucuccacagcaagcucaugguccuacauuguggaaacaucuaguucagacaauggaacguguuacccaggagauuucaucgauuaugaggagcuaagagagcaauugagcucaguaucaucauuugaaagguuugagauauuccccaagacaaguucauggcccaaucaugacucgaacaaagguguaacggcagcauguccucaugcuggagcaaaaggcuucuacaaaaauuuaauauggcuaguuaaaaaaggaaauucauacccaaagcucagcaaauccuacauuaaugauaaagggaaagaaguccucgugcuauggggcauucaccauccaucuacuacugcugaccaacaaagccucuaucagaaugcagauacauauguuuuuguggggacaucaagauacagcaagaaguucaagccggaaauagcaauaagacccaaagugagggaucaagaagggagaaugaacuauuacuggacacuaguagagccgggagacaaaauaacauucgaagcaacuggaaaucuagugguaccgagauaugcauucgcaauggaaagaaaugcuggaucugguauuaucauuucagauacaccaguccacgauugcaauacaacuugucagacacccaagggugcuauaaacaccagccucccauuucagaauauacauccgaucacaauuggaaaauguccaaaauauguaaaaagcacaaaauugagacuggccacaggauugaggaaugucccgucuauucaaucuagaggccuauuuggggccauugccggcuucauugaagggggguggacagggaugguagauggaugguacgguuaucaccaucaaaaugagcaggggucaggauaugcagccgaccugaagagcacacagaaugccauugacaagauuacuaacaaaguaaauucuguuauugaaaagaugaauacacaguucacagcaguagguaaagaguucaaccaccuggaaaaaagaauagagaauuuaaauaaaaaaguugaugaugguuuccuggacauuuggacuuacaaugccgaacuguugguucuauuggaaaaugaaagaacuuuggacuaccacgauucaaaugugaagaacuuauaugaaaaggugagaaaccaguuaaaaaacaaugccaaggaaauuggaaauggcugcuuugaauuuuaccacaaaugcgauaacacgugcauggaaagugucaaaaaugggacuuaugacuacccaaaauacucugaggaagcaaaauuaaacagagaagaaauagaugggguaaagcuggaaucaacaaggauuuaccagauuuuggcgaucuauucaacugucgccaguucauugguacugguagucucccugggggcaaucaguuucuggaugugcucuaaugggucucuacaguguagaauauguauuuaa

SEQ ID NO: 41952 - RNA, 1701 nt, Artificial Sequence
  derived and/or modified CDS sequence (wt) from hemagglutinin__InfluenzaA__AGJ73339
augaaggcaauacuaguaguucugcuauauacauuugcaaccgcaaaugcagacacauuauguauagguuaucaugcgaacaauucaacagacacuguagacacaguacuagaaaagaauguaacaguaacacacucuguuaaucuucuagaagacaagcauaacgggaaacuaugcaaacuaagagggguagccccauugcauuuggguaaauguaacauugcuggcuggauccugggaaauccagagugugaaucacucuccacagcaagcucaugguccuacauuguggaaacaucuaguucagacaauggaacguguuacccaggagauuucaucgauuaugaggagcuaagagagcaauugagcucagugucaucauuugaaagguuugagauauuccccaagacaaguucauggcccaaucaugacucgaacaaagguguaacggcagcauguccucaugcuggagcaaaaggcuucuacaaaaauuuaauauggcuaguuaaaaaaggaaauucauacccaaagcucagcaaauccuacauuaaugauaaagggaaagaaguccucgugcuauggggcauucaccauccaucuacuacugcugaccaacaaagucucuaucagaaugcagauacauauguuuuuguggggacaucaagauacagcaagaaguucaagccggaaauagcaauaagacccaaagugagggaucaagaagggagaaugaacuauuacuggacacuaguagagccgggagacaaaauaacauucgaagcaacuggaaaucuagugguaccgagauaugcauucgcaauggaaagaaaugcuggaucugguauuaucauuucagauacaccaguccacgauugcaauacaacuugucagacacccaagggugcuauaaacaccagccucccauuucagaauauacauccgaucacaauuggaaaauguccaaaauauguaaaaagcacaaaauugagacuggccacaggauugaggaaugucccgucuauucaaucuagaggccuauuuggggccauugccggcuucauugaagggggguggacagggaugguagauggaugguacgguuaucaccaucaaaaugagcaggggucaggauaugcagccgaccugaagagcacacagaaugccauugacaagauuacuaacaaaguaaauucuguuauugaaaagaugaauacacaguucacagcaguagguaaagaguucaaccaccuggaaaaaagaauagagaauuuaaauaaaaaaguugaugaugguuuccuggacauuuggacuuacaaugccgaacuguugguucuauuggaaaaugaaagaacuuuggacuaccacgauucaaaugugaagaacuuauaugaaaagguaagaaaccaguuaaaaaacaaugccaaggaaauuggaaauggcugcuuugaauuuuaccacaaaugcgauaacacgugcauggaaagugucaaaaaugggacuuaugacuacccaaaauacucagaggaagcaaaauuaaacagagaagaaauagaugggguaaagcuggaaucaacaaggauuuaccagauuuuggcgaucuauucaacugucgccaguucauugguacugguagucucccugggggcaaucaguuucuggaugugcucuaaugggucucuacaguguagaauauguauuuaa

SEQ ID NO: 41953 - RNA, 1701 nt, Artificial Sequence
  derived and/or modified CDS sequence (wt) from hemagglutinin__InfluenzaA__AGJ73341
augaaggcaauacuaguaguucugcuauauacauuugcaaccgcaaaugcagacacauuauguauagguuaucaugcgaacaauucaacagacacuguagacacaguacuagaaaagaauguaacaguaacacacucuguuaaucuucuagaagacaagcauaacgggaaacuaugcaaacuaagagggguagccccauugcauuuggguaaauguaacauugcuggcuggauccugggaaauccagagugugaaucacucuccacagcaagcucaugguccuacauuguggaaacaucuaguucagacaauggaacguguuacccaggagauuucaucgauuaugaggagcuaagagagcaauugagcucagugucaucauuugaaagguuugagauauuccccaagacaaguucauggcccaaucaugacucgaacaaagguguaacggcagcauguccucaugcuggagcaaaaggcuucuacaaaaauuuaauauggcuaguuaaaaaaggaaauucauacccaaagcucagcaaauccuacauuaaugauaaagggaaagaaguccucgugcuauggggcauucaccauccaucuacuacugcugaccaacaaagucucuaucagaaugcagauacauauguuuuuguggggacaucaagauacagcaagaaguucaagccggaaauagcaauaagacccaaagugagggaucaagaagggagaaugaacuauuacuggacacuaguagagccgggagacaaaauaacauucgaagcaacuggaaaucuagugguaccgagauaugcauucgcaauggaaagaaaugcuggaucugguauuaucauuucagauacaccaguccacgauugcaauacaacuugucagacacccaagggugcuauaaacaccagccucccauuucagaauauacauccgaucacaauuggaaaauguccaaaauauguaaaaagcacaaaauugagacuggccacaggauugaggaaugucccgucuauucaaucuagaggccuauuuggggccauugccggcuucauugaagggggguggacagggaugguagauggaugguacgguuaucaccaucaaaaugagcaggggucaggauaugcagccgaccugaagagcacacagaaugccauugacaagauuacuaacaaaguaaauucuguuauugaaaagaugaauacacaguucacagcaguagguaaagaguucaaccaccuggaaaaaagaauagagaauuuaaauaaaaaaguugaugaugguuuccuggacauuuggacuuacaaugccgaacuguugguucuauuggaaaaugaaagaacuuuggacuaccacgauucaaaugugaagaacuuauaugaaaagguaagaaaccaguuaaaaaacaaugccaaggaaauuggaaauggcugcuuugaauuuuaccacaaaugcgauaacacgugcauggaaagugucaaaaaugggacuuaugacuacccaaaauacucagaggaagcaaaauuaaacagagaagaaauagaugggguaaagcuggaaucaacaaggauuuaccagauuuuggcgaucuauucaacugucgccaguucauuggugcugguagucucccugggggcaaucaguuucuggaugugcucuaaugggucucuacaguguagaauauguauuuaa

SEQ ID NO: 41954 - RNA, 1701 nt, Artificial Sequence
  derived and/or modified CDS sequence (wt) from hemagglutinin__InfluenzaA__AGJ73343
augaaggcaauacuaguaguucugcuauauacauuugcaaccgcaaaugcagacacauuauguauagguuaucaugcgaacaauucaacagacacuguagacacaguacuagaaaagaauguaacaguaacacacucuguuaaccuucuagaagacaagcaaaacgggaaacuaugcaaacugagagggguagccccauugcauuuggguaaauguaacauugcuggcuggauccugggaaauccagagugugaaucacucuccacagcaagcucaugguccuacauuguggaaacaucuaguucagacaauggaacguguuacccaggagauuucaucaauuaugaagagcuaagagagcaauugagcucagugucaucauuugaaagguuugagauauuccccaagacaaguucauggcccaaucaugacucgaacaaagguguaacggcagcauguccucaugcuggagcaaaaagcuucuacaaaaauuuaauauggcuaguuaaaaaaggaaauucauacccaaagcucagcaaauccuacauuaacgauaaagggaaagaaguccucgugcuauggggcauucaccauccaucuacuagugcugaccaacaaagucucuaucagaaugcagaugcauauguuuuuguggggacaucaaaauacagcaagaaguucaagccggaaauagcaguaagacccaaagugagggaucaagaagggagaaugaacuauuacuggacacuaguagagccgggagacaaaauaacauucgaagcaacuggaaaucuauugguaccgagauaugcauucgcaauggaaagaaaugcuggaucugguauuaucauuucagauacaccaguccacgauugcaauacaacuugucagacacccaagggugcuauaaacaccagccucccauuucagaauauacauccgaucacaauugggaaauguccaaaauauguaaaaagcacaaaauugagacuggccacaggauugaggaaugucccgucuauucaaucuagaggccuauuuggggccauugccgguuucauugaagggggguggacagggaugguagauggaugguacgguuaucaccaucaaaaugagcaggggucaggauaugcagccgaccugaagagcacacagaaugccauugacaagauuacuaacaaaguaaauucuguuauugaaaagaugaauacacaguucacagcaguagguaaagaguucaaccaccuggaaaaaagaauagagaauuuaaauaaaaaaguugaugaugguuuccuggacauuuggacuuacaaugccgaacuguugguucuauuggaaaaugaaagaacuuuggacuaccacgauucaaaugugaaaaacuuauaugaaaagguaagaagccaguuaaaaaacaaugccaaggaaauuggaaacggcugcuuugaauuuuaccacaaaugcgauaacacgugcauggaaagugucaaaaaugggacuuaugacuacccaaaauacucagaggaagcaaaauuaaacagagaagaaauagaugggguaaagcuggaaucaacaaggauuuaccagauuuuggcgaucuauucaacugucgccaguucauugguacugguagucucccugggggcaaucaguuucuggaugugcucuaaugggucucuacaguguagaauauguauuuaa

SEQ ID NO: 41955 - RNA, 1701 nt, Artificial Sequence
  derived and/or modified CDS sequence (wt) from hemagglutinin__InfluenzaA__AGJ73345
augaaggcaauacuaguaguucugcuauauacauuugcaaccgcaaaugcagacacauuauguauagguuaucaugcgaacaauucaacagacacuguagacacaguacuagaaaagaauguaacaguaacacacucuguuaaccuucuagaagacaagcauaacgggaaacuaugcaaacugagagggguagccccauugcauuuggguaaauguaacauugcuggcuggauccugggaaauccagagugugaaucacucuccacagcaagcucaugguccuacauuguggaaacaucuaguucagacaauggaacguguuacccaggagauuucaucaauuaugaagagcuaagagagcaauugagcucagugucaucauuugaaagguuugagauauuccccaagacaaguucauggcccaaucaugacucgaacaaagguguaacggcagcauguccucaugcuggagcaaaaagcuucuacaaaaauuuaauauggcuaguuaaaaaaggaaauucauacccaaagcucagcaaauccuacauuaacgauaaagggaaagaaguccucgugcuauggggcauucaccauccaucuacuagugcugaccaacaaagucucuaucagaaugaagaugcauauguuuuuguggggacaucaaaauacagcaagaaguucaagccggaaauagcaguaagacccaaagugagggaucaagaagggagaaugaacuauuacuggacacuaguagagccgggaaacaaaauaacauucgaagcaacuggaaaucuauugguaccgagauaugcauucgcaauggaaagaaaugcuggaucugguauuaucauuucagauacaccaguccacgauugcaauacaacuugucagacacccaagggugcuauaaacaccagccucccauuucagaauauacauccgaucacaauuggaaaauguccaaaauauguaaaaagcacaaaauugagacuggccacaggauugaggaaugucccgucuauucaaucuagaggccuauuuggggccauugccgguuucauugaagggggguggacagggaugguagauggaugguacgguuaucaccaucaaaaugagcaagggucaggauaugcagccgaccugaagagcacacagaaugccauugacaagauuacuaacaaaguaaauucuguuauugaaaagaugaauacacaguucacagcaguagguaaagaguucaaccaccuggaaaaaagaauagagaauuuaaauaaaaaaguugaugaugguuuccuggacauuuggacuuacaaugccgaacuguugguucuauuggaaaaugaaagaacuuuggacuaccacgauucaaaugugaaaaacuuauaugaaaagguaagaagccaguuaaaaaacaaugccaaggaaauuggaaacggcugcuuugaauuuuaccacaaaugcgauaacacgugcauggaaagugucaaaaaugggacuuaugacuacccaaaauacucagaggaagcaaaauuaaacagagaagaaauagaugggguaaagcuggaaucaacaaggauuuaccagauuuuggcgaucuauucaacugucgccaguucauugguacugguagucucccugggggcaaucaguuucuggaugugcucuaaugggucucuacaguguagaauauguauuuaa

SEQ ID NO: 41956 - RNA, 1701 nt, Artificial Sequence
  derived and/or modified CDS sequence (wt) from hemagglutinin__InfluenzaA__AGJ73347
augaaggcaauacuaguaguucugcuauauacauuugcaaccgcaaaugcagacacauuauguauagguuaucaugcgaacaauucaacagacacuguagacacaguacuagaaaagaauguaacaguaacacacucuguuaaccuucuagaagacaagcauaacgggaaacuaugcaaacugagagggguagccccauugcauuuggguaaauguaacauugcuggcuggauccugggaaauccagagugugaaucacucuccacagcaagcucaugguccuacauuguggaaacaucuaguucagacaauggaacguguuacccaggagauuucaucaauuaugaagagcuaagagagcaauugagcucagugucaucauuugaaagguuugagauauuccccaagacaaguucauggcccaaucaugacucgaacaaagguguaacggcagcauguccucaugcuggagcaaaaagcuucuacaaaaauuuaauauggcuaguuaaaaaaggaaauucauacccaaagcucagcaaauccuacauuaacgauaaagggaaagaaguccucgugcuauggggcauucaccauccaucuacuagugcugaccaacaaagucucuaucagaaugcagaugcauauguuuuuguggggacaucaaaauacagcaagaaguucaagccggaaauagcaguaagaccaaaagugagggaucaagaagggagaaugaacuauuacuggacacuaguagagccaggagacaaaauaacauucgaagcaacuggaaaucuauugguaccgagauaugcauucgcaauggaaagaaaugcuggaucugguauuaucauuucagauacaccaguccacgauugcaauacaaccugucagacacccaagggugcuauaaacaccagccucccauuucagaauauacauccgaucacaauuggaaaauguccaaaauauguaaaaagcacaaaauugagacuggccacaggauugaggaaugucccgucuauucaaucuagaggccuauuuggggccauugccgguuucauugaagggggguggacagggaugguagauggaugguacgguuaucaccaucaaaaugagcaggggucaggauaugcagccgaccugaagagcacacagaaugccauugacaagauuacuaacaaaguaaauucuguuauugaaaagaugaauacacaguucacagcaguagguaaagaguucaaccaccuggaaaaaagaauagagaauuuaaauaaaaaaguugaugaugguuuccuggacauuuggacuuacaaugccgaacuguugguucuauuggaaaaugaaagaacuuuggacuaccacgauucaaaugugaaaaacuuauaugaaaagguaagaagccaguuaaaaaacaaugccaaggaaauuggaaacggcugcuuugaauuuuaccacaaaugcgauaacacgugcauggaaagugucaaaaaugggacuuaugacuacccaaaauacucagaggaagcaaaauuaaacagagaagaaauagaugggguaaagcuggaaucaacaaggauuuaccagauuuuggcgaucuauucaacugucgccaguucauugguacugguagucucccugggggcaaucaguuucuggaugugcucuaaugggucucuacaguguagaauauguauuuaa

SEQ ID NO: 41957 - RNA, 1701 nt, Artificial Sequence
  derived and/or modified CDS sequence (wt) from hemagglutinin__InfluenzaA__AGJ73349
augaaggcaauacuaguaguucugcuauauacauuugcaaccgcaaaugcagacacauuauguauagguuaucaugcgaacaauucaacagacacuguagacacaguacuagaaaagaauguaacaguaacacacucuguuaaccuucuggaagacaagcauaacgggaaacuaugcaaacugagagggguagccccauugcauuuggguaaauguaacauugcuggcuggauccugggaaauccagagugugaaucacucuccacagcaagcucaugguccuacauuguggaaacaucuaguucagacaauggaacguguuacccaggagauuucaucaauuaugaagagcuaagagagcaauugagcucagugucaucauuugaaagguuugagauauuccccaagacaaguucauggcccaaucaugacucgaacaaagguguaacggcagcauguccucaugcuggagcaaaaagcuucuacaaaaauuuaauauggcuaguuaaaaaaggaaauucauacccaaagcucagcaaauccuacauuaacgauaaagggaaagaaguccucgugcuauggggcauucaccauccaucuacuagugcugaccaacaaagucucuaucagaaugcagaugcauauguuuuuguggggacaucaaaauacagcaagaaguucaagccggaaauagcaguaagacccaaagugagggaucaagaagggagaaugaacuauuacuggacacuaguagagccgggagacaaaauaacauucgaagcaacuggaaaucuauugguaccgagauaugcauucgcaauggaaagaaaugcuggaucugguauuaucauuucagauacaccaguccacgauugcaauacaacuugucagacacccaagggugcuauaaacaccagccucccauuucagaauauacauccgaucacaauuggaaaauguccaaaauauguaaaaagcacaaaauugagacuggccacaggauugaggaaugucccgucuauucaaucuagaggccuauuuggggccauugccgguuucauugaagggggguggacagggaugguagauggaugguacgguuaucaccaucaaaaugagcaggggucaggauaugcagccgaccugaagagcacacagaaugccauugacaagauuacuaacaaaguaaauucuguuauugaaaagaugaauacacaguucacagcaguagguaaagaguucaaccaccuggaaaaaagaauagagaauuuaaauaaaaaaguugaugaugguuuccuggauauuuggacuuacaaugccgaacuguugguucuauuggaaaaugaaagaacuuuggacuaccacgauucaaaugugaaaaacuuauaugaaaagguaagaagccaguuaaaaaacaaugccaaggaaauuggaaacggcugcuuugaauuuuaccacaaaugcgauaacacgugcauggaaagugucaaaaaugggacuuaugacuacccaaaauacucagaggaagcaaaauuaaacagagaagaaauagaugggguaaagcuggaaucaacaaggauuuaccagauuuuggcgaucuauucaacugucgccaguucauugguacugguagucucccugggggcaaucaguuucuggaugugcucuaaugggucucuacaguguagaauauguauuuaa

SEQ ID NO: 41958 - RNA, 1701 nt, Artificial Sequence
  derived and/or modified CDS sequence (wt) from hemagglutinin__InfluenzaA__AGJ73351
augaaggcaauacuaguaguucugcuauauacauuugcaaccgcaaaugcagacacauuauguauagguuaucaugcgaacaauucaacagacacuguagacacaguacuagaaaagaauguaacaguaacacacucuguuaaucuucuagaagacaagcauaacgggaaacuaugcaaacuaagagggguagccccauugcauuuggguaaauguaacauugcuggcuggauucugggaaauccagagugugaaucacucuccacagcaagcucaugguccuacauuguggaaacaucuaguucagacaauggaacguguuacccaggagauuucaucgauuaugaggagcuaagagagcaauugagcucagugucaucauuugaaagguuugagauauuccccaagacaaguucauggcccaaucaugacucgaacaaagguguaacggcagcauguccucaugcuggagcaaaaggcuucuacaaaaauuuaauauggcuaguuaaaaaaggaaauucauacccaaagcucagcaaauccuacauuaaugauaaagggaaagaaguccucgugcuauggggcauucaccauccaucuacuacugcugaccaacaaagucucuaucagaaugcagauacauauguuuuuguggggacaucaagauacagcaagaaguucaagccggaaauagcaauaagacccaaaaugagggaucaagaagggagaaugaacuauuacuggacacuaguagagccgggagacaaaauaacauucgaagcaacuggaaaucuagugguaccgagauaugcauucgcaauggaaagaaaugcuggaucugguauuaucauuucagauacaccaguccacgauugcaauacaacuugucagacacccaagggugcuauaaacaccagccucccauuucagaauauacauccgaucacaauuggaaaauguccaaaauauguaaaaagcacaaaauugagacuggccacaggauugaggaaugucccgucuauucaaucuagaggccuauuuggggccauugccggcuucauugaagggggguggacagggaugguagauggaugguacgguuaucaccaucaaaaugagcaggggucaggauaugcagccgaccugaagagcacacagaaugccauugacaagauuacuaacaaaguaaauucuguuauugaaaagaugaauacacaguucacagcaguagguaaagaguucaaccaccuggaaaaaagaauagagaauuuaaauaaaaaaguugaugaugguuuccuggacauuuggacuuacaaugccgaacuguugguucuauuggaaaaugaaagaacuuuggacuaccacgauucaaaugugaagaacuuauaugaaaagguaagaaaccaguuaaaaaacaaugccaaggaaauuggaaauggcugcuuugaauuuuaccacaaaugcgauaacacgugcauggaaagugucaaaaaugggacuuaugacuacccaaaauacucagaggaagcaaaauuaaacagagaagaaauagaugggguaaagcuggaaucaacaaggauuuaccagauuuuggcgaucuauucaacugucgccaguucauugguacugguagucucccugggggcaaucaguuucuggaugugcucuaaugggucucuacaguguagaauauguauuuaa

SEQ ID NO: 41959 - RNA, 1701 nt, Artificial Sequence
  derived and/or modified CDS sequence (wt) from hemagglutinin__InfluenzaA__AGJ73353
augaaggcaauacuaguaguucugcuauauacauuugcaaccgcaaaugcagacacauuauguauagguuaucaugcgaacaauucaacagacacuguagacacaguacuagaaaagaauguaacaguaacacacucuguuaaccuucuagaagacaagcauaacgggaaacuaugcaaacugagagggguagccccauugcauuuggguaaauguaacauugcuggcuggauccugggaaauccagagugugaaucacucuccacagcaagcucaugguccuacauuguggaaacaucuaguucagacaauggaacguguuacccaggagauuucaucaauuaugaagagcuaagagagcaauugagcucagugucaucauuugaaagguuugagauauuccccaagacaaguucauggcccaaucaugacucgaacaaagguguaacggcagcauguccucaugcuggagcaaaaagcuucuacaaaaauuuaauauggcuaguuaaaaaaggaaauucauacccaaagcucagcaaauccuacauuaacgauaaagggaaagaaguccucgugcuauggggcauucaccauccaucuacuagugcugaccaacaaagucucuaucagaaugcagaugcauauguuuuuguggggacaucaaaauacagcaagaaguucaagccggaaauagcaguaagacccaaagugagggaucaagaagggagaaugaacuauuacuggacacuaguagagccgggagacaaaauaacauucgaagcaacuggaaaucuauuggugccgagauaugcauucgcaauggaaagaaaugcuggaucugguauuaucauuucagauacaccaguccaugauugcaauacaacuugucagacacccaagggugcuauaaacaccagccucccauuucagaguauacauccgauuacaauuggaaaauguccaaaauauguaaaaagcacaaaauugagacuggccacaggauugaggaaugucccgucuauucaaucuagaggccuauuuggggccauugccgguuucauugaagggggguggacagggaugguagauggaugguacgguuaucaccaucaaaaugagcaggggucaggauaugcagccgaccugaagagcacacagaaugccauugacaagauuacuaacaaaguaaauucuguuauugaaaagaugaauacacaguucacagcaguagguaaagaguucaaccaccuggaaaaaagaauagagaauuuaaauaaaaaaguugaugaugguuuccuggacauuuggacuuacaaugccgaacuguugguucuauuggaaaaugaaagaacuuuggacuaccacgauucaaaugugaaaaacuuauaugaaaagguaagaagccaguuaaaaaacaaugccaaggaaauuggaaacggcugcuuugaauuuuaccacaaaugcgauaacacgugcauggaaagugucaaaaaugggacuuaugacuacccaaaauacucagaggaagcaaaauuaaacagagaagaaauagaugggguaaagcuggaaucaacaaggauuuaccagauuuuggcgaucuauucaacugucgccaguucauugguacugguagucucccugggggcaaucaguuucuggaugugcucuaaugggucucuacaguguagaauauguauuuaa

SEQ ID NO: 41960 - RNA, 1701 nt, Artificial Sequence
  derived and/or modified CDS sequence (wt) from hemagglutinin__InfluenzaA__AGJ73355
augaaggcaauacuaguaguucugcuauauacauuugcaaccgcaaaugcagacacauuauguauagguuaucaugcgaacaauucaacagacacuguagacacaguacuagaaaagaauguaacaguaacacacucuguuaaucuucuagaagacaagcauaacgggaaacuaugcaaacuaagaggaguagccccauugcauuuggguaaauguaacauugcuggcuggauccugggaaauccagagugugaaucacucuccacagcaagcucaugguccuacauuguggaaacaucuaguucagacaauggaacguguuacccaggagauuucaucgauuaugaggagcuaagagagcaauugagcucagugucaucauuugaaagguuugagauauuccccaagacaaguucauggcccaaucaugacucgaacaaagguguaacggcagcauguccucaugcuggagcaaaaggcuucuacaaaaauuuaauauggcuaguuaaaaaaggaaauucauacccaaagcucagcaaauccuacauuaaugauaaagggaaagaaguccucgugcuauggggcauucaccauccaucuacuacugcugaccaacaaagucucuaucagaaugcagauacauauguuuuuguggggacaucaagauacagcaagaaguucaagccggaaauagcaauaagacccaaagugagggaucaagaagggagaaugaacuauuacuggacacuaguagagccgggagacaaaauaacauucgaagcaacuggaaaucuagugguaccgagauaugcauucgcaauggaaagaaaugcuggaucugguauuaucauuucagauacaccaguccacgauugcaauacaacuugucagacacccaagggugcuauaaacaccagccucccauuucagaauauacauccgaucacaauuggaaaauguccaaaauauguaaaaagcacaaaauugagacuggccacaggauugaggaaugucccgucuauucaaucuagaggccuauuuggggccauugccggcuucauugaagggggguggacagggaugguagauggaugguacgguuaucaccaucaaaaugagcaagggucaggauaugcagccgaccugaagagcacacagaaugccauugacaagauuacuaacaaaguaaauucuguuauugaaaagaugaauacacaguucacagcaguagguaaagaguucaaccaccuggaaaaaagaauagagaauuuaaauaaaaaaguugaugaugguuuccuggacauuuggacuuacaaugccgaacuguugguucuauuggaaaaugaaagaacuuuggacuaccacgauucaaaugugaagaacuuauaugaaaagguaagaaaccaguuaaaaaacaaugccaaggaaauuggaaauggcugcuuugaauuuuaccacaaaugcgauaacacgugcauggaaagugucaaaaaugggacuuaugacuacccaaaauauucagaggaagcaaaauuaaacagagaagaaauagaugggguaaagcuggaaucaacaaggauuuaccagauuuuggcgaucuauucaacugucgccaguucauugguacugguagucucccugggggcaaccaguuucuggaugugcucuaaugggucucuacaguguagaauauguauuuaa

SEQ ID NO: 41961 - RNA, 1701 nt, Artificial Sequence; identical to SEQ ID NO: 41783
  derived and/or modified CDS sequence (wt) from hemagglutinin__InfluenzaA__AGJ73357

SEQ ID NO: 41962 - RNA, 1701 nt, Artificial Sequence
  derived and/or modified CDS sequence (wt) from hemagglutinin__InfluenzaA__AGJ73361
augaaggcaauacuaguaguucugcuauauacauuugcaaccgcaaaugcagacacauuauguauagguuaucaugcgaacaauucaacagacacuguagacacaguacuagaaaagaauguaacaguaacacacucuguuaaucuucuagaagacaagcauaacgggaaacuaugcaaacuaagagggguagccccauugcauuuggguaaauguaacauugcuggcuggauccugggaaauccagagugugaaucacucuccacaucaagcucaugguccuacauuguggaaacaucuaguucagacaauggaacguguuacccaggagauuucaucgauuaugaggagcuaagagagcaauugagcucagugucaucauuugaaagguuugagauauuccccaagacaaguucauggcccaaucaugacucgaacaaagguguaacggcagcauguccucaugcuggagcaaaaggcuucuacaaaaauuuaauauggcuaguuaaaaaaggaaauucauacccaaagcucagcaaauccuacauuaaugauaaagggaaagaaguccucgugcuauggggcauucaccauccaucuacuacugcugaccaacaaagucucuaucagaaugcagauacauauguuuuuguggggacaucaagauacagcaagaaguucaagccggaaauagcaauaagacccaaagugagggaucaagaagggagaaugaacuauuacuggacacuaguagagccgggagacaaaauaacauucgaagcaacuggaaaucuagugguaccgagauaugcauucgcaauggaaagaaaugcuggaucugguauuuucauuucagauacaccaguccacgauugcaauacaacuugucagacacccaagggugcuauaaacaccagccucccauuucagaauauacauccgaucacaauuggaaaauguccaaaauauguaaaaagcacaaaauugagacuggccacaggauugaggaaugucccgucuauucaaucuagaggccuauuuggggccauugccggcuucauugaagggggguggacagggaugguagauggaugguacgguuaucaccaucaaaaugagcaggggucaggauaugcagccgaccugaagagcacacagaaugccauugacaagauuacuaacaaaguaaauucuguuauugaaaagaugaauacacaguucacagcaguagguaaagaguucaaccaccuggaaaaaagaauagagaauuuaaauaaaaaaguugaugaugguuuccuggacauuuggacuuacaaugccgaacuguugguucuauuggaaaaugaaagaacuuuggacuaccacgauucaaaugugaagaacuuauaugaaaagguaagaaaccaguuaaaaaacaaugccaaggaaauuggaaauggcugcuuugaauuuuaccacaaaugcgauaacacgugcauggaaagugucaaaaaugggacuuaugacuacccaaaauacucagaggaagcaaaauuaaacagagaagaaauagaugggguaaagcuggaaucaacaaggauuuaccagauuuuggcgaucuauucaacugucgccaguucauugguacugguagucucccugggggcaaucaguuucuggaugugcucuaaugggucucuacaguguagaauauguauuuaa

SEQ ID NO: 41963 - RNA, 1701 nt, Artificial Sequence
  derived and/or modified CDS sequence (wt) from hemagglutinin__InfluenzaA__AGJ73363
augaaggcaauacuaguaguucugcuauauacauuugcaaccgcaaaugcagacacauuauguauagguuaucaugcgaacaauucaacagacacuguagacacaguacuagaaaagaauguaacaguaacacacucuguuaaccuucuagaagacaagcauaacgggaaacuaugcaaacugagagggguagccccauugcauuuggguaaauguaacauugcuggcuggauccugggaaauccagagugugaaucacucuccacagcaagcucaugguccuacauuguggaaacaucuaguucagacaauggaacguguuacccaggagauuucaucaauuaugaagagcuaagagagcaauugagcucagugucaucauuugaaagguuugagauauuccccaagacaaguucauggcccaaucaugauucgaacaaagguguaacggcagcauguccucaugcuggagcaaaaagcuucuacaaaaauuuaauauggcuaguuaaaaaaggaaauucauacccaaagcucagcaaauccuacauuaacgauaaagggaaagaaguccucgugcuauggggcauucaccauccaucuacuagugcugaccaacaaagucucuaucagaaugcagaugcauauguuuuuguggggacaucaaaauacagcaagaaguucaagccggaaauagcaguaagacccaaagugagggaucaagaagggagaaugaacuauuacuggacacuaguagagccgggagacaaaauaacauucgaagcaacuggaaaucuauugguaccgagauaugcauucgcaauggaaagaaaugcuggaucugguauuaucauuucagauacaccaguccacgauugcaauacaacuugucagacacccaagggugcuauaaacaccagccucccauuucagaauauacauccgaucacaauuggaaaauguccaaaauauguaaaaagcacaaaauugagacuggccacaggauugaggaaugucccgucuauucaaucuagaggccuauuuggggccauugccgguuucauugaagggggguggacagggaugguagauggaugguacgguuaucaccaucaaaaugagcaggggucaggauaugcagccgaccugaagagcacacagaaugccauugacaagauuacuaacaaaguaaauucuguuauugaaaagaugaauacacaguucacagcaguagguaaagaguucaaccaccuggaaaaaagaauagagaauuuaaauaaaaaaguugaugaugguuuccuggacauuuggacuuacaaugccgaacuguugguucuauuggaaaaugaaagaacuuuggacuaccacgauucaaaugugaaaaacuuauaugaaaagguaagaagccaguuaaaaaacaaugccaaggaaauuggaaacggcugcuuugaauuuuaccacaaaugcgauaacacgugcauggaaagugucaaaaaugggacuuaugacuacccaaaauacucagaggaagcaaaauuaaacagagaagaaauagaugggguaaagcuggaaucaacaaggauuuaccagauuuuggcgaucuauucaacugucgccaguucauugguacugguagucucccugggggcaaucaguuucuggaugugcucuaaugggucucuacaguguagaauauguauuuaa

SEQ ID NO: 41964 - RNA, 1701 nt, Artificial Sequence
  derived and/or modified CDS sequence (wt) from hemagglutinin__InfluenzaA__AGJ73365
augaaggcaauacuaguaguucugcuauauacauuugcaaccgcaaaugcagacacauuauguauagguuaucaugcgaacaauucaacagacacuguagacacaguacuagaaaagaauguaacaguaacacacucuguuaaccuucuagaagacaagcauaacgggaaacuaugcaaacuaagagggguagccccauugcauuuggguaaauguaacauugcuggcuggauccugggaaauccagagugugaaucacucuccacagcaagcucaugguccuacauuguggaaacaucuaguucagacaauggaacguguuacccaggagauuucaucaauuaugaggagcuaagagagcaauugagcucagugucaucauuugaaagguuugagauauuccccaagacaaguucauggcccaaucaugacucgaacaaagguguaacggcagcauguccucaugcuggagcaaaaagcuucuacaaaaauuuaauauggcuaguuaaaaaaggaaauucauacccaaagcucagcaaauccuacauuaaugauaaagggaaagaaguccucgugcuguggggcauucaccauccaucuacuacugcugaccaacaaagucucuaucagaaugcagaugcauauguuuuuguggggacaucaagauacagcaagaaguucaagccggaaauagcaauaagacccaaagugagggaucaagaagggagaaugaacuauuacuggacacuaguagagccgggagacaaaauaacauucgaagcaacuggaaaucuagugguaccgagauaugcauucgcaauggaaagaaaugcuggaucugguauuaucauuucagauacaccaguccacgauugcaauacaacuugucagacacccaagggugcuauaaacaccagccucccauuucagaauauacauccgaucacaauuggaaaauguccaaaauauguaaaaagcacaaaauugagacuggccacaggauugaggaaugucccgucuauucaaucuagaggccuauuuggggccauugccggcuucauugaagggggguggacagggaugguagauggaugguacgguuaucaccaucaaaaugagcaggggucaggauaugcagccgaccugaagagcacacagaaugccauugacaagauuacuaacaaaguaaauucuguuauugaaaagaugaauacacaguucacagcaguagguaaagaguucaaccaccuggaaaaaagaauagagaauuuaaauaaaaaaguugaugaugguuuccuggacauuuggacuuacaaugccgaacuguugguucuauuggaaaaugaaagaacuuuggacuaccacgauucaaaugugaagaacuuguaugaaaagguaagaaaccaguuaaaaaacaaugccaaggaaauuggaaacggcugcuuugaauuuuaccacaaaugcgauaacacgugcauggaaagugucaaaaaugggacuuaugacuacccaaaauacucagaggaggcaaaauuaaacagagaagaaauagaugggguaaagcuggaaucaacaaggauuuaccagauuuuggcgaucuauucaacugucgccaguucauugguacugguagucucccugggggcaaucaguuucuggaugugcucuaaugggucucuacaguguagaauauguauuuaa

SEQ ID NO: 41965 - RNA, 1701 nt, Artificial Sequence
  derived and/or modified CDS sequence (wt) from hemagglutinin__InfluenzaA__AGJ73367
augaaggcaauacuaguaguucugcuauauacauuugcaaccgcaaaugcagacacauuauguauagguuaucaugcgaacaauucaacagacacuguagacacaguacuagaaaagaauguaacaguaacacacucuguuaaccuucuagaagacaagcauaacgggaaacuaugcaaacugagaggaguagccccauugcauuuggguaaauguaacauugcuggcuggauccugggaaauccagagugugaaucacucuccacagcaagcucauggcccuacauuguggaaacaucuaguucagacaauggaacguguuacccaggagauuucaucaauuaugaagagcuaagagagcaauugagcucagugucaucauuugaaagguuugagauauuccccaagacaaguucauggcccaaucaugacucgaacaaagguguagcggcagcauguccucaugcuggagcaaaaagcuucuacaaaaauuuaauauggcuaguuaaaaaaggaaauucauacccaaagcucagcaaauccuacauuaacgauaaagggaaagaaguccucgugcuauggggcauucaccauccaucuacuagugcugaccaacaaagucucuaucagaaugcagaugcauauguuuuuguggggacaucaaaauacagcaagaaguucaagccggaaauagcaguaagacccaaagugagggaucaagaagggagaaugaacuauuacuggacacuaguagagccgggagacaaaauaacauucgaagcaacuggaaaucuauugguaccgagauaugcauucgcaauggaaagaaaugcuggaucugguauuaucauuucagauacaccaguccaggauugcaauacaacuugucagacacccaagggugcuauaaacaccagccucccauuucagaauauacauccgaucacaauuggaaaauguccaaaauauguaaaaagcacaaaauugagacuggccacaggauugaggaaugucccgucuauucaaucuagaggccuauuuggggccauugccggcuucauugaagggggguggacagggaugguagauggaugguacgguuaucaccaucaaaaugagcaggggucaggauaugcagccgaccugaagagcacacagaaugccauugacaagauuacuaacaaaguaaauucuguuauugaaaagaugaauacacaguucacagcaguagguaaagaguucaaccaccuggaaaaaagaauagagaauuuaaauaaaaaaguugaugaugguuuccuggacauuuggacuuacaaugccgaacuguugguucuauuggaaaaugaaagaacuuuggacuaccacgauucgaaugugaagaacuuauaugaaaagguaagaaaccaguuaaaaaacaaugccaaggaaauuggaaauggcugcuuugaauuuuaccacaaaugcgauaacacgugcauggaaagugucaaaaaugggacuuaugacuacccaaaauacucagaggaagcaaaauuaaacagagaagaaauagaugggguaaagcuggaaucaacaaggauuuaccagauuuuggcgaucuauucaacugucgccaguucauugguacugguagucucccugggggcaaucaguuucuggaugugcucuaaugggucucuacaguguagaauauguauuuaa

SEQ ID NO: 41966 - RNA, 1701 nt, Artificial Sequence
  derived and/or modified CDS sequence (wt) from hemagglutinin__InfluenzaA__AGJ73369
augaaggcaauacuaguaguucugcuauauacauuugcaaccgcaaaugcagacacauuauguauagguuaucaugcgaacaauucaacagacacuguagacacaguacuagaaaagaauguaacaguaacacacucuguuaaucuucuagaagacaagcauaacgggaaacuaugcaaacuaagagggguagccccauugcauuuggguaaauguaacauugcuggcuggauccugggaaauccagagugugaaucacucuccacagcaagcucaugguccuacauuguggaaacaucuaguucagacaauggaacguguuacccaggagauuucaucgauuaugaggagcuaagagagcaauugagcucagugucaucauuugaaagguuugagauauuccccaagacaaguucauggcccaaucaugacucgaacaaagguguaacggcagcauguccucaugcuggagcaaaaggcuucuacaaaaauuuaauauggcuaguuaaaaaaggaaauucauacccaaagcucagcaaauccuacauuaaugauaaagggaaagaaguccucgugcuauggggcauucaccauccaucuacuacugcugaccaacaaagucuuuaucagaaugcagauacauauguuuuuguggggacaucaagauacagcaagaaguucaagccggaaauagcaauaagacccaaagugagggaucaagaagggagaaugaacuauuacuggacacuaguagagccgggagacaaaauaacauucgaagcaacuggaaaucuagugguaccgagauaugcauucgcaauggaaagaaaugcuggaucugguauuaucauuucagauacaccaguccacgauugcaauacaacuugucagacacccaagggugcuauaaacaccagccucccauuucagaauauacauccgaucacaauugggaaauguccaaaauauguaaaaagcacaaaauugagacuggccacaggauugaggaaugucccgucuauucaaucuagaggccuauuuggggccauugccggcuucauugaagggggguggacagggaugguagauggaugguacgguuaucaccaucaaaaugagcaggggucaggauaugcagccgaccugaagagcacacagaaugccauugacaagauuacuaacaaaguaaauucuguuauugaaaagaugaauacacaguucacagcaguagguaaagaguucaaccaccuggaaaaaagaauagagaauuuaaauaaaaaaguugaugaugguuuccuggacauuuggacuuacaaugccgaacuguugguucuauuggaaaaugaaagaacuuuggacuaccacgauucaaaugugaagaacuuauaugaaaagguaagaaaccaguuaaaaaacaaugccaaggaaauuggaaauggcugcuuugaauuuuaccacaaaugcgauaacacgugcauggaaagugucaaaaaugggacuuaugacuacccaaaauacucagcggaagcaaaauuaaacagagaagaaauagaugggguaaagcuggaaucaacaaggauuuaccagauuuuggcgaucuauucaacugucgccaguucauugguacugguagucucccugggggcaaucaguuucuggaugugcucuaaugggucucuacaguguagaauauguauuuaa

SEQ ID NO: 41967 - RNA, 1701 nt, Artificial Sequence; identical to SEQ ID NO: 41952
  derived and/or modified CDS sequence (wt) from hemagglutinin__InfluenzaA__AGJ73371

SEQ ID NO: 41968 - RNA, 1701 nt, Artificial Sequence
  derived and/or modified CDS sequence (wt) from hemagglutinin__InfluenzaA__AGJ73373
augaaggcaauacuaguaguucugcuauauacauuugcaaccgcaaaugcagacacauuauguauagguuaucaugcgaacaauucaacagacacuguagacacaguacuagaaaagaauguaacaguaacacacucuguuaaucuucuagaagacaagcauaacgggaaacuaugcaaacuaagagggguagccccauugcauuuggguaaauguaacauugcuggcuggauccugggaaauccagagugugaaucacucuccacagcaagcucaugguccuacauuguggaaacaucuaguucagacaauggaacguguuacccaggagauuucaucgauuaugaggagcuaagagagcaauugagcucagugucaucauuugaaagguuugagauauuccccaagacaaguucauggcccaaucaugacucgaacaaagguguaacggcagcauguccucaugcuggagcaaaaggcuucuacaaaaauuuaauauggcuaguuaaaaaaggaaauucauacccaaagcucagcaaauccuacauuaaugauaaagggaaagaaguccucgugcuauggggcauucaccauccaucuacuacugcugaccaacaaagucucuaucagaaugcagauacauauguuuuuguggggacaucaagauacagcaagaaguucaagccggaaauagcaauaagacccaaagugagggaucaagaagggagaaugaacuauuacuggacacuaguagagccgggagacaaaauaacauucgaagcaacuggaaaucuagugguaccgagauaugcauucgcaauggaaagaaaugcuggaucugguauuaucauuucagauacaccaguccacgauugcaauacaacuugucagacacccaagggugcuauaaacaccagccacccauuucagaauauacauccgaucacaauuggaaaauguccaaaauauguaaaaagcacaaaauugagacuggccacaggauugaggaaugucccgucuauucaaucuagaggccuauuuggggccauugccggcuucauugaagggggguggacagggaugguagauggaugguacgguuaucaccaucaaaaugagcaggggucaggauaugcagccgaccugaagagcacacagaaugccauugacaagauuacuaacaaaguaaauucuguuauugaaaagaugaauacacaguucacagcaguagguaaagaguucaaccaccuggaaaaaagaauagagaauuuaaauaaaaaaguugaugaugguuuccuggacauuuggacuuacaaugccgaacuguugguucuauuggaaaaugaaagaacuuuggacuaccacgauucaaaugugaagaacuuauaugaaaagguaagaaaccaguuaaaaaacaaugccaaggaaauuggaaauggcugcuuugaauuuuaccacaaaugcgacaacacgugcauggaaagugucaaaaaugggacuuaugacuacccaaaauacucagaggaagcaaaauuaaacagagaagaaauagaugggguaaagcuggaaucaacaaggauuuaccagauuuuggcgaucuauucaacugucgccaguucauugguacugguagucucccugggggcaaucaguuucuggaugugcucuaaugggucucuacaguguagaauauguauuuaa

SEQ ID NO: 41969 - RNA, 1701 nt, Artificial Sequence
  derived and/or modified CDS sequence (wt) from hemagglutinin__InfluenzaA__AGJ73375
augaaggcaauacuaguaguucugcuauauacauuugcaaccgcaaaugcagacacauuauguauagguuaucaugcgaacaauucaacagacacuguagacacaguacuagaaaagaauguaacaguaacacacucuguuaaccuucuagaagacaagcauaacgggaaacuaugcaaacuaagagggguagccccauugcauuuggguaaauguaacauugcuggcuggauccugggaaauccagagugugaaucacucuccacagcaaguucaugguccuacauuguggaaacaucuaguucagacaauggaacguguuacccaggagauuucaucaauuaugaggagcuaagagagcaauugagcucagugucaucauuugaaagguuugagauauuccccgagacaaguucauggcccaaucaugacucgaacaaagguguaacggcagcauguccucaugcuggagcaaaaagcuucuacaaaaauuuaauauggcuaguuaaaaaaggaaauucauacccaaagcucagcaaauccuacauuaaugauaaagggaaagaaguccucgugcuguggggcauucaccauccaucuacuacugcugaccaacaaagucucuaucagaaugcagaugcauauguuuuuguggggacaucaagauacagcaagaaguucaagccggaaauagcaauaagacccaaagugagggaucaagaagggagaaugaacuauuacuggacacuaauagagccgggagacaaaauaacauucgaagcaacuggaaaucuagugguaccgagauaugcauucgcaauggaaagaaaugcuggaucugguauuaucauuucagauacaccaguccacgauugcaauacaacuugucagacacccgagggugcuauaaacaccagccucccauuucagaauauacauccgaucacaauuggaaaauguccaaaguauguaaaaagcacaaaauugagacuggccacaggauugaggaaugucccgucuauucaaucuagaggccuauucggggccauugccggcuucauugaagggggguggacagggaugguagauggaugguacgguuaucaccaucaaaaugagcaggggucaggauaugcagccgaccugaagagcacacaaaaugccauugacaagauuacuaacaaaguaaauucuguuauugaaaagaugaauacacaguucacagcaguggguaaagaguucaaccaccuggaaaaaagaauagagaauuuaaauaaaaaaguugaugaugguuuccuggacauuuggacuuacaaugccgaacuguugguucuauuggaaaaugaaagaacuuuggacuaccacgauucaaaugugaagaacuuauaugaaaagguaagaaaccaguuaaaaaacaaugccaaggaaauuggaaacggcugcuuugaauuuuaccacaaaugcgauaacacgugcauggaaagugucaaaaaugggacuuaugacuacccaaaauacucagaggaagcaaaauuaaacagagaagaaauagaugggguaaagcuggaaucaacaaggauuuaccagauuuuggcgaucuauucaacugucgccaguucauugguacugguagucucccugggggcaaucaguuucuggaugugcucuaaugggucucuacaguguagaauauguauuuaa

SEQ ID NO: 41970 - RNA, 1701 nt, Artificial Sequence
  derived and/or modified CDS sequence (wt) from hemagglutinin__InfluenzaA__AGJ73377
augaaggcaauacuaguaguucugcuauauacauuugcaaccgcaaaugcagacacauuauguauagguuaucaugcgaacaauucaacagacacuguagacacaguacuagaaaagaauguaacaguaacucacucuguuaaccuucuagaagacaagcauaacgggaaacuaugcaaacuaagagggguagccccauugcauuuggguaaauguaacauugcgggcuggauccugggaaauccagagugugaaucacucuccacagcaagcucaugguccuacauuguggaaacaucuaguucagacaauggaacguguuacccaggagauuucaucaauuaugaggagcuaagagagcaauugagcucagugucaucauuugaaagguuugaaauauuccccaagacaaguucauggcccaaucaugacucgaacaaagguguaacggcaucauguccucgugcuggagcaaaaagcuucuacaaaaauuuaauauggcuaguuaaaaaaggaaauucauacccaaagcucagcaaauccuacauuaaugauaaagggaaagaaguccucgugcuguggggcauucaccauccaucuacuacugcugaccaacaaagucucuaucagaaugcagaugcauauguuuuuguggggacgucaagauacagcaagaaguucaagccggaaauagcaauaagacccaaagugagggaucaagaagggagaaugaacuauuacuggacacuaguagagccgggagacaaaauaacauucgaagcaacuggaaaucuauugguaccgagauaugcauucgcaauggaaagaaaugcuggaucugguauuaucauuucagauacaccaguccacgauugcaauacaacuugucagacacccaagggugcuauaaacaccagccucccauuucagaauauacauccgaucacaauuggaaaauguccaaaauauguaaaaagcacaaaauugagacuggccacaggauugaggaaugucccguccauucaaucuagaggccuauuuggagccauugccggcuucauugaagggggauggacaggaaugguagauggaugguacgguuaucaccaucaaaaugagcaggggucaggauaugcagccgaccugaagagcacacagaaugccauugacaagauuacuaacaaaguaaauucuguuauugaaaagaugaauacacaguucacagcaguagguaaagaguucaaccaccuggaaaaaagaauagagaauuuaaauaaaaaaguugaugaugguuuccuggacauuuggacuuacaaugccgaacuguugguucuauuggaaaaugaaagaacuuuggacuaccacgauucaaaugugaagaacuuguaugaaaagguaagaaaccaguuaaaaaacaaugccaaggaaauuggaaacggcugcuuugaauuuaaccacaaaugcgauaacacgugcauggaaagugucaaaaaugggacuuaugacuacccaaaauacucagaagaagcaaaauuaaacaaagaagaaauagaugggguaaagcuggaaucaacaaggauuuaccagauuuuggcgaucuauucaacugucgccaguucauugguacugguagucucccugggggcaaucaguuucuggaugugcucuaaugggucucuacaguguagaauauguauuuaa

SEQ ID NO: 41971 - RNA, 1701 nt, Artificial Sequence
  derived and/or modified CDS sequence (wt) from hemagglutinin__InfluenzaA__AGJ73380
augaaggcaauacuaguaguucugcuauauacauuugcaaccgcaaaugcagacacauuauguauagguuaucaugcgaacaauucaacagacacuguagacacaguacuagaaaagaauguaacaguaacacacucuguuaaccuucuagaagacaaacauaacgggaaacuaugcaaacuaagagggguagccccauugcauuuggguaaauguaacauugcuggcuggauccugggaaauccagagugugaaucacucuccacagcaaguucaugguccuacauuguggaaacaucuaguucagacaauggaacguguuacccaggagauuucaucaauuaugaggagcuaagagagcaauugagcucagugucaucauuugaaagguuugagauauuccccaagacaaguucauggcccaaucaugacucgaacaaagguguaacggcagcauguccucaugcuggagcaaaaagcuucuacaaaaauuuaauauggcuaguuaaaaaaggaaauucauacccaaagcucagcaaauccuacauuaaugauaaagggaaagaaguccucgugcuguggggcauucaccauccaucuacuacugcugaccaacaaagucucuaucagaaugcagaugcauauguuuuuguggggacaucaagauacagcaagaaguucaagccggaaauagcaauaagacccaaagugaggggucaagaagggagaaugaacuauuacuggacacuaauagagccaggagacaaaauaacauucgaagcaacuggaaaucuagugguaccgagauaugcauucgcaauggaaagaaaugcuggaucugguauuaucauuucagauacaccaguccacgauugcaauucaacuugucagacacccaagggugcuauaaacaccagccucccauuucagaauauacauccgaucacaauuggaaaauguccaaaguauguaaaaagcacaaaauugagacuggccacaggauuaaggaaugucccgucuauucaaucuagaggccuauucggggccauugccggcuucauugaagggggguggacagggaugguagauggaugguacgguuaucaccaucaaaaugagcaggggucaggauaugcagccgaccugaagagcacacaaaaugccauugacaagauuacuaacaaaguaaauucuguuauugaaaagaugaauacacaguucacagcaguggguaaagaguucaaccaccuggaaaaaagaauagagaauuuaaauaaaaaaguugaugaugguuuccuggacauauggacuuacaaugccgaacuguuuguucuauuggaaaaugaaagaacuuuggacuaccacgauucaaaugugaaggacuuguaugaaaagguaagaaaccaguuaaaaaacaaugccaaggaaauuggaaacggcugcuuugaauuuuaccacaaaugcgauaacacgugcauggaaagugucaaaaaugggacuuaugacuacccaaaauacucagaggaagcaaaauuaaacagagaaaaaauagaugggguaaagcuggaaucaacaaggauuuaccagauuuuggcgaucuauucaacugucgccaguucauugguacugguagucucccugggggcaaucaguuucuggaugugcucuaaugggucucuacaguguagaauauguauuuaa

SEQ ID NO: 41972 - RNA, 1701 nt, Artificial Sequence
  derived and/or modified CDS sequence (wt) from hemagglutinin__InfluenzaA__AGK62991
augaagacuaucauugcuuugagcuacauucuaugucugguuuucgcucaaaaacuuccuggaaaugacaacagcacggcaacgcugugccuugggcaccaugcaguaccaaacggaacgauagugaaaacaaucacgaaugaccaaauugaaguuacuaaugcuacugagcugguucagaguuccucaacaggugaaauaugcgacaguccucaucagauccuugauggggaaaacugcacacuaauagaugcucuauugggagacccucagugugauggcuuccaaaacaagaaaugggaccuuuuuguugaacgaagcaaagccuacagcaacuguuacccuuaugaugugccggauuaugccucccuuaggucacuaguugccucguccggcacacuggaguuuaacaaugaaagcuucaauuggacuggagucacucaaaacggaacaagcucugcuugcauaaggagaucuaauaguaguuucuuuaguagauugaauugguugacccacuuaaacuucaaauacccagcauugaacgugacuaugccaaacaaugaacaauuugacaaauuguacauuugggggguucaccacccggguacggacaaggaccaaaucuuccuguaugcucaagcaucaggaagaaucacaguaucuaccaaaagaagccaacaagcuguaaucccgaauaucggaucuagacccagaauaaggaauaucccuagcagaauaagcaucuauuggacaauaguaaaaccgggagacauacuuuugauuaacagcacagggaaucuaauugcuccuagggguuacuucaaaauacgaagugggaaaagcucaauaaugagaucagaugcacccauuggcaaaugcaauucugaaugcaucacuccaaauggaagcauucccaaugacaaaccauuccaaaauguaaacaggaucacauacggggccugucccagauauguuaagcaaagcacucugaaauuggcaacagggaugcgaaauguaccagagaaacaaacuagaggcauauuuggcgcaauagcggguuucauagaaaaugguugggagggaaugguggaugguugguacgguuucaggcaucaaaauucugagggaagaggacaagcagcagaucucaaaagcacucaagcagcaaucgaucaaaucaaugggaagcugaaucgauugaucgggaaaaccaacgagaaauuccaucagauugaaaaagaauucucagaagucgaagggagaauucaggaccuugagaaauauguugaggacacuaaaauagaucucuggucauacaacgcggagcuucuuguugcccuggagaaccaacauacaauugaucuaacugacucagaaaugaacaaacuguuugaaaaaacaaagaagcaacugagggaaaaugcugaggauaugggcaaugguuguuucaaaauauaccacaaaugugacaaugccugcauaggaucaaucagaaauggaacuuauaaccacgauguauacagagaugaagcauuaaacaaccgguuccagaucaagggaguugagcugaagucaggguacaaagauuggauccuauggauuuccuuugccauaucauguuuuuugcuuuguguugcuuuguugggguucaucaugugggccugccaaaagggcaacauuaggugcaacauuugcauuuga

SEQ ID NO: 41973 - RNA, 1701 nt, Artificial Sequence
  derived and/or modified CDS sequence (wt) from hemagglutinin__InfluenzaA__AGK62993
augaagacuaucauugcuuugagcuacauucuaugucugguuuucgcucaaaaacuuccuggaaaugacaacagcacggcaacgcugugccuugggcaccaugcagugccaaacggaacgauagugaaaacaaucacgaaugaccaaauugaaguuacuaaugcuacugagcugguucagaguuccucaacaggugaaauaugcaacaguccucaucagauccuugauggggaaaacugcacacuaauagaugcucuauugggagacccucagugugauggcuuccaaaacaagaaaugggaccuuuuuguugaacgaagcaaagcccacagcaacuguuacccuuaugaugugccggauuaugccucccuuaggucacuaguugccucauccggcacacuggaguuuaacaaugaaagcuucaauuggacuggagucacucaaaacggaacaagcucugcuugcauaaggagaucuaauaauaguuucuuuaguagauugaauugguugacccacuuaaacuucaaauacccagcauugaacgugacuaugccaaacaaugaacaauuugacaaauuguacauuugggggguucaccacccggguacggacaaggaccaaaucuuccuguaugcucaagcaucaggaagaaucacaguaucuaccaaaagaagccaacaagcuguaauuccgaauaucggaucuagacccagaguaaggaauaucccuagcagaguaagcaucuauuggacaauaguaaaaccgggagacauacuuuugauuaacagcacagggaaucuaauugcuccuagggguuacuucaaaauacgaagugggaaaagcucaauaaugagaucagaugcacccauuagcaaaugcaauucugcaugcaucacuacaaauggaagcauuccuaaugacaaaccauuccaaaauguuaacaggaucacauacggggccugucccagauauguuaagcaaaacacucugaaauuggcaacaggaaugagaaauguaccagagaaacaaacuagaggcauauuuggcgcaaucgcggguuucauagaaaaugguugggagggaaugguggaugguugguacgguuucaggcaucaaaauucugagggaaggggacaagcagcagaucucaaaagcacucaagcagcaaucgaucaaaucaaugggaagcugaauagauugaucgggaaaaccaacgagaaauuccaucagauugaaaaagaauucucagaagucgaagggagaauucaggaccuugagaaauauguugaggacacuaaaauagaucucuggucauacaacgcggagcuucuuguugcccuggagaaccaacacacaauugaucuaacugacucagaaaugaacaaacuguuugaaaaaacaaagaagcaacugagggaaaaugcugaggauaugggcaaugguuguuucaaaauauaccacaaaugugacaaugccugcauaggaucaaucagaaauggaacuuaugaccacgauguguacagagaugaagcauuaaacaaccgauuccagaucaagggaguugagcugaagucaggguacaaagauuggauccuauggauuuccuuugccauaucauguuuuuugcuuuguguugcuuuguugggguucaucaugugguccugccaaaaaggcaacauuaggugcaacauuugcauuuga

SEQ ID NO: 41974 - RNA, 1701 nt, Artificial Sequence
  derived and/or modified CDS sequence (wt) from hemagglutinin__InfluenzaA__AGK62995
augaagacuaucauugcuuugagcuacauucuaugucugguuuucgcucaaaaacuuccuggaaaugacaacagcacggcaacgcugugccuugggcaccaugcaggaccaaacggaacgauagugaaaacaaucacgaaugaccaaauugaaguuacuaaugcuacugagcugguucagaguuccucaacaggugaaauaugcgacaguccucaucagauccuugauggagaaaacugcacacuaauagaugcucuauugggagacccucagugugauggcuuccaaaauaagaaaugggaccuuuuuguugaacgaagcaaagccuacagcaacuguuacccuuaugaugugccggauuaugccucccuuaggucacuaguugccucauccggcacacuggaguuuaacaaugaaagcuucaauuggacuggagucacucaaaacggaacaagcucugcuugcauaaggagaucuaauaauaguuucuuuaguagauugaauugguugacccacuuaaacuucaaauacccagcauugaacgugacuaugccaaacaaugaacaauuugacaaauuguacauuugggggguucaccacccggguacggacaaggaccaaaucuuccuguaugcucaaucaucaggaagaaucacaguaucuaccaaaagaagccaacaagcuguaaucccgaauaucggaucuagacccagaauaaggaauaucccuagcagaauaagcaucuauuggacaauaguaaaaccgggagacauacuuuugauuaacagcacagggaaucuaauugcuccuagggguuacuucaaaauacgaagugggaaaagcucaauaaugagaucagaugcacccauuggcaaaugcaauucugaaugcaucacuccaaauggaagcauucccaaugacaaaccauuccaaaauguaaacaggaucacauacggggccugucccagauauguuaagcaaagcacucugaaauuggcaacaggaaugcgaaauguaccagagaaacaaacuagaggcauauuuggcgcaauagcggguuucauagaaaaugguugggagggaaugguggaugguugguacgguuucaggcaucaaaauucugagggaagaggacaagcagcagaucucaaaagcacucaagcagcaaucgaucaaaucaaugggaagcugaaucgauugaucggaaaaaccaacgagaaauuccaucagauugaaaaagaauucucagaagucgaagggagaauucaggaccuugagaaauauguugaggacacuaaaauagaucucuggucauacaacgcggagcuucuuguugcccuggagaaccaacauacaauugaucuaacugacucagaaaugaacaaacuguuugaaaaaacaaagaagcaacugagggaaaaugcugaggauaugggcaaugguuguuucaaaauauaccacaaaugugacaaugccugcauaggaucaaucagaaauggaacuuauaaccacgauguauacagagaugaagcauuaaacaaccgguuccagaucaagggaguugagcugaagucaggguacaaagauuggauccuauggauuuccuuugccauaucauguuuuuugcuuuguguugcuuuguugggguucaucaugugggccugccaaaagggcaacauuaggugcaacauuugcauuuga

SEQ ID NO: 41975 - RNA, 1701 nt, Artificial Sequence
  derived and/or modified CDS sequence (wt) from hemagglutinin__InfluenzaA__AGK62997
augaagacuaucauugcuuugagcuacauucuaugucugguuuucgcucaaaaacuuccuggaaaugacaacagcacggcaacgcugugccuugggcaccaugcagugccaaacggaacgauagugaaaacaaucacgaaugaccaaauugaaguuacuaaugcuacugagcugguucagaguuccucaacaggugaaauaugcaacaguccucaucagauccuugauggagaaaacugcacacuaauagaugcucuauugggagacccucagugugauggcuuccaaaacaagaaaugggaccuuuuuguugaacgaagcaaagcccacagcaacuguuacccuuaugaugugccggauuaugccucccuuaggucacuaguugccucauccggcacacuggaguuuaacaaugaaagcuucaauuggacuggagucacucaaaacggaacaagcucugcuugcauaaggagaucuaauaauaguuucuuuaguagauugaauugguugacccacuuaaacuucaaauacccagcauugaacgugacuaugccaaacaaugacaaauuugacaaauuguacauuugggggguucaccacccggguacggacaaggaccaaaucuuccuguaugcucaagcaucaggaagaaucacaguaucuaccaaaagaagccaacaagcuguaauuccgaauaucggaucuagacccagaguaaggaauaucccuagcagaguaagcaucuauuggacaauaguaaaaccgggagacauacuuuugauuaacagcacagggaaucuaauugcuccuagggguuacuucaaaauacgaagugggaaaagcucaauaaugagaucagaugcacccauuggcaaaugcaauucugcaugcaucacuccaaauggaagcauucccaaugacaaaccauuccaaaauguaaacaggaucacaugcggggccugugccagauauguuaagcaaaacacucugaaauuggcgacaggaaugagaaauguaccagagaaacaaacuagaggcauauuuggcgcaauagcgguuuucauagaaaaugguugggagggaaugguggaugguugguacgguuucaggcaucaaaauucugagggaagagaacaagcagcagcuuuucaaagcacucaagcagcaaucgaccaaaucauugggaagcugaauagauugaucggggaaaccaacgagaaauuccaucagauugaaaaagaauucucagaagucgaaaggagaauucaggcccuugagaaauauguugaggacacuaaaauagaucucuggucauacaacgcggagcuucuuguugcccuggagaaccaacacacaauugaucuaacugacucagaaaugaacaaacuguuugaaaaaacaaagaagcaacugagggaaaaugcugaggauaugggcaaugguuguuucaaaauauaccacaaaugugacaaugccugcauaggaucaaucagaaauggaacuuaugaccacgauguguacagagaugaagcauuaaacaaccgauuccagaucaagggaguugagcugaagucaggguacaaagauuggauccuauggauuuccuuugccauaucauguuuuuugcuuuguguugcuuuguugggguucaucaugugguccugccaaaaaggcaacauuaggugcaacauuugcauuuga

SEQ ID NO: 41976 - RNA, 1701 nt, Artificial Sequence
  derived and/or modified CDS sequence (wt) from hemagglutinin__InfluenzaA__AGK62999
augaagacuaucauugcuuugagcuacauucuaugucugguuuucgcucaaaaacuuccuggaaaugacaacagcacggcaacgcugugccuugggcaccaugcaguaccaaacggaacgauagugaaaacaaucacgaaugaccaaauugaaguuacuaaugcuacugagcugguucagaguuccucaacaggugaaauaugcaacaguccucaucagauccuugauggagaaaacugcacacuaauagaugcucuauugggagacccucagugugauggcuuccaaaacaagaaaugggaccuuuuuguugaacgaagcaaagccuacagcaacuguuacccuuaugaugugccggauuaugccucccuuaggucacuaguugccucauccggcacacuggaguuuaacaaugaaagcuucaauuggacuggagucacucaaaacggaacaagcucugcuugcauaaggagaucuaauaauaguuucuuuaguagauugaauugguugacccacuuaaacuucaaauacccagcauugaacgugacuaugccaaacaaugaacaauuugacaaauuguacauuugggggguucaccacccggguacggacaaggaccaaaucuuccuguaugcucaagcaucaggaagaaucacaguaucuaccaaaagaagccaacaagcuguaauuccgaauaucggaucuagacccagaguaaggaauaucccuagcagaguaagcaucuauuggacaauaguaaaaccgggagacauacuuuugauuaacagcacagggaaucuaauugcuccuagggguuacuucaaaauacgaagugggaaaagcucaauaaugagaucagaugcacccauuggcaaaugcaauucugcaugcaucacuccaaauggaagcauucccaaugacaaaccauuccaaaauguaaacaggaucacauacggggccugucccagauauguuaagcaaaacacucugaaauuggcaacaggaaugagaaauguaccagagaaacaaacuagaggcauauuuggcgcaauagcggguuucauagaaaaugguugggaaggaaugguggaugguugguacgguuucaggcaucaaaauucugagggaaggggacaagcagcagaucucaaaagcacucaagcagcaaucgaucaaaucaaugggaagcugaauagauugaucgggaaaaccaacgagaaauuccaucagauugaaaaagaauucucagaagucgaagggagaauucaggaccuugagaaauauguugaggacacuaaaauagaucucuggucauacaacgcggagcuucuuguugcccuggagaaccaacacacaauugaucuaacugacucagaaaugaacaaacuguuugaaaaaacaaagaagcaacugagggaaaaugcugaggauaugggcaaugguuguuucaaaauauaccacaaaugugacaaugccugcauaggaucaaucagaaauggaacuuaugaccacgauguguacagagaugaagcauuaaacaaccgauuccagaucaagggaguugagcugaagucaggguacaaagauuggauccuauggauuuccuuugccauaucauguuuuuugcuuuguguugcuuuguugggguucaucaugugggccugccaaaaaggcaacauuaggugcaacauuugcauuuga

SEQ ID NO: 41977 - RNA, 1701 nt, Artificial Sequence
  derived and/or modified CDS sequence (wt) from hemagglutinin__InfluenzaA__AGK63001
augaagacuaucauugcuuugagcuacauucuaugucugguuuucgcucaaaaacuuccuggaaaugacaacagcacggcaacgcugugccuugugcaccaugcaguaccaaacggaacgauagugaaaacaaucacgaaugaccaaauugaaguuacuaaugcuacugagcugguucagaguuccucaacaggugaaauaugcgacaguccucaucagauccuugauggagaaaacugcacacuaauagaugcucuauugggagacccucagugugauggcuuccaaaauaaggaaugggaccuuuuuguugaacgaagcaaagccuacagcaacuguuacccuuaugaugugccggauuaugccucccuuaggucacuaguugccucauccggcacacuggaguuuaacaaugaaagcuucaauuggacuggagucacucaaaacggaacaagcucugcuugcauaaggagaucuaauaguaguuucuuuaguagauugaauggguugacccacuuaaauuucaaauacccagcauugaacgugacuaugccaaacaaugaacaauuugacaaauuguacauuugggggguucaccacccggguacggacaaggaccaaaucuuccuguaugcucaaucaucaggaagaaucacaguaucuaccaaaagaagccaacaagcuguaaucccgaauaucggaucuagacccagaauaaggaauaucccuagcagaauaagcaucuauuggacaauaguaaaaccgggagacauacuuuugauuaacagcacagggaaucuaauugcuccuagggguuacuucaaaauacgaagugggaaaagcucaauaaugagaucagaugcacccauuggcaaaugcaauucugaaugcaucacuccaaauggaagcauucccaaugacaaaccauuccaaaauguaaacaggaucacauacggggccugucccagauauguuaagcaaagcacucugaaauuggcaacaggaaugcggaauguaccagagaaacaaacuagaggcauauuuggcgcaauagcagguuucauagaaaaugguugggagggaaugguggaugguugguacgguuucaggcaucaaaauucugagggaagggagcaagcagcagauuuucaaagcacucaagcagcaaucgaucaaaucauugggaagcugaaucgauugaucgggaaaaccaacgagaaauuccaucagauugaaaaagaauucucagaagucgaaaggagaauucaggaccuugagaaauauguugaggacacuaaaauagaucucuggucauacaacgcggagcuucuuguugcccuggagaaccaacauacaauugaucuaacugacucagaaaugaacaaacuguuugaaaaaacaaagaagcaacugagggaaaaugcugaggauaugggcaaugguuguuucaaaauauaccacaaaugugacaaugccugcauaggaucaaucagaaauggaacuuauaaccacgauguauacagagaugaagcauuaaacaaccgguuccagaucaagggaguugagcugaagucaggguacaaagauuggauccuauggauuuccuuugccauaucauguuuuuugcuuuguguugcuuuguugggguucaucaugugguccugccaaaagggcaacauuaggugcaacauuugcauuuga

SEQ ID NO: 41978 - RNA, 1701 nt, Artificial Sequence
  derived and/or modified CDS sequence (wt) from hemagglutinin__InfluenzaA__AGK63003
augaagacuaucauugcuuugagcuacauucuaugucugguuuucgcucaaaaacuuccuggaaaugacaacagcacggcaacgcugugccuugggcaccaugcaggaccaaacggaacgauagugaaaacaaucacgaaugaccaaauugaaguuacuaaugcuacugagcugguucagaguuccucaacaggugaaauaugcgacaguccucaucagauccuugauggagaaaacugcacacuaauagaugcucuauugggagacccucagugugauggcuuccaaaauaagaaaugggaccuuuuuauugaacgcagcaaagccuacagcaacuguuacccuuaugaugugccggauuaugccucccuuaggucacuaguugccucauccggcacacuggaguuuaacaaugaaagcuucaauuggacuggagucacucaaaacggaacaagcucugcuugcauaaggagaucuaauaguaguuucuuuaguagauugaauugguugacccacuuaaacuucaaauacccagcauugaacgugacuaugccaaacaaugaacaauuugacaaauuguacauuugggggguucaccacccggguacggacaaggaccaaaucuuccuguaugcucaaucaucaggaagaaucacaguaucuaccaaaagaagccaacaagcuguaaucccgaauaucggaucuagacccagaauaaggaauaucccuagcagaauaagcaucuauuggacaauaguaaaaccgggagacauacuuuugauuaacagcacagggaaucuaauugcuccuagggguuacuucaaaauacgaagugggaaaagcucaauaaugagaucagaugcacccauuggcaaaugcaauucugcaugcaucacuccaaauggaagcauucccaaugacaaaccauuccaaaauguaaacaggaucacauacggggccugucccagauauguuaagcaaagcacucugaaauuggcaacaggaaugcgaaauguaccagagaaacaaacuagaggcauauuuggcgcaauagcggguuucauagaaaaugguugggagggaaugguggaugguugguacgguuucaggcaucaaaauucugagggaagaggacaagcagcagaucucaaaagcacucaagcagcaaucgaucaaaucaaugggaagcugaaucgauugaucgggaaaaccaacgagaaauuccaucagauugaaaaagaauucucagaagucgaagggagaauucaggaccuugagaaauauguugaggacacuaaaauagaucucuggucauacaacgcggagcuucuuguugcccuggagaaccaacauacaauugaucuaacugacucagaaaugaacaaacuguuugaaaaaacaaagaagcaacugagggaaaaugcugaggauaugggcaaugguuguuucaaaauauaccacaaaugugacaaugccugcauaggaucaaucagaaauggaacuuauaaccacgauguauacagagaugaagcauuaaacaaccgguuccagaucaagggaguugagcugaagucaggguacaaagauuggauccuauggauuuccuuugccauaucauguuuuuugcuuuguguugcuuuguugggguucaucaugugggccugccaaaagggcaacauuaggugcaacauuugcauuuga

SEQ ID NO: 41979 - RNA, 1701 nt, Artificial Sequence
  derived and/or modified CDS sequence (wt) from hemagglutinin__InfluenzaA__AGK63005
augaagacuaucauugcuuugagcuacauucuaugucugguuuucgcucaaaaacuuccuggaaaugacaacagcacggcaacgcugugccuugugcaccaugcaguaccaaacggaacgauagugaaaacaaucacgaaugaccaaauugaaguuacuaaugcuacugagcugguucagaguuccucaacaggugaaauaugcgacaguccucaucagauccuugauggagaaaacugcacacugauagaugcucuauugggagacccucagugugauggcuuccaaaauaagaaaugggaccuuuuuguugaacgaagcaaagccuacagcaacuguuacccuuaugaugugccggauuaugccucccuuaggucacuaguugccucauccggcacacuggaguuuaacaaugaaagcuucaauuggacuggagucacucaaaacggaacaagcucugcuugcauuaggagaucuaauaguaguuucuuuaguagauugaauggguugacccacuuaaacuucaaauacccagcauuggacgugacuaugccaaacaaugacaaauuugacaaauuguacauuugggggguucaccacccggguacggacaaggaccaaaucuuccuguaugcucaaucaucaggaagaaucacaguaucuaccaaaagaagccaacaagcuguaaucccgaauaucggaucuagacccagaauaaggaauaucccuagcagaauaagcaucuauuggacaauaguaaaaccgggagacauacuuuugauuaacagcacagggaaucuaauugcuccuagggguuacuucaaaauacgaagugggaaaagcucaauaaugagaucagaugcacccauuggcaaaugcaauucugaaugcaucacuccaaauggaagcauucccaaugacaaaccauuccaaaauguaaacaggaucacauacggggccugucccagauauguuaagcaaagcacucugaaauuggcaacaggaaugcgaaauguaccagagaaacaaacuagaggcauauuuggcgcaauagcgguuuucauagaaaaugguugggagggaaugguggaugguugguacgguuucaggcaucaaaauucugagggaagagagcaagcagcggauuuucaaagcacucaagcagcaaucgaucaaaucaaugggaagcugaaucgauugaucgggaaaaccaacgagaaauuccaucagauugaaaaagaauucucagaagucgaagggagaauucaggaccuugagaaauauguugaggacacuaaaauagaucucuggucauacaacgcggagcuucuuguugcccuggagaaccaacauacaauugaucuaacugacucagaaaugaacaaacuguuugaaaaaacaaagaagcaacugagggaaaaugcugaggauaugggcaaugguuguuucaaaauauaccacaaaugugacaaugccugcauaggaucaaucagaaauggaacuuauaaccacgauguauacagagaugaagcauuaaacaaccgguuccagaucaaaggaguugagcugaagucaggguacaaagauuggauccuauggauuuccuuugccauaucauguuuuuugcuuuguguugcuuuguugggguucaucaugugggccugccaaaagggcaacauuaggugcaacauuugcauuuga

SEQ ID NO: 41980 - RNA, 1701 nt, Artificial Sequence
  derived and/or modified CDS sequence (wt) from hemagglutinin__InfluenzaA__AGK63007
augaagacuaucauugcuuugagcuacauucuaugucugguuuucgcucaaaaacuuccuggaaaugacaacagcacggcaacgcugugccuugggcaccaugcaguaccaaacggaacgauagugaaaacaaucacgaaugaccaaauugaaguuacuaaugcuacugagcugguucagaguuccucaacaggugaaauaugcgacaguccucaucagauccuugauggagaaaacugcacacuaauagaugcucuauugggagacccucagugugauggcuuccaaaacaagaaaugggaccuuuuuguugaacgaagcaaagcccacagcaacuguuacccuuaugaugugccggauuaugccucccuuaggucacuaguugccucauccggcacacuggaguuuaacaaugaaagcuucaauuggacuggagucacucaaaacggaacaagcucugcuugcauaaggagaucuaauaauaguuucuuuaguagauugaauugguugacccacuuaaacuucaaauacccagcauugaacgugacuaugccaaacaaugaacaauuugacaaauuguacauuugggggguucaccacccggguacggacaaggaccaaaucuuccuguaugcucaagcaucaggaagaaucacaguaucuaccaaaagaagccaacaagcuguaauuccgaauaucggaucuagacccagaguaaggaauaucccuagcagaguaagcaucuauuggacaauaguaaaaccgggagacauacuuuugauuaacagcacagggaaucuaauugcuccuagggguuacuucaaaauacgaagugggaaaagcucaauaaugagaucagaugcacccauuggcaaaugcaauucugaaugcaucacuccaaauggaagcauucccaaugacaaaccauuccaaaauguuaacaggaucacauacggggccugucccagauauguuaagcaaaacacucugaaauuggcaacaggaaugagaaauguaccagagaaacaaacuagaggcauauuuggcgcaauagcggguuucauagaaaaugguugggaaggaaugguggaugguugguacgguuucaggcaucaaaauucugagggaaggggacaagcagcagaucucaaaagcacucaagcagcaaucgaucaaaucaaugggaagcugaauagauugaucgggaaaaccaacgagaaauuccaucagauugaaaaagaauucucagaagucgaagggagaauucaggaccuugagaaauauguugaggacacuaaaauagaucucuggucauacaacgcggagcuucuuguugcccuggagaaccaacacacaauugaucuaacugacucagaaaugaacaaacuguuugaaaaaacaaagaagcaacugagggaaaaugcugaggauaugggcaaugguuguuucaaaauauaccacaaaugugacaaugccugcauaggaucaaucagaaauggaacuuaugaccacgauguguacagagaugaagcauuaaacaaccgauuccagaucaagggaguugagcugaagucaggguacaaagauuggauccuauggauuuccuuugccauaucauguuuuuugcuuuguguugcuuuguugggguucaucaugugggccugccaaaaaggcaacauuaggugcaacauuugcauuuga

SEQ ID NO: 41981 - RNA, 1701 nt, Artificial Sequence
  derived and/or modified CDS sequence (wt) from hemagglutinin__InfluenzaA__AGK63009
augaagacuaucauugcuuugagcuacauucuaugucugguuuucgcucaaaaacuuccuggaaaugacaacagcacggcaacgcugugccuugggcaccaugcagugccaaacggaacgauagugaaaacaaucacgaaugaccaaauugaaguuacuaaugcuacugagcugguucagaguuccucaacaggugaaauaugcaacaguccucaucagauccuugauggagaaaacugcacacuaauagaugcucuauugggagacccucagugugauggccuccaaaacaagaaaugggaccuuuuuguugaacgaagcaaagcccacagcaacuguuacccuuaugaugugccggauuaugccucccuuaggucacuaguugccucauccggcacacuggaguuuaacaaugaaagcuucaauuggacuggagucacucaaaacggaacaagcucugcuugcauaaggagaucuaauaauaguuucuuuaguagauugaauugguugacccacuuaaacuucaaauacccagcauugaacgugacuaugccaaacaaugaacaauuugacaaauuguacauuugggggguucaccacccggguacggacaaggaccaaaucuuccuguaugcucaagcaucaggaagaaucacaguaucuaccaaaagaagccaacaagcuguaauuccgaauaucggaucuagacccagaguaaggaauaucccuagcagaguaagcaucuauuggacaauaguaaaaccgggagacauacuuuugauuaacagcacagggaaucuaauugcuccuagggguuacuucaaaauacgaagugggaaaagcucaauaaugagaucagaugcacccauuggcaaaugcaauucugcaugcaucacuccaaauggaagcauucccaaugacaaaccauuccaaaauguaaacaggaucacauacggggccugucccagauauguuaagcaaaacacucugaaauuggcaacaggaaugagaaauguaccagagaaacaaacuagaggcauauuuggcgcaaucgcggguuucauagaaaaugguugggagggaaugguggaugguugguacgguuucaggcaucaaaauucugagggaaggggacaagcagcagaucucaaaagcacucaagcagcaaucgaucaaaucaaugggaagcugaauagauugaucgggaaaaccaacgagaaauuccaucagauugaaaaagaauucucagaagucgaagggagaauucaggaccuugagaaauauguugaggacacuaaaauagaucucuggucauacaacgcggagcuucuuguugcccuggagaaccaacacacaauugaucuaacugacucagaaaugaacaaacuguuugaaaaaacaaagaagcaacugagggaaaaugcugaggauaugggcaaugguuguuucaaaauauaccacaaaugugacaaugccugcauaggaucaaucagaaauggaacuuaugaccacgauguguacagagaugaagcauuaaacaaccgguuccagaucaagggaguugagcugaagucaggguacaaagauuggauccuauggauuuccuuugccauaucauguuuuuugcuuuguguugcuuuguugggguucaucaugugggccugccaaaaaggcaacauuaggugcaacauuugcauuuga

SEQ ID NO: 41982 - RNA, 1701 nt, Artificial Sequence
  derived and/or modified CDS sequence (wt) from hemagglutinin__InfluenzaA__AGK63011
augaagacuaucauugcuuugagcuacauucuaugucugguuuucgcucaaaaacuuccuggaaaugacaacagcacggcaacgcugugccuugggcaccaugcaguaccaaacggaacgauagugaaaacaaucacgaaugaccaaauugaaguuacuaaugcuacugagcugguucagaguuccucaacaggugaaauaugcgacaguccucaucagauccuugauggagaaaacugcacacuaauagaugcucuauugggagacccucagugugauggcuuccaaaauaagaaaugggaccuuuuuguugaacgaagcaaagccuacagcaacuguuacccuuaugaugugccggauuaugccucccuuaggucacuaguugccucauccggcacacuggaguuuaacaaugaaagcuucaauuggacuggagucacucaaaacggaacaagcucugcuugcauaaggagaucuaauaauaguuucuuuaguagauugaauugguugacccacuuaaacuucaaauacccagcauugaacgugacuaugccaaacaaugaacaauuugacaaauuguacauuugggggguucaccacccggguacggacaaggaccaaaucuuucuguaugcucaagcaucaggaagaaucacaguaucuaccaaaagaagccaacaagcuguaaucccgaauaucggaucuagacccagaguaaggaauaucccuagcagaauaagcaucuauuggacaauaguaaaaccgggagacauacuuuugauuaacagcacagggaaucuaauugcuccuagggguuacuucaaaauacgaagugggaaaagcucaauaaugagaucagaugcacccauuggcaaaugcaauucugaaugcaucacuccaaauggaagcauucccaaugacaaaccauuccaaaauguaaacaggaucacauacggggccugucccagauauguuaagcaaagcacucugaaauuggcaacaggaaugcgaaauguaccagagaaacaaacuagaggcauauuuggcgcaauagcggguuucauagaaaaugguugggagggaaugguggaugguugguacgguuucagacaucaaaauucugagggaagaggacaagcagcagaucucaaaagcacucaagcagcaaucgaucaaaucaaugggaagcugaaucgauugaucgggaaaaccaacgagaaauuccaucagauugaaaaagaauucucagaagucgaagggagaauucaggaccuugagaaauauguugaggacacuaaaauagaucucuggucauacaacgcggagcuucuuguugcccuggagaaccaacauacaauugaucuaacugauucagaaaugaacaaacuguuugaaaaaacaaagaagcaacugagggaaaaugcugaggauaugggcaaugguuguuucaaaauauaccacaaaugugacaaugccugcauaggaucaaucagaaauggaacuuaugaccacgauguauacagagaugaagcauuaaacaaccgguuccagaucaagggaguugagcugaagucaggguacaaagauuggauccuauggauuuccuuugccauaucauguuuuuugcuuuguguugcuuuguugggguucaucaugugggccugccaaaagggcaacauuaggugcaacauuugcauuuga

SEQ ID NO: 41983 - RNA, 1701 nt, Artificial Sequence
  derived and/or modified CDS sequence (wt) from hemagglutinin__InfluenzaA__AGK63013
augaagacuaucauugcuuugagcuacauucuaugucugguuuucgcucaaaaacuuccuggaaaugacaacagcacggcaacgcugugccuugggcaccaugcagugccaaacggaacgauagugaaaacaaucacgaaugaccaaauugaaguuacuaaugcuacugagcugguucagaguuccucaacaggugaaauaugcaacaguccucaucagauccuugauggagaaaacugcacacuaauagaugcucuauugggagacccucagugugauggcuuccaaaacaagaaaugggaccuuuuuguugaacgaagcaaagcccacagcaacuguuacccuuaugaugugccggauuaugccucccuuaggucacuaguugccucauccggcacacuggaguuuaacaaugaaagcuucaauuggacuggagucacucaaaacggaacaagcucugcuugcauuaggagaucuaauaauaguuucuuuaguagauugaauugguugacccacuuaaacuucaaauacccagcauuggacgugacuaugccaaacaaugaacaauuugacaaauuguacauuugggggguucaccacccggguacggacaaggaccaaaucuuccuguaugcucaagcaucaggaagaaucacaguaucuaccaaaagaagccaacaagcuguaauuccgaauaucggaucuagacccagaguaaggaauaucccuagcagaguaagcaucuauuggacaauaguaaaaccgggagacauacuuuugauuaacagcacagggaaucuaauugcuccuagggguuacuucaaaauacgaagugggaaaagcucaauaaugagaucagaugcacccauuggcaaaugcaauucugcaugcaucacuccaaauggaagcauucccaaugacaaaccauuccaaaauguaaacaggaucacauacggggccugugccagauauguuaagcaaaacacucugaaauuggcgacaggaaugagaaauguaccagagaaacaaacuagaggcauauuuggcgcaauagcgguuuucauagaaaaugguugggagggaaugguggaugguugguacgguuucaggcaucaaaauucugagggaagggggcaagcagcggcucuccaaagcacucaagcagcaaucgaucaaaucacugggaagcugaauagauugaucggggaaaccaacgagaaauuccaucagauugaaaaagaauucucagaagucgaagggagaauucaggcccuugagaaauauguugaggacacuaaaauagaucucuggucauacaacgcggagcuucuuguugcccuggagaaccaacacacaauugaucuaacugacucagaaaugaacaaacuguuugaaaaaacaaagaagcaacugagggaaaaugcugaggauaugggcaaugguuguuucaaaauauaccacaaaugugacaaugccugcauaggaucaaucagaaauggaacuuaugaccacgauguguacagagaugaagcauuaaacaaccgauuccagaucaagggaguugagcugaagucaggguacaaagauuggauccuauggauuuccuuugccauaucauguuuuuugcuuuguguugcuuuguugggguucaucaugugguccugccaaaaaggcaacauuaggugcaacauuugcauuuga

SEQ ID NO: 41984 - RNA, 1701 nt, Artificial Sequence
  derived and/or modified CDS sequence (wt) from hemagglutinin__InfluenzaA__AGK63015
augaagacuaucauugcuuugagcuacauucuaugucugguuuucgcucaaaaacuuccuggaaaugacaacagcacggcaacgcugugccuugggcaccaugcaguaccaaacggaacgauagugaaaacaaucacgaaugaccaaauugaaguuacuaaugcuacugagcugguucagaguuccucaacaggugaaauaugcgacaguccucaucagauccuugauggagaaaacugcacacuaauagaugcucuauugggagacccucagugugauggcuuccaaaauaagaaaugggaccuuuuuguugaacgaagcaaagccuacagcaacuguuacccuuaugaugugccggauuaugccucccuuaggucacuaguugccucauccggcacacuggaguuuaacaaugaaagcuucaauuggacuggagucacucaaaacggaacaagcucugcuugcauaaggaaaucuaauaguaguuucuuuaguagauugaauugguugacccacuuaaacuucaaauacccagcauugaacgugacuaugccaaacaaugaacaauuugacaaauuguacauuugggggguucaccacccggguacggacaaggaccaaaucuuccuguaugcucaaucaucaggaagaaucacaguaucuaccaaaagaagccaacaagcuguaaucccgaauaucggaucuagacccagaauaaggaauaucccuagcagaauaagcaucuauuggacaauaguaaaaccgggagacauacuuuugauuaacagcacagggaaucuaauugcuccuagggguuacuucaaaauacgaagugggaaaagcucaauaaugagaucagaugcacccauuggcaaaugcaauucugaaugcaucacuccaaauggaagcauucccaaugacaaaccauuccaaaauguaaacaggaucacauacggggccugucccagauauguuaagcaaagcacucugaaauuggcaacaggaaugcgaaauguaccagagaaacaaacuagaggcauauuuggcgcaauagcggguuucauagaaaaugguugggagggaaugguggaugguugguacgguuucagacaucaaaauucugagggaagaggacaagcagcagaucucaaaagcacucaagcagcaaucgaucaaaucaaugggaagcugaaucgauugaucgggaaaaccaacgagaaauuccaucagauugaaaaagaauucucagaagucgaagggagaauucaggaccuugagaaauauguugaggacacuaaaauagaucucuggucauacaacgcggagcuucuuguugcccuggagaaccaacauacaauugaucuaacugauucagaaaugaacaaacuguuugaaaaaacaaagaagcaacugagggaaaaugcugaggauaugggcaaugguuguuucaaaauauaccacaaaugugacaaugccugcauaggaucaaucagaaauggaacuuauaaccacgauguauacagagaugaagcauuaaacaaccgguuccagaucaagggaguugagcugaagucaggguacaaagauuggauccuauggauuuccuuugccauaucauguuuuuugcuuuguguugcuuuguugggguucaucaugugggccugccaaaagggcaacauuaggugcaacauuugcauuuga

SEQ ID NO: 41985 - RNA, 1701 nt, Artificial Sequence
  derived and/or modified CDS sequence (wt) from hemagglutinin__InfluenzaA__AGK63017
augaagacuaucauugcuuugagcuacauucuaugucugguuuucgcucaaaaacuuccuggaaaugacaacagcacggcaacgcugugccuugggcaccaugcagugccaaacggaacgauagugaaaacaaucacgaaugaccaaauugaaguuacuaaugcuacugagcugguucagaguuccucaacaggugaaauaugcaacaguccucaucagauccuugauggagaaaacugcacacuaauagaugcucuauugggagacccucagugugacggcuuccaaaacaagaaaugggaccuuuuuguugaacgaagcaaagcccacagcaacuguuacccuuaugaugugccggauuaugccucccuuaggucccuaguugccucauccggcacacuggaguuuaacaaugaaagcuucaauuggacuggagucacucaaaacggaacaagcucugcuugcauaaggagaucuaauaauaguuucuuuaguagauugaauugguugacccacuuaaacuucaaauacccagcauugaacgugacuaugccaaacaaugaacaauuugacaaauuguacauuugggggguucaccacccggguacggacaaggaccaaaucuuccuguaugcucaagcaucaggaagaaucacaguaucuaccaaaagaagccaacaagcuguaauuccgaauaucggaucuagacccagaguaaggaauaucccuagcagaguaagcaucuauuggacaauaguaaaaccgggagacauacuuuugauuaacagcacagggaaucuaauugcuccuagggguuacuucaaaauacgaagugggaaaagcucaauaaugagaucagaugcacccauuggcaaaugcaauucugcaugcaucacuccaaauggaagcauucccaaugacaaaccauuccaaaauguaaacaggaucacauacggggccugucccagauauguuaagcaaaacacucugaaauuggcaacaggaaugagaaauguaccagagaaacaaacuagaggcauauuuggcgcaauagcggguuucauagaaaaugguugggaaggaaugguggaugguugguacgguuucaggcaucaaaauucugagggaaggggacaagcagcagaucucaaaagcacucaagcagcaaucgaucaaaucaaugggaagcugaauagauugaucgggaaaaccaacgagaaauuccaucagauugaaaaagaauucucagaagucgaagggagaauucaggaccuugagaaauauguugaggacacuaaaauagaucucuggucauacaacgcggagcuucuuguugcccuggagaaccaacacacaauugaucuaacugacucagaaaugaacaaacuguuugaaaaaacaaagaagcaacugagggaaaaugcugaggauaugggcaaugguuguuucaaaauauaccacaaaugugacaaugccugcauaggaucaaucagaaauggaacuuaugaccacgauguguacagagaugaagcauuaaacaaccgauuccagaucaagggaguugagcugaagucaggguacaaagauuggauccuauggauuuccuuugccauaucauguuuuuugcuuuguguugcuuuguugggguucaucaugugggccugccaaaaaggcaacauuaggugcaacauuugcauuuga

SEQ ID NO: 41986 - RNA, 1701 nt, Artificial Sequence
  derived and/or modified CDS sequence (wt) from hemagglutinin__InfluenzaA__AGK63019
augaagacuaucauugcuuugagcuacauucuaugucugguuuucgcucaaaaacuuccuggaaaugacaacagcacggcaacgcugugccuuggacaccaugcaguaccaaacggaacgauagugaaaacaaucacgaaugaccaaauugaaguuacuaaugcuacugagcugguucagaguuccucaacaggugaaauaugcgacaguccucaucagauccuugauggagaaaacugcacacuaauagaugcucuauugggagacccucagugugauggcuuccaaaauaagaaaugggaccuuuuuguugaacgaagcaaagccuacagcaacuguuacccuuaugaugugccggauuaugccucccuuaggucacuaguugccucauccggcacacuggaguuuaacaaugaaagcuucaauuggacuggagucacucaaaacggaacaaguucugcuugcauaaggagaucuaauaguaguuucuuuaguagauugaauugguugacccacuuaaacuucaaauacccagcauugaacgugacuaugccaaacaaugaacaauuugacaaauuguacauuugggggguucaccacccggguacggacaaggaccaaaucuuccuguaugcucaaucaucaggaagaaucacaguaucuaccaaaagaagccaacaagcuguaaucccgaauaucggaucuagacccagaauaagaaauaucccuagcagaauaagcaucuauuggacaauaguaaaaccgggagacauacuuuugauuaacagcacagggaaucuaauugcuccuagggguuacuucaaaauacgaagugggaaaagcucaauaaugagaucagaugcacccauuggcaaaugcaauucugaaugcaucacuccaaauggaagcauucccaaugacaaaccauuccaaaauguaaacaggaucacauacggggccugucccagauauguuaagcaaagcacucugaaauuggcaacaggaaugcgaaauguaccagagaaacaaacuagaggcauauuuggcgcaauagcggguuucauagaaaaugguugggagggaaugguggaugguugguacgguuucaggcaucaaaauucugagggaagaggacaagcagcagaucucaaaagcacucaagcagcaaucgaucaaaucaaugggaagcugaaucgauugaucgggaaaaccaacgagaaauuccaucagauugaaaaagaauucucagaagucgaagggagaauucaggaccuugagaaauauguugaggacacuaaaauagaucucuggucauacaacgcggagcuucuuguugcccuggagaaucaacauacaauugaucuaacugacucagaaaugaacaaacuguuugaaaaaacaaagaagcaacugagggaaaaugcugaggauaugggcaaugguuguuucaaaauauaccacaaaugugacaaugccugcauaggaucaaucagaaauggaacuuaugaccacgauguauacagagaugaagcauuaaacaaccgguuccagaucaagggaguugagcugaagucaggguacaaagauuggauccuauggauuuccuuugccauaucauguuuuuugcuuuguguugcuuuguugggguucaucaugugggccugccaaaaaggcaacauuaggugcaacauuugcauuuga

SEQ ID NO: 41987 - RNA, 1701 nt, Artificial Sequence
  derived and/or modified CDS sequence (wt) from hemagglutinin__InfluenzaA__AGK63021
augaagacuaucauugcuuugagcuacauucuaugucugguuuucgcucaagaacuuccuggaaaugacaacagcacggcaacgcugugccuugggcaccaugcagugccaaacggaacgauagugaaaacaaucacgaaugaccaaauugaaguuacuaaugcuacugagcugguucagaguuccucaacaggugaaauaugcaacaguccucaucagauccuugauggagaaaacugcacacuaauagaugcucuauugggagacccucagugugacggcuuccaaaacaagaaaugggaccuuuuuguugaacgaagcaaagcccacagcaacuguuacccuuaugaugugccggauuaugccucccuuaggucccuaguugccucauccggcacacuggaguuuaacaaugaaagcuucaauuggacuggagucacucaaaacgggacaagcucugcuugcauaaggagaucuaauaauaguuucuuuaguagauugaauugguugacccacuuaaacuucaaauacccagcauugaacgugacuaugccaaacaaugaacaauuugacaaauuguacauuugggggguucaccacccggguacggacaaggaccaaaucuuccuguaugcucaagcaucaggaagaaucacaguaucuaccaaaagaagccaacaagcuguaauuccgaauaucggaucuagacccagaguaaggaauaucccuagcagaguaagcaucuauuggacaauaguaaaaccgggagacauacuuuugauuaacagcacagggaaucuaauugcuccuagggguuacuucaaaauacgaagugggaaaagcucaauaaugagaucagaugcacccauuggcaaaugcaauucugcaugcaucacuccaaauggaagcauucccaaugacaaaccauuccaaaauguaaacaggaucacauacggggccugucccagauauguuaagcaaaacacucugaaauuggcaacaggaaugagaaauguaccagagaaacaaacuagaggcauauuuggcgcaauagcggguuucauagaaaaugguugggaaggaaugguggaugguugguacgguuucaggcaucaaaauucugagggaaggggacaagcagcagaucucaaaagcacucaagcagcaaucgaucaaaucaaugggaagcugaauagauugaucgggaaaaccaacgagaaauuccaucagauugaaaaagaauucucagaagucgaagggagaauucaggaccuugagaaauauguugaggacacuaaaauagaucucuggucauacaacgcggagcuucuuguugcccuagagaaccaacacacaauugaucuaacugacucagaaaugaacaaacuguuugaaaaaacaaagaagcaacugagggaaaaugcugaggauaugggcaaugguuguuucaaaauauaccacaaaugugacaaugccugcauaggaucaaucagaaauggaacuuaugaccacgauguguacagagaugaagcauuaaacaaccgauuccagaucaagggaguugagcugaagucaggguacaaagauuggauccuauggauuuccuuugccauaucauguuuuuugcuguguguugcuuuguugggguucaucaugugggccugccaaaaaggcaacauuaggugcaacauuugcauuuga

SEQ ID NO: 41988 - RNA, 1701 nt, Artificial Sequence
  derived and/or modified CDS sequence (wt) from hemagglutinin__InfluenzaA__AGK63025
augaagacuaucauugcuuugagcuacauucuaugucugguuuucgcucaaaaacuuccuggaaaugacaacagcacggcaacgcugugccuugggcaccaugcaguaccaaacggaacgauagugaaaacaaucacgaaugaccaaauugaaguuacuaaugcuacugagcugguucagaguuccucaacaggugaaauaugcgacaguccucaucagauccuugauggagaaaacugcacacuaauagaugcucuauugggagacccucagugugauggcuuccaaaauaagaagugggaccucuuuauugaacgaagcaaagccuacagcaacuguuacccuuaugaugugccggauuaugccucccuuaggucacuaguugccucauccggcacacuggaguuuaacaaugaaagcuucaauuggacuggagucacucaaaacggaacaagcucugcuugcauaaggaaaucuaauaguaguuucuuuaguagauugaauugguugacccacuuaaacuucaaauacccagcauugaacgugacuaugccaaacaaugaacaauuugacaaauuguacauuugggggguucaccacccggguacggacaaggaccaaaucuuccuguaugcucaaucaucaggaagaaucacaguaucuaccaaaagaagccaacaagcuguaaucccgaauaucggaucuagacccagaauaaggaauaucccuagcagaauaagcaucuauuggacaauaguaaaaccgggagacauacuuuugauuaacagcacagggaaucuaauugcuccuagggguuacuucaaaauacgaagugggaaaagcucaauaaugagaucagaugcacccauuggcaaaugcaauucugaaugcaucacuccaaauggaagcauucccaaugacaaaccauuccaaaauguaaacaggaucacauacggggccugucccagauauguuaagcaaagcacucugaaauuggcaacaggaaugcgaaauguaccagagaaacaaacuagaggcauauuuggcgcaauagcggguuucauagaaaaugguugggagggaaugguggaugguugguacgguuucaggcaucaaaauucugagggaagaggacaagcagcagaucucaaaagcacucaagcagcaaucgaucaaaucaaugggaagcugaaucgauugaucgggaaaaccaacgagaaauuccaucagauugaaaaagaauucucagaagucgaagggagaauucaggaccuugagaaauauguugaggacacuaaaauagaucucuggucauacaacgcggagcuucuuguugcccuggagaaccaacauacaauugaucuaacugacucagaaaugaacaaacuguuugaaaaaacaaagaagcaacugagggaaaaugcugaggauaugggcaaugguuguuucaaaauauaccacaaaugugacaaugccugcauaggaucaaucagaaauggaacuuauaaccacgauguauacagagaugaagcauuaaacaaccgguuccagaucaagggaguugagcugaagucaggguacaaagauuggauccuauggauuuccuuugccauaucauguuuuuugcuuuguguugcuuuguugggguucaucaugugggccugccaaaagggcaacauuaggugcaacauuugcauuuga

SEQ ID NO: 41989 - RNA, 1701 nt, Artificial Sequence
  derived and/or modified CDS sequence (wt) from hemagglutinin__InfluenzaA__AGK63027
augaagacuaucauugcuuugagcuacauucuaugucugguuuucgcucaaaaacuuccuggaaaugacaacagcacggcaacgcugugccuugggcaccaugcaguaccaaacggaacgauagugaaaacaaucacgaaugaccaaauugaaguuacuaaugcuacugagcugguucagaguuccucaacaggugaaauaugcgacaguccucaucagauccuugauggagaaaacugcacacugauagaugcucuauugggagacccucagugugauggcuuccaaaauaagaagugggaccuuuuuguugaacgaagcaaagccuacagcaacuguuacccuuaugaugugccggauuaugccucccuuaggucacuaguugccucauccggcacacuggaguuuaacaaugaaagcuucaauuggacuggagucacucaaaacggaacaagcucugcuugcauaaggagaucuaauaguaguuucuuuaguagauugaauugguugacccacuuaaacuucaaauacccagcauugaacgugacuaugccaaacaaugaacaauuugacaaauuguacauuugggggguucaccacccggguacggacaaggaccaaaucuuccuguaugcucaaucaucaggaagaaucacaguaucuaccaaaagaagccaacaagcuguaaucccgaauaucggaucuagacccagaauaaggaauaucccuagcagaauaagcaucuauuggacaauaguaaaaccgggagacauacuuuugauuaacagcacagggaaucuaauugcuccuagggguuacuucaaaauacgaagugggaaaagcucaauaaugagaucagaugcacccauuggcaaaugcaauucugaaugcaucacuccaaauggaagcauucccaaugacaaaccauuccaaaauguaaacaggaucacauacggggccugucccagauauguuaagcaaagcacucugaaauuggcaacaggaaugcgaaauguaccagagaaacaaacuagaggcauauuuggcgcaauagcggguuucauagaaaaugguugggagggaaugguggaugguugguacgguuucaggcaucaaaauucugagggaagaggacaagcagcagaucucaaaagcacucaagcagcaaucgaucaaaucaaugggaagcugaaucgauugaucgggaaaaccaacgagaaauuccaucagauugaaaaagaauucucagaagucgaagggagaauucaggaccuugagaaauauguugaggacacuaaaauagaucucuggucauacaacgcggagcuucuuguugcccuggagaaccaacauacaauugaucuaacugacucagaaaugaacaaacuguuugaaaaaacaaagaagcaacugagggaaaaugcugaggauaugggcaaugguuguuucaaaauauaccacaaaugugacaaugccugcauaggaucaaucagaaauggaacuuauaaccacgauguauacagagaugaagcauuaaacaaccgguuccagaucaagggaguugagcugaagucaggguacaaagauuggauccuauggauuuccuuugccauaucauguuuuuugcuuuguguugcuuuguugggguucaucaugugggccugccaaaagggcaacauuaggugcaacauuugcauuuga

SEQ ID NO: 41990 - RNA, 1701 nt, Artificial Sequence
  derived and/or modified CDS sequence (wt) from hemagglutinin__InfluenzaA__AGK63029
augaagacuaucauugcuuugagcuacauucuaugucugguuuucgcucaaaaacuuccuggaaaugacaacagcacggcaacgcugugccuugggcaccaugcagugccaaacggaacgauagugaaaacaaucacgaaugaccaaauugaaguuacuaaugcuacugaacugguucagaguuccucaacaggugaaauaugcaacaguccucaucagauccuugauggagaaaacugcacacuaauagaugcucuauugggagacccucagugugacggcuuccaaaacaagaaaugggaccuuuuuguugaacgaagcaaagcccacagcaacuguuacccuuaugaugugccggauuaugccucccuuaggucccuaguugccucauccggcacacuggaguuuaacaaugaaagcuucaauuggacuggagucacucaaaacgggacaagcucugcuugcauaaggagaucuaauaauaguuucuuuaguagauugaauugguugacccacuuaaacuucaaauacccagcauugaacgugacuaugccaaacaaugaacaauuugacaaauuguacauuugggggguucaccacccggguacggacaaggaccaaaucuuccuguaugcucaagcaucaggaagaaucacaguaucuaccaaaagaagccaacaagcuguaauuccgaauaucggaucuagacccagaguaaggaauaucccuagcagaguaagcaucuauuggacaauaguaaaaccgggagacauacuuuugauuaacagcacagggaaucuaauugcuccuagggguuacuucaaaauacgaagugggaaaagcucaauaaugagaucagaugcacccauuggcaaaugcaauucugcaugcaucacuacaaauggaagcauucccaaugacaaaccauuccaaaauguaaacaggaucacauacggggccugucccagauauguuaagcaaaacacucugaaauuggcaacaggaaugagaaauguaccagagaaacaaacuagaggcauauuuggcgcaauagcggguuucauagaaaaugguugggaaggaaugguggaugguugguacgguuucaggcaucaaaauucugagggaaggggacaagcagcagaucucaaaagcacucaagcagcaaucgaucaaaucaaugggaagcugaauagauugaucgggaaaaccaacgagaaauuccaucagauugaaaaagaauucucagaagucgaagggagaauucaggaccuugagaaauauguugaggacacuaaaauagaucucuggucauacaacgcggagcuucuuguugcccuggagaaccaacacacaauugaucuaacugacucagaaaugaacaaacuguuugaaaaaacaaagaagcaacugagggaaaaugcugaggauaugggcaaugguuguuucaaaauauaccacaaaugugacaaugccugcauaggaucaaucagaaauggaacuuaugaucacgauguguacagagaugaagcauuaaacaaccgauuccagaucaagggaguugagcugaagucaggguacaaagauuggauccuauggauuuccuuugccauaucauguuuuuugcuuuguguugcuuuguugggguucaucaugugggccugccaaaaaggcaacauuaggugcaacauuugcauuuga

SEQ ID NO: 41991 - RNA, 1701 nt, Artificial Sequence
  derived and/or modified CDS sequence (wt) from hemagglutinin__InfluenzaA__AGK63031
augaagacuaucauugcuuugagcuacauucuaugucugguuuucgcucaaaaacuuccuggaaaugacaauagcacggcaacgcugugccuugggcaccaugcaguaccaaacggaacgauagugaaaacaaucacgaaugaccaaauugaaguuacuaaugcuacugagcugguucagaguuccucaacaggugaaauaugcgacaguccucaucagauccuugauggggaaaacugcacacuaauagaugcucuauugggagacccucagugugauggcuuccaaaaaaagaaaugggaccuuuuuguugaacgaagcaaagcccacagcaacuguuacccuuaugaugugccggauuaugccucccuuaggucacuaguugccucauccggcacacuggaguuuaacaaugaaagcuucaauuggacuggagucacucaaaacggaacaagcucugcuugcauaaggagaucuaauaauaguuucuuuaguagauugaauugguugacccacuuaaacuucaaauacccagcauugaacgugauuaugccaaacaaugaacaauuugacaaauuguacauuugggggguucaccacccggguacggacaaggaccaaaucuuccuguaugcucaagcaucaggaagaaucacaguaucuaccaaaagaagccaacaagcuguaauuccgaauaucggaucuagacccagaguaaggaauaucccuagcagaguaagcaucuauuggacaauaguaaaaccgggagacauacuuuugauuaacagcacagggaaucuaauugcuccuagggguuacuucaaaauacgaagugggaaaagcucaauaaugagaucagaugcacccauuggcaaaugcaauucugcaugcaucacuccaaauggaagcauucccaaugacaaaccauuccaaaauguaaacaggaucacauacggggccugucccagauauguuaagcaaaacacucugaaauuggcaacaggaaugagaaauguaccagagaaacaaacuagaggcauauuuggcgcaauagcggguuucauagaaaaugguugggagggaaugguggaugguugguacgguuucaggcaucaaaauucugagggaagaggacaagcagcagaucucaaaagcacucaagcagcaaucgaucaaaucaaugggaagcugaauagauugaucgggaaaaccaacgagaaacuccaucagauugaaaaagaauucucagaagucgaagggagaauucuggaccuugagaaauauguugaggacacuaaaauagaucucuggucauacaacgcggagcuucuuguugcccuggagaaccaacauacaauugaucuaacugacucagaaaugaacaaacuguuugaaaaaacaaagaagcaacugagggaaaaugcugaggauaugggcaaugguuguuucaaaauauaccacaaaugugacaaugccugcauaggaucaaucagaaauggaacuuaugaccacgauguauacagagaugaagcauuaaacaaccgguuccagaucaagggaguugagcugaagucaggguacaaagauuggauccuauggauuuccuuugccauaucauguuuuuugcuuuguguugcuuuguugggguucaucaugugggccugccaaaagggcaacauuaggugcaacauuugcauuuga

SEQ ID NO: 41992 - RNA, 1701 nt, Artificial Sequence
  derived and/or modified CDS sequence (wt) from hemagglutinin__InfluenzaA__AGK63033
augaagacuaucauugcuuugagcuacauucuaugucugguuuucgcucaaaaacuuccuggaaaugacaacagcacggcaacgcugugccuugggcaccaugcaguaccaaacggaacgauagugaaaacaaucacgaaugaccaaauugaaguuacuaaugcuacugagcugguucagaguuccucaacaggugaaauaugcgacaguccucaucagauccuugauggagaaaacugcacacuaauagaugcucuauugggagacccucagugugauggcuuccaaaauaagaaaugggaccuuauuguugaacgaagcaaagccuacagcaacuguuacccuuaugaugugccggauuaugccucccuuaggucacuaguugccucauccggcacacuggaguuuaacaaugaaagcuucaauuggacuggagucacucaaaacggaacaagcucugcuugcauaaggaaaucuaauaguaguuucuuuaguagauugaauugguugacccacuuaaacuucaaauacccagcauugaacgugacuaugccaaacaaugaacaauuugacaaauuguacauuugggggguucaccacccggguacggacaaggaccaaaucuuccuguaugcucaagcaucaggaagaaucacaguaucuaccaaaagaagccaacaagcuguaaucccgaauaucggaucuagacccagaauaaggaauaucccuagcagaauaagcaucuauuggacaauaguaaaaccgggagacauacuuuugauuaacagcacagggaaucuaauugcuccuagggguuacuucaaaauacgaagugggaaaagcucaauaaugagaucagaugcacccauuggcaaaugcaauucugaaugcaucacuccaaauggaagcauucccaaugacaaaccauuccaaaauguaaacaggaucacauacggggccugucccagauauguuaagcaaagcacucugaaauuggcaacaggaaugcgaaauguaccagagaaacaaacuagaggcauauuuggcgcaaucgcggguuucauagaaaaugguugggagggaaugguggaugguugguacgguuucaggcaucaaaauucugagggaagaggacaagcagcagaucucaaaagcacucaagcagcaaucgaucaaaucaaugggaagcugaaucgauugaucgggaaaaccaacgagaaauuccaucagauugaaaaagaauucucagaagucgaagggagaauucaggaccuugagaaauauguugaggacacuaaaauagaucucuggucauacaacgcggagcuucuuguugcccuggagaaccaacauacaauugaucuaacugacucagaaaugaacaaacuguuugaaaaaacaaagaagcaacugagggaaaaugcugaggauaugggcaaugguuguuucaaaauauaccacaaaugugacaaugccugcauaggaucaaucagaaauggaacuuaugaccacgauguauacagagaugaagcauuaaacaaccgguuccagaucaagggaguugagcugaagucaggguacaaagauuggauccuauggauuuccuuugccauaucauguuuuuugcuuuguguugcuuuguugggguucaucaugugggccugccaaaaaggcaacauuaggugcaacauuugcauuuga

SEQ ID NO: 41993 - RNA, 1701 nt, Artificial Sequence
  derived and/or modified CDS sequence (wt) from hemagglutinin__InfluenzaA__AGK63035
augaagacuaucauugcuuugagcuacauucuaugucugguuuucgcucaaaaacuuccuggaaaugacaauagcacggcaacgcugugccuugggcaccaugcaguaccaaacggaacaauagugaaaacaaucacgaaugaccaaauugaaguuacuaaugcuacugagcugguucagaguuccucaacaggugaaauaugcgacaguccucaucagauccuugauggagaaaacugcacacuaauagaugcucuauugggagacccucagugugauggcuuccaaaauaagaaaugggaccuuuuuguugaacgaagcaaagccuacagcaacuguuacccuuaugaugugccggauuaugccucccuuaggucacuaguugccucauccggcacacuggaguuuaacaaugaaagcuucaauuggacuggagucacucaaaacggaacaaguucugcuugcauaaggagaucuaauaauaguuucuuuaguagauuaaauugguugacccacuuaaacuucaaauacccagcauugaacgugacuaugccaaacaaugaacaauuugacaaauuguacauuugggggguucaccacccggguacggacaaggaccaaaucuuccuguaugcucaagcaucaggaagaaucacaguaucuaccaaaagaagccaacaagcuguaaucccgaauaucggaucuagacccagaauaaggaauaucccuagcagaauaagcaucuauuggacaauaguaaaaccgggagacauacuuuugauuaacagcacagggaaucuaauugcuccuagggguuacuucaaaauacgaagugggaaaagcucaauaaugagaucagaugcacccauuggcaaaugcaauucugaaugcaucacuccaaauggaagcauucccaaugacaaaccauuccaaaauguaaacaggaucacauacggggccugucccagauauguuaagcaaagcacucugaaauuggcaacaggaaugcgaaauguaccagagaaacaaacuagaggcauauuuggcgcaauagcggguuucauagaaaaugguugggagggaaugguggaugguugguacgguuucaggcaucaaaacucugagggaagaggacaagcagcagaucucaaaagcacucaagcagcaaucgaucaaaucaaugggaagcugaaucgauugaucgggaaaaccaacgagaaauuccaucagauugaaaaagaauucucagaaguagaagggagaauucaggaccuugagaaauauguugaggacacuaaaauagaucucuggucauacaacgcggagcuucuuguugcccuggagaaccaacauacaauugaucuaacugacucagaaaugaacaaacuguuugaaaaaacaaagaagcaacugagggaaaaugcugaggauaugggcaaugguuguuucaaaauauaccacaaaugugacaaugccugcauaggaucaaucagaaauggaacuuaugaccacgauguauacagagaugaagcauuaaacaaccgguuccagaucaagggaguugagcugaagucaggauacaaagauuggauccuauggauuuccuuugccauaucauguuuuuugcuuuguguugcuuuguugggguucaucaugugggccugccaaaaaggcaacauuaggugcaacauuugcauuuga

SEQ ID NO: 41994 - RNA, 1701 nt, Artificial Sequence
  derived and/or modified CDS sequence (wt) from hemagglutinin__InfluenzaA__AGK63037
augaagacuaucauugcuuugagcuacauucuaugucugguuuucgcucaagaacuuccuggaaaugacaacagcacggcaacgcugugccuugggcaccaugcagugccaaacggaacgauagugaaaacaaucacgaaugaccaaauugaaguuacuaaugcuacugagcugguucagaguuccucaacaggugaaauaugcaacaguccucaucagauccuugauggagaaaacugcacacuaauagaugcucuauugggagacccucagugugauggcuuccaaaacaagaaaugggaccuuuuuguugaacgaagcaaagcccacagcaacuguaacccuuaugaugugccggauuaugccucccuuaggucacuaguugccucauccggcacacuggaguuuaacaaugaaagcuucaauuggacuggagucacucaaaacggaacaagcucugcuugcauaaggagauccaauaauaguuucuuuaguagauugaauugguugacccacuuaaacuucaaauacccagcauugaacgugaccaugccaaacaaugaacaauuugacaaauuguacauuugggggguucaccacccggguacggacaaggaccaaaucuuccuguaugcucaagcaucaggaagaaucacaguaucuaccaaaagaagccaacaagcuguaauuccgaauaucggaucuagacccagaguaaggaauaucccuagcagaguaagcaucuauuggacaauaguaaaaccgggagacauacuuuugauuaacagcacagggaaucuaauugcuccuagggguuacuucaaaauacgaagugggaaaagcucaauaaugagaucagaugcacccauuggcaaaugcaauucugcaugcaucacuccaaauggaagcauucccaaugacaaaccauuccaaaauguaaacaggaucacauacggggccugucccagauauguuaagcaaaacacucugaaauuggcaacaggaaugagaaauguaccagagaaacaaacuagaggcauauuuggcgcaauagcggguuucauagaaaaugguugggagggaaugguggaugguugguacgguuucaggcaucaaaauucugagggaaggggacaagcagcagaucucaaaagcacucaagcagcaaucgaucaaaucaaugggaagcugaauagauugaucgggaaaaccaacgagaaauuccaucagauugaaaaagaauucucagaagucgaagggagaauucaggaccuugagaaauauguugaggacacuaaaauagaucucuggucauacaacgcgcagcuucuuguugcccuggagaaccaacacacaauugaucuaacugacucagaaaugaacaaacuguuugaaaaaacaaagaagcaacugagggaaaaugcugaggauaugggcaaugguuguuucaaaauauaccacaaaugugacaaugccugcauaggaucaaucagaaauggaacuuaugaccacgauguauacagagaugaagcacuaaacaaccgguuucagaucaagggaguugagcugaagucaggguacaaagauuggauccuauggauuuccuuugccauaucauguuuuuugcuuuguguugcuuuguugggguucaucaugugggccugccaaaaaggcaacauuaggugcaacauuugcauuuga

SEQ ID NO: 41995 - RNA, 1701 nt, Artificial Sequence
  derived and/or modified CDS sequence (wt) from hemagglutinin__InfluenzaA__AGK63039
augaagacuaucauugcuuugagcuacauucuaugucugguuuucgcucaaaaacuuccuggaaaugacaacagcacggcaacgcugugccuugggcaccaugcaguaccaaacggaacgauagugaaaacaaucacgaaugaccaaauugaaguuacuaaugcuacugagcugguucagaguuccucaacaggugaaauaugcaacaguccucaucagauccuugauggggaaaacugcacacuaauagaugcucuauugggagacccucagugugauggcuuccaaaaaaagaaaugggaccuuuuuguugaacgaagcaaagcccacagcaacuguuacccuuaugaugugccggauuaugccucccuuaggucacuaguugccucauccggcacacuggaguuuaacaaugaaagcuucaauuggacuggagucacucaaaacggaacaagcucugcuugcauuaggagaucuaauaauaguuucuuuaguagauugaauugguugacccacuuaaacuucaaauacccagcauugaacgugacuuugccaaacaaugaacaauuugacaaauuguacauuugggggguucaccacccggguacggacaaggaccaaaucuuccuguaugcucaagcaucaggaagaaucacaguaucuaccaaaagaagccaacaagcuguaauuccgaauaucggaucuagacccagaguaaggaauaucccuagcagaguaagcaucuauuggacaauaguaaaaccgggagacauacuuuugauuaacagcacagggaaucuaauugcuccuagggguuacuucaaaauacgaagugggaaaagcucaauaaugagaucagaugcacccauuagcaaaugcaauucugcaugcaucacuccaaauggaagcauucccaaugacaaaccauuccaaaauguaaacaggaucacauacggggccugucccagauauguuaagcaaaacacucugaaauuggcaacaggaaugagaaauguaccagagaaacaaacuagaggcauauuuggcgcaauagcggguuucauagaaaaugguugggaaggaaugguggaugguugguacgguuucaggcaucaaaauucugagggaaggggacaagcagcagaucucaaaagcacucaagcagcaaucgaucaaaucaaugggaagcugaauagauugaucgggaaaaccaacgagaaauuccaucaaauugaaaaagaauucucagaagucgaagggagaauucaggaccuugagaaauauguugaggacacuaaaauagaucucuggucauacaacgcggagcuucuuguugcccuggagaaccaacacacaauugaucuaacugacucagaaaugaacaaacuguuugaaaaaacaaagaagcaacugagggaaaaugcugaggauaugggcaaugguuguuucaaaauauaccacaaaugugacaaugccugcauaggaucaaucagaaauggaacuuaugaccacgauguguacagagaugaagcauuaaacaaccgauuccagaucaagggaguugagcugaagucaggguacaaagauuggauccuauggauuuccuuugccauaucauguuuuuugcuuuguguugcuuuguugggguucaucaugugguccugccaaaaaggcaacauuaggugcaacauuugcauuuga

SEQ ID NO: 41996 - RNA, 1701 nt, Artificial Sequence
  derived and/or modified CDS sequence (wt) from hemagglutinin__InfluenzaA__AGK63041
augaagacuaucauugcuuugagcuacauucuaugucugguuuucgcucaaaaacuuccuggaaaugacaacagcacggcaacgcugugccuugggcaccaugcaguaccaaacggaacgauagugaaaacaaucacgaaugaccaaauugaaguuacuaaugcuacugagcugguucagaguuccucaacaggugaaauaugcgacaguccucaucagauccuugauggagaaaacugcacacuaauagaugcucuauugggagacccucagugugauggccuccaaaacaagaaaugggaccuuauuguugaacgaagcaaagcccacagcuacuguuacccuuaugaugugccggauuaugccucccuuaggucacuaguugccucauccggcacacuggaguuuaacaacgaaagcuucaauuggacugaagucacucaaaacggaacaagcuccgcuugcauaaggagaucuaauaauaguuucuuuaguagauugaauugguugacccacuuaaacuucaaauacccagcauugaacgugacuaugccaaacaaugaacaauuugacaaauuguacauuugggggguucaccacccggguacggacaaggaccaaaucuuccuguaugcucaagcaucaggaagaaucacaguaucuaccaaaagaagccaacaagcuguaauuccgaauaucggaucuagacccagaguaaggaauaucccuagcagaguaagcaucuauuggacaauaguaaaaccgggagacauacuuuugauuaacagcacagggaaucuaauugcuccuagggguuacuucaaaauacgaagugggaaaagcucaauaaugagaucagaugcacccauuggcaaaugcaauucugcaugcaucacuccaaauggaagcauucccaaugacaaaccauuccaaaauguaaacaggaucacauacggggccugucccagauauguuaagcaaaacacucugaaauuggcaacaggaaugagaaauguaccagagaaacaaacuagaggcauauuuggcgcaauagcggguuucauagaaaaugguugggaaggaaugguggaugguugguacgguuucaggcaucaaaauucugagggaaggggacaagcagcagaucucaaaagcacucaagcagcaaucgaucaaaucaaugggaagcugaauagauugaucgggaaaaccaacgagaaauuccaucagauugaaaaagaauucucagaagucgaagggagaauucaggaccuugagaaauauguugaggacacuaaaauagaucucuggucauacaacgcggagcuucuuguugcccuggagaaccaacacacaauugaucuaacugacucagaaaugaacaaacuguuugaaaaaacaaagaagcaacugagggaaaaugcugaggauaugggcaaugguuguuucaaaauauaccacaaaugugacaaugccugcauaggaucaaucagaaauggaacuuaugaccacgauguguacagagaugaagcauuaaacaaccgauuccagaucaagggaguugagcugaagucaggguacaaagauuggauccuauggauuuccuuugccauaucauguuuuuugcuuuguguugcuuuguugggguucaucaugugggccugccaaaaaggcaacauuaggugcaacauuugcauuuga

SEQ ID NO: 41997 - RNA, 1701 nt, Artificial Sequence
  derived and/or modified CDS sequence (wt) from hemagglutinin__InfluenzaA__AGK63043
augaagacuaucauugcuuugagcuacauucuaugucugguuuucgcucaaaaacuuccuggaaaugacaauagcacggcaacgcugugccuugggcaccaugcaguaccaaacggaacgauagugaaaacaaucacgaaugaccaaauugaaguuacuaaugcuacugagcugguucagaguuccucaacaggugaaauaugcgacaguccucaucagauccuugauggagaaaacugcacacuaauagaugcucuauugggagacccucagugugauggcuuccaaaauaagaaaugggaccuuuuuguugaacgaagcaaagccuacagcaacuguuacccuuaugaugugccggauuaugccucccuuaggucacuaguugccucauccggcacacuggaguuuaacaaugaaagcuucaauuggacuggagucacucaaaacggaacaaguucugcuugcauaaggagaucuaauaauaguuucuuuaguagauuaaauugguugacccacuuaaacuucaaauacccagcauugaacgugacuaugccaaacaaugaacaauuugacaaauuguacauuugggggguucaccacccggguacggacaaggaccaaaucuuccuguaugcucaagcaucaggaagaaucacaguaucuaccaaaagaagccaacaagcuguaauuccgaauaucggaucuagacccagaguaaggaauaucccuagcagaguaagcaucuauuggacaauaguaaaaccgggagacauacuuuugauuaacagcacagggaaucuaauugcuccuagggguuacuucaaaauacgaagugggaaaagcucaauaaugagaucagaugcacccauuggcaaaugcaauucugcaugcaucacuccaaauggaagcauucccaaugacaaaccauuccaaaauguaaacaggaucacauacggggccugucccagauauguuaagcaaagcacucugaaauuggcaacaggaaugagaaauguaccagagaaacaaacuagaggcauauuuggcgcaauagcggguuucauagaaaaugguugggaaggaaugguggaugguugguacgguuucaggcaucaaaauucugagggaaggggacaagcagcagaucucaaaagcacucaagcagcaaucgaucaaaucaaugggaagcugaauagauugaucgggaaaaccaacgagaaauuccaucagauugaaaaagaauucucagaagucgaagggagaauucaggaccuugagaaauauguugaggacacuaaaauagaucucuggucauacaacgcggagcuucuuguugcccuggagaaccaacacacaauugaucuaacugacucagaaaugaacaaacuguuugaaaaaacaaagaagcaacugagggaaaaugcugaggauaugggcaaugguuguuucaaaauauaccacaaaugugacaaugccugcauaggaucaaucagaaauggaacuuaugaccacgauguguacagagaugaagcauuaaacaaccgauuccagaucaagggaguugagcugaagucaggguacaaagauuggauccuauggauuuccuuugccauaucauguuuuuugcuuuguguugcuuuguugggguucaucaugugggccugccaaaaaggcaacauuaggugcaacauuugcauuuga

SEQ ID NO: 41998 - RNA, 1701 nt, Artificial Sequence
  derived and/or modified CDS sequence (wt) from hemagglutinin__InfluenzaA__AGK63045
augaagacuaucauugcuuugagcuacauucuaugucugguuuucgcucaaaaacuuccuggaaaugacaacagcacggcaacgcugugccuugggcaccaugcaguaccaaacggaacgauagugaaaacaaucacgaaugaccaaauugaaguuacuaaugcuacugagcugguucagaguuccucaacaggugaaauaugcaacaguccucaucagauccuugauggagaaaacugcacacuaauagaugcucuauugggagacccucagugugauggcuuccaaaaaaagaaaugggaccuuuuuguugaacgaagcaaagccuacagcaacuguuacccuuaugaugugccggauuaugccucccuuaggucacuaguugccucauccggcacacuggaguuuaacaaugaaagcuucaauuggacuggagucacucaaaacggaacaagcucugcuugcauaaggaaaucuaauaguaguuucuuuaguagauugaauugguugacccacuuaaacuucaaauacccagcauugaacgugacuaugccaaacaaugaacaauuugacaaauuguacauuugggggguucaccacccggguacggacaaggaccaaaucuuccuguaugcucaagcaucaggaagaaucacaguaucuaccaaaagaagccaacaagcuguaaucccgaauaucggaucuagacccagaauaaggaauaucccuagcagaauaagcaucuauuggacaauaguaaaaccgggagacauacuuuugauuaacagcacagggaaucuaauugcuccuagggguuacuucaaaauacgaagugggaaaagcucaauaaugagaucagaugcacccauuggcaaaugcaauucugaaugcaucacuccaaauggaagcauucccaaugacaaaccauuccaaaauguaaacaggaucacauacggggccugucccagauauguuaagcaaagcacucugaaauuggcaacaggaaugcgaaauguaccagagaaacaaacuagaggcauauuuggcgcaauagcggguuucauagaaaaugguugggagggaaugguggaugguugguacgguuucaggcaucaaaauucugagggaagaggacaagcagcagaucucaaaagcacucaagcagcaaucgaucaaaucaaugggaagcugaaucgauugaucgggaaaaccaacgagaaauuccaucagauugaaaaagaauucucagaagucgaagggagaauucaggaccuugagaaauauguugaggacacuaaaauagaucucuggucauacaacgcgcagcuucuuguugcccuggagaaccaacauacaauugaucuaacugacucagaaaugaacaaacuguuugaaaaaacaaagaagcaacugagggaaaaugcugaggauaugggcaaugguuguuucaaaauauaccacaaaugugacaaugccugcauaggaucaaucagaaauggaacuuaugaccacgauguauacagagaugaagcacuaaacaaccgguuucagaucaagggaguugagcugaagucaggguacaaagauuggauccuauggauuuccuuugccauaucauguuuuuugcuuuguguugcuuuguugggguucaucaugugggccugccaaaaaggcaacauuaggugcaacauuugcauuuga

SEQ ID NO: 41999 - RNA, 1701 nt, Artificial Sequence
  derived and/or modified CDS sequence (wt) from hemagglutinin__InfluenzaA__AGK63047
augaaggcaauacuaguaguucugcuauauacauuugcaaccgcaaaugcagacacauuauguauagguuaucaugcgaacaauucaacagacacuguagacacaguacuagaaaagaauguaacaguaacacacucuguuaaccuucuagaagacaagcauaacgggaaacuaugcaaacuaagagggguagccccauugcauuuggguaaauguaacauugcuggcuggauccugggaaauccagagugugaaucacucuccacagcaaguucaugguccuacauuguggaaacaucuaguucagacaauggaacguguuacccaggagauuucaucaauuaugaggagcuaagagagcaauugagcucagugucaucauuugaaagguuugagauauuccccaagacaaguucauggcccaaucaugacucgaacaaagguguaacggcagcauguccucaugcuggagcaaaaagcuucuacaaaaauuuaauauggcuaguuaaaaaaggaaauucauacccaaagcucagcaaauccuacauuaaugauaaagggaaagaaguccucgugcuguggggcauucaccauccaucuacuacugcugaccaacaaagucucuaucagaaugcagaugcauauguuuuuguggggacaucaagauacagcaagaaguucaagccggaaauagcaauaagacccaaagugagggaucgagaggggagaaugaacuauuacuggacacuaauagagccgggagacaaaauaacauucgaagcaacuggaaaucuagugguaccgagauaugcauucgcgauggaaagaaaugcuggaucugguauuaucauuucagauacaccaguccacgauugcaauacagcuugucagacacccgagggugcuauaaacaccagccucccauuucagaauauacauccgaucacaauugggaaauguccaaaauauguaaaaagcacaaaauugagacuggccacaggauugaggaaugucccgucuauucaaucuagaggccuguuuggggccauugccggcuucauugaagggggguggacagggaugguagauggaugguacgguuaucaccaucaaaaugagcaggggucaggauaugcagccgaccugaagagcacacagaaugccauugacaagauuacuaacaaaguaaauucuguuauugaaaagaugaauacacaguucacagcaguggguaaagaguucaaccaccuggaaaaaagaauagagaauuuaaauaaaaaaguugaugaugguuuccuggacauuuggacuuacaaugccgaacuguugguucuauuggaaaaugaaagaacuuuggacuaccacgauucaaaugugaagaacuuguaugaaaagguaagaaaccaguuaaaaaacaaugccaaggaaauuggaaacggcugcuuugaauuuuaccacaaaugcgauaacacgugcauggaaagugucaaaaaugggacuuaugacuacccaaaauacucagaagaagcaaaauuaaacagagaaaaaauagaugggguaaagcuggaaucaacaaggauuuaccagauuuuggcgaucuauucaacugucgccaguucauugguacugguagucucccugggggcaaucaguuucuggaugugcucuaaugggucucuacaguguagaauauguauuuaa

SEQ ID NO: 42000 - RNA, 1683 nt, Artificial Sequence
  derived and/or modified CDS sequence (wt) from hemagglutinin__InfluenzaA__AGK82158
augaacacucaaauccugguauucgcucugauugcgaucauuccaacaaaugcagacaaaaucugccucggacaucaugccgugucaaacggaaccaaaguaaacacauuaacugaaagaggaguggaagucgucaaugcaacugaaacaguggaacgaacaaacauccccaggaucugcucaaaagggaaaaggacaguugaccucggucaauguggacuccuggggacaaucacuggaccaccucaaugugaccaauuccuagaauuuucagccgauuuaauuauugagaggcgagaaggaagugaugucuguuauccugggaaauucgugaaugaagaagcucugaggcaaauucucagagaaucaggcggaauugacaaggaagcaaugggauucacauacaguggaauaagaacuaauggagcaaccagugcauguaggagaucaggaucuucauucuaugcagaaaugaaauggcuccugucaaacacagauaaugcugcauucccgcagaugacuaagucauauaaaaauacaagaaaaagcccagcucuaauaguaugggggauccaucauuccguaucaacugcagagcaaaccaagcuauaugggaguggaaacaaacuggugacaguugggaguucuaauuaucaacaaucuuuuguaccgaguccaggagcgagaccacaaguuaauggucuaucuggaagaauugacuuucauuggcuaaugcuaaaucccaaugauacagucacuuucaguuucaauggggcuuucauagcuccagaccgugcaagcuuccugagaggaaaaucuaugggaauccagaguggaguacagguugaugccaauugugaaggggacugcuaucauaguggagggacaauaauaaguaacuugccauuucagaacauagauagcagggcaguuggaaaauguccgagauauguuaagcaaaggagucugcugcuagcaacagggaugaagaauguuccugagauuccaaagggaagaggccuauuuggugcuauagcggguuucauugaaaauggaugggaaggccuaauugaugguugguaugguuucagacaccagaaugcacagggagagggaacugcugcagauuacaaaagcacucaaucggcaauugaucaaauaacaggaaaauuaaaccggcuuauagaaaaaaccaaccaacaauuugaguugauagacaaugaauucaaugagguagagaagcaaaucgguaaugugauaaauuggaccagagauucuauaacagaaguguggucauacaaugcugaacucuugguagcaauggagaaccagcauacaauugaucuggcugauucagaaauggacaaacuguacgaacgagugaaaagacagcugagagagaaugcugaagaagauggcacugguugcuuugaaauauuucacaagugugaugaugacuguauggccaguauuagaaauaacaccuaugaucacagcaaauacagggaagaggcaaugcaaaauagaauacagauugacccagucaaacuaagcagcggcuacaaagaugugauacuuugguuuagcuucggggcaucauguuucauacuucuagccauuguaaugggccuugucuucauauguguaaagaauggaaacaugcggugcacuauuuguauauaa

SEQ ID NO: 42001 - RNA, 1683 nt, Artificial Sequence
  derived and/or modified CDS sequence (wt) from hemagglutinin__InfluenzaA__AGK84857
augaacacucaaauccugguauucgcucugauugcgaucauuccaacaaaugcagacaaaaucugccucggacaucaugccgugucaaacggaaccaaaguaaacacauuaacugaaagaggaguggaagucgucaaugcaacugaaacaguggaacgaacaaacauccccaggaucugcucaaaagggaaaaggacaguugaccucggucaauguggacuccuggggacaaucacagggccaccucaaugugaccaauuccuagaauuuucagccgauuuaauuauugagaggcgagaaggaagugaugucuguuauccugggaaauucgugaaugaagaagcucugaggcaaauucucagagaaucaggcggaauugacaaggaagcaaugggauucacauacaguggaauaagaacuaauggagcaaccagugcauguaggagaucaggaucuucauucuaugcagaaaugaaauggcuccugucaaacacagauaaugcugcauucccgcagauuacuaagucauauaaaaauacaagaaaaagcccagcucuaauaguaugggggauccaucauuccguaucaacugcagagcaaaccaagcuauaugggaguggaaacaaacuggugacaguugggaguucuaauuaucaacaaucuuuuguaccgaguccaggagcgagaccacaaguuaauggucuaucuggaagaauugacuuucauuggcuaaugcuaaaucccaaugauacagucacuuucaguuucaauggggcuuucauagcuccagaccgugcaagcuuccugagaggaaaaucuaugggaauccagaguggaguacagguugaugccaauugugaaggggacugcuaucauaguggagggacaauaauaaguaacuugccauuucagaacauagauagcagggcaguuggaaaauguccgagauauguuaagcaaaggagucugcugcuagcaacagggaugaagaauguuccugagauuccaaagggaagaggccuauuuggugcuauagcggguuucauugaaaauggaugggaaggccuaauugaugguugguaugguuucagacaccagaaugcacagggagagggaacugcugcagauuacaaaagcacucaaucggcaauugaucaaauaacaggaaaauuaaaccggcuuauagaaaaaaccaaccaacaauuugaguugauagacaaugaauucaaugagguagagaagcaaaucgguaaugugauaaauuggaccagagauucuauaacagaaguguggucauacaaugcugaacucuugguagcaauggagaaccagcauacaauugaucuggcugauucagaaauggacaaacuguacgaacgagugaaaagacagcugagagagaaugcugaagaagauggcacugguugcuuugaaauauuucacaagugugaugaugacuguauggccaguauuagaaauaacaccuaugaucacagcaaauacagggaagaggcaaugcaaaauagaauacagauugacccagucaaacuaagcagcggcuacaaagaugugauacuuugguuuagcuucggggcaucauguuucauacuucuagccauuguaaugggccuugucuucauauguguaaagaauggaaacaugcggugcacuauuuguauauaa

SEQ ID NO: 42002 - RNA, 1683 nt, Artificial Sequence
  derived and/or modified CDS sequence (wt) from hemagglutinin__InfluenzaA__AGK84860
augaacacucaaauccugguauucgcucugauugcgaucauuccaacaaaugcagacaaaaucugccucggacaucaugccgugucaaacggaaccaaaguaaacacauuaacugaaagaggaguggaagucgucaaugcaacugaaacaguggaacgaacaaacauccccaggaucugcucaaaagggaaaaugacaguugaccucggucaauguggacuccuggggacaaucacuggaccaccucaaugugaccaauuccuagaauuuucagccgauuuaauuauugagaggcgagaaggaagugaugucuguuauccugggaaauucgugaaugaggaagcucugaggcaaauacucagagaaucaggcggaauugacaaggaagcaaugggauucacauacaguggaauaagaacuaauggagcaaccagugcauguaggagaucaggaucuucauucuaugcagaaaugaaauggcuccugucaaacacagauaaugcugcauucccgcagaugacuaagucauauaaaaauacaagaaaaagcccagcucuaauaguaugggggauccaucauuccguaucaacugcagagcaaaccaagcuauaugggaguggaaacaaacuggugacaguugggaguucuaauuaucaacaaucuuuuguaccgaguccuggagcgagaccacaaguuaauggucuaucuggaagaauugacuuucauuggcuaaugcuaaaucccaaugauacagucacuuucaguuucaauggggcuuucauagcuccagaccgugcaagcuuccugagaggaaaaucuaugggaauccagaguggaguacagguugaugccaauugugaaggggacugcuaucauaguggagggacaauaauaaguaacuugccauuucagaacauagauagcagggcaguuggaaaauguccgagauauguuaagcaaaggagucugcugcuagcaacagggaugaagaauguuccugagauuccaaagggaagaggccuauuuggugcuauagcggguuucauugaaaauggaugggaaggccuaauugaugguugguaugguuucagacaccagaaugcacagggagagggaacugcugcagauuacaaaagcacucaaucggcaauugaucaaauaacaggaaaauuaaaccggcuuauagaaaaaaccaaccaacaauuugaguugauagacaaugaauucaaugagguagagaagcaaaucgguaaugugauaaauuggaccagagauucuauaacagaaguguggucauacaaugcugaacucuugguagcaauggagaaccagcauacaauugaucuggcugauucagaaauggacaaacuguacgaacgagugaaaagacagcugagagagaaugcugaagaagauggcacugguugcuuugaaauauuucacaagugugaugaugacuguauggccaguauuagaaauaacaccuaugaucacagcaaauacagggaagaggcaaugcaaaauagaauacagauugacccagucaaacuaagcagcggcuacaaagaugugauacuuugguuuagcuucggggcaucauguuucauacuucuagccauuguaaugggccuugucuucauauguguaaagaauggaaacaugcggugcacuauuuguauauaa

SEQ ID NO: 42003 - RNA, 1683 nt, Artificial Sequence
  derived and/or modified CDS sequence (wt) from hemagglutinin__InfluenzaA__AGK84863
augaacacucaaauccugguauucgcucugauugcgaucauuccaacaaaugcagacaaaaucugccucggacaucaugccgugucaaacggaaccaaaguaaacacauuaacugaaagaggaguggaagucgucaaugcaacugaaacaguggaacgaacaaacauccccaggaucugcucaaaagggaaaaagacaguugaccucggucaauguggacuccuggggacaaucacuggaccaccucaaugugaccaauuccuagaauuuucagccgauuuaauuauugagaggcgagaaggaagugaugucuguuauccugggaaauucgugaaugaagaagcucugaggcaaauucucagagaaucaggcggaauugacaaggaagcaaugggauucacauacaguggaauaagaacuaauggagcaaccagugcauguaggagaucaggaucuucauucuaugcagaaaugaaauggcuccugucaaacacagauaaugcugcauucccgcagaugacuaagucauauaaaaauacaagaaaaagcccagcucuaauaguaugggggauccaucauuccguaucaacugcagagcaaaccaagcuauaugggaguggaaacaaacuggugacaguugggaguucuaauuaucaacaaucuuuuguaccgaguccaggagcgagaccacaaguuaauggucuaucuggaagaauugacuuucauuggcuaaugcuaaaucccaaugauacagucacuuucaguuucaauggggcuuucauagcuccagaccgugcaagcuuccugagaggaaaaucuaugggaauccagaguggaguacagguugaugccaauugugaaggggacugcuaucauaguggagggacaauaauaaguaacuugccauuucagaacauagauagcagggcaguuggaaaauguccgagauauguuaagcaaaggagucugcugcuagcaacagggaugaagaauguuccugagauuccaaagggaagaggccuauuuggugcuauagcggguuucauugaaaauggaugggaaggccuaauugaugguugguaugguuucagacaccagaaugcacagggagagggaacugcugcagauuacaaaagcacucaaucggcaauugaucaaauaacaggaaaauuaaaccggcuuauagaaaaaaccaaccaacaauuugaguugauagacaaugaauucaaugagguagagaagcaaaucgguaaugugauaaauuggaccagagauucuauaacagaaguguggucauacaaugcugaacucuugguagcaauggagaaccagcauacaauugaucuggcugauucagaaauggacaaacuguacgaacgagugaaaagacagcugagagagaaugcugaagaagauggcacugguugcuuugaaauauuucacaagugugaugaugacuguauggccaguauuagaaauaacaccuaugaucacagcaaauacagggaagaggcaaugcaaaauagaauacagauugacccagucaaacuaagcagcggcuacaaagaugugauacuuugguuuagcuucggggcaucauguuucauacuucuagccauuguaaugggccuugucuucauauguguaaagaauggaaacaugcggugcacuauuuguauauaa

SEQ ID NO: 42004 - RNA, 1701 nt, Artificial Sequence
  derived and/or modified CDS sequence (wt) from hemagglutinin__InfluenzaA__AGL07713
augaaggcaauacuaguaguucugcuauauacauuugcaaccgcaaaugcagacacauuauguauagguuaccaugcgaacaauucaacagacacuguagacacaguacuagaaaagaauguaacaguaacacgcucuguuaaucuucuagaagacaagcauaacgggaaacuaugcaaacuaagagggguagccccauugcauuuggguaaauguaacauugcuggcuggauccugggaaauccagagugugaaucacucuccacagcaagcucaugguccuacauuguggaaacaucuaguucagacaauggaacguguuacccaggagauuucaucgauuaugaggagcuaagagagcaauugagcucagugucaucauuugaaagguuugaaauauuccccaagacagguucauggcccaaucaugacucgaacaaagguguaacggcagcauguccucaugcuggagcaaaaggcuucuacaaaaauuuaauauggcuaguugaaaaaggaaauucauacccaaagcucagcaaauccuacauuaaugauaaagggaaagaaguccucgugcuauggggcauucaccauccaucuacuacugcugaccaacaacgucucuaucagaaugcagauacauauguuuuuguggggacaucaagauacagcaagaaguucaagccggaaauagcaauaagacccaaagugagggaucaagaagggagaaugaacuauuacuggacacuaguagagccgggagacaaaauaacauucgaagcaacuggaaaucuagugguaccgagauaugcauucgcaauggaaagaaaugcuggaucugguauuaucauuucagauacaccaguccacgauugcaauacaacuugucagacacccaagggugcuauaaacaccagccucccauuucagaauauacauccgaucacaauuggaaaauguccaaaauauguaaaaagcacaaaauugagacuggccacaggauugaggaaugucccgucuauucaaucuagaggccuauuuggggccauugccggcuucauugaagggggguggacagggaugguagauggaugguacgguuaucaccaucaaaacgagcaggggucaggauaugcagccgaccugaagagcacacagaaugccauugacaagauuacuaacaaaguaaauucuguuauugaaaagaugaauacacaguucacagcaguagguaaagaguucaaccaccuggaaaaaagaauagagaauuuaaauaaaaaaguugaugaugguuuucuggacauuuggacuuacaaugccgaacuguugguucuauuggaaaaugaaagaacuuuggacuaccacgauucaaaugugaagaacuuauaugaaaagguaagaaaccaguuaaaaaacaaugccaaggaaauuggaaauggcugcuuugaauuuuaccacaaaugcgauaacacgugcauggaaagugucaaaaaugggacuuaugacuacccaaaauacucagaggaagcaaaauuaaacagagaagaaauagaugggguaaagcuggaaucaacaaggauuuaccagauuuuggcgaucuauucaacugucgccaguucauugguacugguagucucccugggggcaaucaguuuuuggaugugcucuaaugggucucuacaguguagaauauguauuuaa

SEQ ID NO: 42005 - RNA, 1701 nt, Artificial Sequence
  derived and/or modified CDS sequence (wt) from hemagglutinin__InfluenzaA__AGL09731
augaagacuaucauugcuuugagcuacauucuaugucugguuuucgcucaaaaaauuccuggaaaugacaauagcacggcaacgcugugccuugggcaccaugcaguaccaaacggaacgauagugaaaacaaucacgaaugaccgaauugaaguuacuaaugcuacugagcugguucagaauuccucaauaggugaaauaugcgacaguccucaucagauccuugauggagaaaacuguacacuaauagaugcucuauugggagacccucagugugauggcuuucaaaauaagaaaugggaccuuuuuguugaacgaagcaaagccuacagcaacuguuacccuuaugaugugccggauuaugccucccuuaggucacuaguugccucauccggcacacuggaguuuaacaaugaaagcuucaauuggacuggagucacucaaaacggaacaaguucugcuugcauaaggagaucuaauaguaguuucuuuaguagauuaaauugguugacccacuuaaacuucaaauauccagcauugaacgugacuaugccaaacaaugaacaauuugacaaauuguacauuugggggguucaccacccggguacggacaaggaccaaaucuuccuguaugcucaaucaucaggaagaaucacaguaucuaccaaaagaagccaacaagcuguaaucccgaauaucggaucuagacccagaauaaggaauaucccuagcagaauaagcaucuauuggacaauaguaaaaccaggagacauacuuuugauuaacagcacagggaaucuaauugcuccuagggguuacuucaaaauaagaagugggaaaagcucaauaaugagaucagaugcacccauuggcaaaugcaagucugaaugcaucacuccaaauggaagcauuccaaaugacaaaccauuccaaaauguaaacaggaucacauacggggccugucccagauauguuaagcaaagcacucugaaauuggcaacaggaaugcgaaauguaccagagaaacaaacuagaggcauauuuggcgcaauagcggguuucauagaaaaugguugggagggaaugguggaugguugguacgguuucaggcaucaaaauucugagggaagaggacaagcagcagaucucaaaagcacucaagcagcaaucgaucaaaucaaugggaagcugaaucgauugaucgggaaaaccaacgagaaauuccaucagauugaaaaagaauucucagaaguagaagggagaauucaggaccuugagaaauauguugaggacacuaaaauagaucucuggucauacaacgcggagcuucuuguugcccuggagaaccaacauacaauugaucuaacugacucagaaaugaacaaacuauuugaaaaaacaaagaagcaacugagggaaaaugcugaggauaugggcaaugguuguuucaaaauauaccacaaaugugacaaugccugcauaggaucaaucagaaauggaacuuaugaccacgauguauacagggaugaagcauuaaacaaccgguuccagaucaagggaguugagcugaagucaggguacaaagauuggauccuauggauuuccuuugccauaucauguuuuuugcuuuguguugcuuuguugggguucaucaugugggccugccaaaagggcaacauuaggugcaacauuugcauuuga

SEQ ID NO: 42006 - RNA, 1701 nt, Artificial Sequence
  derived and/or modified CDS sequence (wt) from hemagglutinin__InfluenzaA__AGL09732
augaagacuaucauugcuuugagcuacauucuaugucugguuuucgcucaaaaacuuccuggaaaugacaauagcacggcaacgcugugccuugggcaccaugcaguaccaaacggaacgauagugaaaacaaucacgaaugaccgaauugaagucacuaaugcuacugagcugguucagaauuccucaauaggugaaauaugcgacaguccucaucagauccuugauggagaaaacugcacacuaauagaugcucuauugggagacccucagugugauggcuuucaaaauaagaaaugggaccuuuuuguugaacgaagcaaagccuacagcaacuguuacccuuaugaugugccggauuaugccucccuuaggucacuaguugccucauccggcacacuggaguuuaacaaugaaagcuucaauugggcuggggucacucaaaacggaacaaguucugcuugcauaaggggaucuaauaguaguuucuuuaguagauuaaauugguugacccacuuaaacuucaaauacccagcauugaacgugacuaugccaaacaaugaacaauuugacaaauuguacauuugggggguucaccacccggguacggacaaggaccaaaucuuccuguaugcucaaucaucaggaagaaucacaguaucuaccaaaagaagccaacaagcuguaaucccgaauaucggaucuagacccagaauaaggaauaucccuagcagaauaagcaucuauuggacaauaguaaaaccgggagacauacuuuugauuaacagcacagggaaucuaauugcuccuagggguuacuucaaaauacgaagugggaaaagcucaauaaugagaucagaugcacccauuggcaaaugcaagucugaaugcaucacuccaaauggaagcauucccaaugacaaaccauuccaaaauguaaacaggaucacauacggggccugucccagauauguuaagcaaagcacucugaaauuggcaacaggaaugcgaaauguaccagagaaacaaaccagaggcauauuuggcgcaauagcggguuucauagaaaaugguugggagggaaugguggaugguugguacgguuucaggcaucaaaauucugaggggagaggacaagcagcagaucucaaaagcacucaagcagcaaucgaucaaaucaaugggaagcugaaucgauugaucgggaaaaccaacgagaaauuccaucagauugaaaaagaauucucagaaguagaagggagaauucaggaccuugagaaauauguugaggacacaaaaauagaucucuggucauacaacgcggagcuucuuguugcccuggagaaccaacauacaauugaucuaacugacucagaaaugaacaaacuguuugaaaaaacaaagaagcaacugagggaaaaugcugaggauaugggcaaugguuguuucaaaauauaccacaaaugugacaaugccugcauaggaucaaucagaaauggaacuuaugaccacgauguauacagggaugaagcauuaaacaaccgguuccagaucaagggaguugagcugaagucaggguacaaagauuggauccuauggauuuccuuugccauaucauguuuuuugcuuuguguugcuuuguugggguucaucaugugggccugccaaaagggcaacauuaggugcaacauuugcauuuga

SEQ ID NO: 42007 - RNA, 1701 nt, Artificial Sequence
  derived and/or modified CDS sequence (wt) from hemagglutinin__InfluenzaA__AGL09734
augaagacuaucauugcuuugagcuacauucuaugucugguuuucgcucaaaaauuuccuggaaaugacaauagcacggcaacgcugugccuugggcaccaugcaguaccaaacggaacgauagugaaaacaaucacgaaugaccgaauugaaguuacuaaugcuacugagcugguucagaauuccucaauaggugaaauaugcgacaguccucaucagauccuugauggagaaaacugcacacuaauagaugcucuauugggagacccucagugugauggcuuccaaaauaagaaaugggaccuuuuuauugaacgaagcaaagccuacagcaacuguuacccuuaugaugugccggauuaugccucccuuaggucacuaguugccucauccggcacacuggaguuuaacaaugaaagcuucaauuggacuggagucacucaaaacggaacaaguucugcuugcauaaggagaucuaauaguaguuucuuuaguagauuaaauugguugacccacuuaaacuucaaauacccagcauugaacgugacuaugccaaacaaugaacaauuugacaaauuguacauuugggggguucaccacccggguacggacaaggaccaaaucuuccuguaugcucaaucaucaggaagaaucacaguaucuaccaaaagaagccaacaagcuguaaucccgaauaucggaucuagacccagaauaaggaauaucccuagcagaauaagcaucuauuggacaauaguaaaaccgggagacauacuuuugauuaacagcacagggaaucugauugcuccuagggguuacuucaaaauacgaagugggaaaagcucaauaaugagaucagaugcacccauuggcaaaugcaagucugaaugcaucacuccaaauggaagcauucccaaugacaaaccauuccaaaauguaaacaggaucacauacggggccugucccagauauguuaagcaaagcacucugaaauuggcaacaggaaugcgaaauguaccagagaaacaaacuagaggcauauuuggcgcaauagcggguuucauagaaaaugguugggagggaaugguggaugguugguacgguuucaggcaucaaaauucugagggaagaggacaagcagcagaucucaaaagcacucaagcagcaaucgaucaaaucaaugggaagcugaaucgauugaucgggaaaaccaacgagaaauuccaucagauugaaaaagaauucucagaaguagaagggagaauucaggaccuugagaaauauguugaggacacuaaaauagaucucuggucauacaacgcggagcuucuuguugcccuggagaaccaacauacaauugauuuaacugacucagaaaugaacaaacuguuugaaaaaacaaagaagcaacugagggaaaaugcugaggauaugggcaaugguuguuucaaaauauaccacaaaugugacaaugccugcauaggaucaaucagaaauggaacuuaugaccacgauguauacagagaugaagcauuaaacaaccgguuccagaucaagggaguugagcugaagucaggguacaaagauuggauccuauggauuuccuuugccauaucauguuuuuugcuuuguguugcuuuguugggguucaucaugugggccugccaaaagggcaacauuaggugcaacauuugcauuuga

SEQ ID NO: 42008 - RNA, 1701 nt, Artificial Sequence
  derived and/or modified CDS sequence (wt) from hemagglutinin__InfluenzaA__AGL09735
augaagaccaucauugcuuugagcuacauucuaugucugguuuucgcucaaaaacuuccuggaaaugacaauagcacggcaacgcugugccuugggcaccaugcaguaccaaacggaacgauagugaaaacaaucacgaaugaccgaauugaaguuacuaaugcuacugagcugguucagaauuccucaauaggugaaauaugcgacaguccucaucagauccuugauggagaaaacugcacacuaauagaugcucuauugggagacccucagugugauggcuuucaaaauaagaaaugggaccuuuuuguugaacgaagcaaagccuacagcaacuguuacccuuaugaugugccggauuaugccucccuuaggucacuaguugccucauccggcacacuggaguuuaacaaugaaagcuucaauugggcuggagucacucaaaacggaacaaguucugcuugcauaaggggaucuaauaguaguuucuuuaguagauuaaauugguugacccacuuaaacuucaaauacccagcauugaacgugacuaugccaaacaaugaacaauuugacaaauuguacauuugggggguucaccacccggguacggacaaggaccaaaucuuccuguaugcucaaucaucaggaagaaucacaguaucuaccaaaagaagccaacaagcuguaaucccgaauaucggaucuagacccagaauaaggaauaucccuagcagaauaagcaucuauuggacaauaguaaaaccgggagacauacuuuugauuaacagcacagggaaucuaauugcuccuagggguuacuucaaaauacgaagugggaaaagcucaauaaugagaucagaugcacccauuggcaaaugcaagucugaaugcaucacuccaaauggaagcauucccaaugacaaaccauuccaaaauguaaacaggaucacauacggggccugucccagauauguuaagcaaagcacucugaaauuggcaacaggaaugcgaaauguaccagagaaacaaacuagaggcauauuuggcgcaauagcggguuucauagaaaaugguugggagggaaugguggaugguugguacgguuucaggcaucaaaauucugagggaagaggacaagcagcagaucucaaaagcacucaagcagcaaucgaucaaaucaaugggaagcugaaucgauuaaucgggaaaaccaacgagaaauuccaucagauugaaaaagaauucucagaaguagaagggagaauucaggaccuugagaaauauguugaggacacaaaaauagaucucuggucauacaacgcggagcuucuuguugcccuggagaaccaacauacaauugaucuaacugacucagaaaugaacaaacuguuugaaaaaacaaagaagcaacugagggaaaaugcugaggauaugggcaaugguuguuucaaaauauaccacaaaugugacaaugccugcauaggaucaaucagaaauggaacuuaugaccacgauguauacagggaugaagcauuaaacaaccgguuccagaucaagggaguugagcugaagucaggguacaaagauuggauccuauggauuuccuuugccauaucauguuuuuugcuuuguguugcucuguugggguucaucaugugggccugccaaaagggcaacauuaggugcaacauuagcauuuga

SEQ ID NO: 42009 - RNA, 1701 nt, Artificial Sequence
  derived and/or modified CDS sequence (wt) from hemagglutinin__InfluenzaA__AGL09736
augaagacuaucauugcuuugagcuacauucuaugucugguuuucgcucaaaaacuuccuggaaaugacaauagcacggcaacgcugugccuugggcaccaugcaguaccaaacggaacgauagugaaaacaaucacgaaugaccaaauugaaguuacuaaugcuacugagcugguucagaauuccucaauaggugaaauaugcgacaguccucaucagauccuugauggagaaaacugcacacuaauagaugcucuauugggagacccucagugugauggcuuucaaaauaagaaaugggaccuuuuuguugaacgaagcaaagccuacagcaacuguuacccuuaugaugugccggauuaugccucccuuaggucacuaguugccucauccggcacacuggaguuuaacaaugaaagcuucaauugggcuggagucacucaaaacggaacaaguucugcuugcauaaggggaucuaauaguaguuucuuuaguagauuaaauugguugacccacuuaaacuucaaguacccagcauugaacgugacuaugccaaacaaugaacaauuugacaaauuguacauuugggggguucaccacccggguacggacaaggaccaaaucuuccuguaugcucaaucaucaggaagaaucacaguaucuaccaaaagaagccaacaagcuguaaucccgaauaucggaucuagacccagaauaaggaauaucccuagcagaauaagcaucuauuggacaauaguaaaaccgggagacauacuuuugauuaacagcacagggaaucuaauugcuccuagggguuacuucaaaauacgaagugggaaaagcucaauaaugagaucagaugcacccauuggcaaaugcaagucugaaugcaucacuccaaauggaagcauucccaaugacaaaccauuccaaaauguaaacaggaucacauacggggccugucccagauauguuaagcaaagcacucugaaauuggcaacaggaaugcgaaauguaccagagaaacaaacuagaggcauauuuggcgcaauagcggguuucauagaaaaugguugggagggaaugguggaugguugguacgguuucaggcaucaaaauucugagggaagaggacaagcagcagaucucaaaagcacucaagcagcaaucgaucaaaucaaugggaagcugaaucgauugaucgggaaaaccaacgagaaauuccaucagauugagaaagaauucucagaaguagaagggagaauucaggaccuugagaaauauguugaggacacaaaaauagaucucuggucauacaacgcagagcuucuuguugcccuggagaaccaacauacaauugaucuaacugacucagaaaugaacaaacuguuugaaaaaacaaagaagcaacugagggaaaaugcugaggauaugggcaaugguuguuucaaaauauaccacaaaugugacaaugccugcauaggaucaaucagaaauggaacuuaugaccacgauguauacagggaugaagcauuaaacaaccgguuccagaucaaaggaguugagcugaagucaggguacaaagauuggauccuauggauuuccuuugccauaucauguuuuuugcuuuguguugcuuuguugggguucaucaugugggccugccaaaagggcaacauuaggugcaacauuugcauuuga

SEQ ID NO: 42010 - RNA, 1701 nt, Artificial Sequence; identical to SEQ ID NO: 41901
  derived and/or modified CDS sequence (wt) from hemagglutinin__InfluenzaA__AGL09737

SEQ ID NO: 42011 - RNA, 1701 nt, Artificial Sequence
  derived and/or modified CDS sequence (wt) from hemagglutinin__InfluenzaA__AGL09739
augaagacuaucauugcuuugagcuacauucuaugucugguuuucgcucaaaaacuuccuggaaaugacaauagcacggcaacgcugugccuugggcaccaugcaguaccaaacggaacgauagugaaaacaaucacgaaugaccgaauugaaguuacuaaugcuacugagcugguucagaauuccucaauaggugaaauaugcgacaguccucaucagauucuugauggagaaaacugcacacuaauagaugcucuauugggagacccucagugugauggcuuucaaaauaagaaaugggaccuuuuuguugaacgaagcaaagccuacagcagcuguuacccuuaugaugugccggauuaugccucccuuaggucacuaguugccucauccggcacacuggaguuuaacaaugaaagcuucaauuggacuggagucacucaaaacggaacaaguucugcuugcauaaggagaucuaauaguaguuucuuuaguagauuaaauugguugacccacuuaaacuucaaauacccagcauugaacgugacuaugccaaacaaugaacaauuugacaaauuguacauuugggggguucaccacccagguacggacaaggaccaaaucuuccuguaugcucaaucaucaggaagaaucacaguaucuaccaaaagaagccaacaagcuguaaucccaaauaucggaucuagacccagaaucaggaauaucccuagcagaauaagcaucuauuggacaauaguaaaaccgggagacauacuuuugauuaacagcacagggaaucuaauugcuccuagggguuacuucaaaauacgaagugggaaaagcucaauaaugagaucagaugcacccauuggcaaaugcaagucugaaugcaucacuccaaauggaagcauucccaaugacaaaccauuccaaaauguaaacaggaucacauacggggccugucccagauauguuaagcaaagcacucugaaguuggcaacaggaaugcgaaauguaccagagaaacaaacuagaggcauauuuggcgcaauagcagguuucauagaaaaugguugggagggaaugguggaugguugguacgguuucaggcaucaaaauucugagggaagaggacaagcagcagaucucaaaagcacccaagcagcaaucgaucaaaucaaugggaagcugaaucgauugaucgggaaaaccaacgagaaauuccaucagauugaaaaagaauucucagaaguagaagggagaauucaggaccuugagaaauauguugaggacacuaaaauagaucucuggucauacaacgcggagcuucuuguugcccuggagaaccaacauacaauugaucuaacugacucagaaaugaacaaacuguuugaaaaaacaaagaagcaacugagggaaaaugcugaggauaugggcaaugguuguuucaaaauauaccacaaaugugacaaugccugcauaggaucaauaagaaauggaacuuaugaccacaauguguacagggaugaagcauuaaacaaccgguuccagaucaagggaguugagcugaagucaggguacaaagauuggauccuauggauuuccuuugccauaucauguuuuuugcuuuguguugcuuuguugggguucaucaugugggccugccaaaagggcaacauuaggugcaacauuugcauuuga

SEQ ID NO: 42012 - RNA, 1701 nt, Artificial Sequence
  derived and/or modified CDS sequence (wt) from hemagglutinin__InfluenzaA__AGL09740
augaagaccaucauugcuuugagcuacauucuaugucuaguuuucgcucaagaacuuccuggaaaugacgacagcacggcaacgcugugccuugggcaccaugcagugccaaacggaacgauagugaaaacaaucacgaaugaccaaauugaaguuacuaaugcuacugagcugguucagaguuccucaacaggugaaauaugcaacaguccucaucagauccuugauggagaaaacugcacacuaauagaugcucuauugggagacccucagugugauggcuuccaaaacaagaaaugggaccuuuuuguugaacgaagcaaagcccacagcaacuguuacccuuaugaugugccggauuaugccucccuuaggucacuaguugccucauccggcacacuggaguuuaacaaugaaagcuucaauuggacuggagucacucaaaacggaacaagcucugcuugcauaaggagaucuaauaauaguuucuuuaguagauugaauugguugacccacuuaaacuucaaauacccagcauugaacgugacuaugccaaacaaugaacaauuugacaaauuguacauuugggggguucaccacccggguacggacaaggaccaaaucuuccuguaugcucaagcaucaggaagaaucacaguaucuaccaaaagaagccaacaagcuguaauuccgaauaucggaucuagacccagaguaaggaauaucccuagcagaguaagcaucuauuggacaauaguaaaaccaggagacauacuuuugauuaacagcacagggaaucuaauugcuccuagggguuacuucaaaauacgaagugggaaaagcucaauaaugagaucagaugcacccauuggcaaaugcaauucugcaugcaucacuccaaauggaagcauucccaaugacaaaccauuccaaaauguaaacaggaucacauauggggccugucccagauaugucaagcaaaacacucugaaauuggcaacaggaaugagaaauguaccagagaaacaaacuagaggcauauuuggcgcaauagcggguuucauagaaaaugguugggagggaaugguggaugguugguacgguuucaggcaucaaaauucugagggaaggggacaagcagcagaucucaaaagcacucaagcagcaaucgaucaaaucaaugggaagcugaauagauugaucgggaaaaccaacgagaaauuccaucagauugaaaaagaauucucagaagucgaggggagaauucaggaccuugagaaauauguugaggacacuaaaauagaucucuggucauacaacgcggagcuucuuguugcccuggagaaccaacacacaauugaucuaacugacucagaaaugaacaaacuguuugaaaaaacaaagaagcaacugagggaaaaugcugaggauaugggcaaugguuguuucaaaauauaccacaaaugugacaaugccugcauaggaucaaucagaaauggaacuuaugaucacgauguguacagagaugaagcauuaaacaaccgauuccagaucaagggaguugagcugaagucaggguacaaagauuggauccuauggauuuccuuugccauaucauguuuuuugcuuuguguugcuuuguugggguucaucaugugggccugccaaaaaggcaacauuaggugcaacauuugcauuuga

SEQ ID NO: 42013 - RNA, 1701 nt, Artificial Sequence
  derived and/or modified CDS sequence (wt) from hemagglutinin__InfluenzaA__AGL09741
augaagacuaucauugcuuugagcuacauucuaugucugguuuucgcucaaaaacuuccuggaaaugacaacagcacggcaacgcugugccuugggcaccaugcaguaccaaacggaacgauagugaaaacaaucacgaaugaccaaauugaagucacuaaugcuacugagcugguucagaguuccucaacaggugaaauaugcgacaguccucaucagauccuugauggagaaaacugcacacuaauagaugcucuauugggagacccucagugugauggcuuccaaaauaagaagugggaccuuuuuguugaacgaagcaaagccuacagcaacuguuacccuuaugaugugccggauuaugccucccuuaggucacuaguugccucauccggcacacuggaguuuaacaaugaaagcuucaauuggacuggagucacucaaaacggaacaagcucugcuugcauaaggagaucuaauaguaguuucuuuaguagauugaauugguugacccacuuaaacuucaaauacccagcauugaacgugacuaugccaaacaaugaacaauuugacaaauuguacauuugggggguucaccacccggguacggacaaggaccaaaucuuccuguaugcucaaucaucaggaagaaucacaguaucuaccaaaagaagccaacaagcuguaaucccgaauaucggaucuagacccagaauaaggaauaucccuagcagaauaagcaucuauuggacaauaguaaaaccgggagacauacuuuugauuaacagcacagggaaucuaauugcuccuagggguuacuucaaaauacgaagugggaaaagcucaauaaugagaucagaugcacccauuggcaaaugcaauucugaaugcaucacuccaaauggaagcauucccaaugacaaaccauuccaaaacguaaacaggaucacauacggggccugccccagauauguuaagcaaagcacucugaaauuggcaacaggaaugcgaaauguaccagagaaacaaacuagaggcauauuuggcgcaauagcggguuucauagaaaaugguugggagggaaugguggaugguugguacgguuucaggcaucaaaauucugagggaagaggacaagcagcagaucucaaaagcacucaagcagcaaucgaucaaaucaaugggaagcugaaucgauugaucgggaaaaccaacgagaaauuccaucagauugaaaaagaauucucagaagucgaagggagaauucaggaccuugagaaauauguugaggacacuaaaauagaucucuggucauacaacgcggagcuucuuguugcccuggagaaccaacauacaauugaucuaacugacucagaaaugaacaaacuguuugaaaaaacaaagaagcaacugagggaaaaugcugaggauaugggcaaugguuguuucaaaauauaccacaaaugugacaaugccugcauaggaucaaucagaaauggaacuuauaaccacgauguauacagagaugaagcauuaaacaaccguuuccagaucaagggaguugagcugaagucaggguacaaagauuggauccuauggauuuccuuugccauaucauguuuuuugcuuuguguugcuuuguugggauucaucaugugggccugccaaaaaggcaacauuaggugcaacauuugcauuuga

SEQ ID NO: 42014 - RNA, 1701 nt, Artificial Sequence
  derived and/or modified CDS sequence (wt) from hemagglutinin__InfluenzaA__AGL09742
augaagaccaucauugcuuugagcuacauucuaugucuaguuuucgcucaagaacuuccuggaaaugacgacagcacggcaacgcugugccuugggcaccaugcagugccaaacggaacgauagugaaaacaaucacgaaugaccaaauugaaguuacuaaugcuacugagcugguucagaguuccucaacaggugaaauaugcaacaguccucaucagauccuugauggagaaaacugcacacuaauagaugcucuauugggagacccucagugugauggcuuccaaaacaagaaaugggaccuuuuuguugaacgaagcaaagcccacagcaacuguuacccuuaugaugugccggauuaugccucccuuaggucacuaguugccucauccggcacacuggaguuuaacaaugaaagcuucaauuggacuggagucacucaaaacggaacaagcucugcuugcauaaggagaucuaauaauaguuucuuuaguagauugaauugguugacccacuuaaacuucaaauacccagcauugaacgugacuaugccaaacaaugaacaauuugacaaauuguacauuugggggguucaccacccggguacggacaaggaccaaaucuuccuguaugcucaagcaucaggaagaaucacaguaucuaccaaaagaagccaacaagcuguaauuccgaauaucggaucuagacccagaguaaggaauaucccuagcagaguaagcaucuauuggacaauaguaaaaccaggagacauacuuuugauuaacagcacagggaaucuaauugcuccuagggguuacuucaaaauacgaagugggaaaagcucaauaaugagaucagaugcacccauuggcaaaugcaauucugcaugcaucacuccaaauggaagcauucccaaugacaaaccauuccaaaauguaaacaggaucacauauggggccugucccagauaugucaagcaaaacacucugaaauuggcaacaggaaugagaaauguaccagagacacaaacuagaggcauauuuggcgcaauagcggguuucauagaaaaugguugggagggaaugguggaugguugguacgguuucaggcaucaaaauucugagggaaggggacaagcagcagaucucaaaagcacucaagcagcaaucgaucaaaucaaugggaagcugaauagauugaucgggaaaaccaacgagaaauuccaucagauugaaaaagaauucucagaagucgaggggagaauucaggaccuugagaaauauguugaggacacuaaaauagaucucuggucauacaacgcggagcuucuuguugcccuggagaaccaacacacaauugaucuaacugacucagaaaugaacaaacuguuugaaaaaacaaagaagcaacugagggaaaaugcugaggauaugggcaaugguuguuucaaaauauaccacaaaugugacaaugccugcauaggaucaaucagaaauggaacuuaugaucacgauguguacagagaugaagcauuaaacaaccgauuccagaucaagggaguugagcugaggucaggguacaaagauuggauccuauggauuuccuuugccauaucauguuuuuugcuuuguguugcuuuguugggguucaucaugugggccugccaaaaaggcaacauuaggugcagcauuugcauuuga

SEQ ID NO: 42015 - RNA, 1701 nt, Artificial Sequence; identical to SEQ ID NO: 41870
  derived and/or modified CDS sequence (wt) from hemagglutinin__InfluenzaA__AGL09744

SEQ ID NO: 42016 - RNA, 1701 nt, Artificial Sequence
  derived and/or modified CDS sequence (wt) from hemagglutinin__InfluenzaA__AGL09745
augaagacuaucauugcuuugagcuacauucuaugucugguuuucgcucaaaaacuuccuggaaaugacaauagcacggcaacgcugugccuugggcaccaugcaguaccaaacggaacgauagugaaaacaaucacgaaugaccgaauugaaguuacuaaugccacugagcugguucagaauuccucaauaggugaaauaugcgacaguccucaucagauccuugauggagaaaacugcacacuaauagaugcucuauugggagacccucagugugauggcuuucaaaauaagaaaugggaccuuuuuguugaacgaagcaaagccuacagcaacuguuacccuuaugaugugccggauuaugccucccuuaggucacuaguugccucauccggcacacuggaguuuaacaaugaaagcuucaauuggacuggagucacucaaaacggaacaaguucugcuugcauaaggagaucuaauaguaguuucuuuaguagauuaaauugguugacccacuuaaacuucaaauacccagcauugaacgugacuaugccaaacaaugaacaauuugacaaauuguacauuugggggguucaccacccggguacggacaaggaccaaaucuuccuguaugcucaaucaucaggaagaaucacaguaucuaccaaaagaagccaacaagcuguaaucccaaauaucggaucuagacccagaauaaggaauaucccuagcagaauaagcaucuauuggacaauaguaaaaccgggagacauacuuuugauuaacagcacagggaaucuaauugcuccuaggggguacuucaaaauacgaagugggaaaagcucaauaaugagaucagaugcacccauuggcaaaugcaagucugaaugcaucacuccaaauggaagcauucccaaugacaaaccauuccaaaauguaaacaggaucacauacggggccugucccagauauguuaagcaaagcacucugaaauuggcaacaggaaugcggaauguaccagagaaacaaacuagaggcauauuuggugcaauagcggguuucauagaaaaugguugggagggaaugguggaugguugguacgguuucaggcaucaaaauucugagggaagaggacaagcagcagaucucaaaagcacucaagcagcaaucgaucaaaucaaugggaagcugaaucgauugaucgggaaaaccaacgagaaauuccaucagauugaaaaagaauucucagaaguagaagggagaauucaagaccuugagaaauauguugaggacacuaaaauagaucucuggucauacaacgcggagcuucuuguugcccuggagaaccaacauacaauugaucuaacugacucagaaaugaacaaacuguuugaaaaaacaaagaagcaacugagggaaaaugcugaggaugugggcaaugguuguuucaaaauauaccacaaaugugacaauaccugcauaggaucaaucagaaauggaacuuaugaccacaauguguacagggaugaagcauuaaacaaccgguuccagaucaagggaguugagcugaagucaggguacaaagauuggauccuauggauuuccuuugccauaucauguuuuuugcuuuguguugcuuuguugggguucaucaugugggcaugccaaaagggcaacauuaggugcaacauuugcauuuga

SEQ ID NO: 42017 - RNA, 1701 nt, Artificial Sequence
  derived and/or modified CDS sequence (wt) from hemagglutinin__InfluenzaA__AGL09746
augaagacuaucauugcuuugagcuacauucuaugucugguuuucgcucaaaaacuuccuggaaaugacaauagcacggcaacgcugugccuugggcaccaugcaguaccaaacggaacgauagugaaaacaaucacgaaugaccaaauugaaguuacuaaugcuacugagcugguucagaauuccucaauaggugaaauaugcgacaguccucaucagauccuugauggagaaaacugcacacuaauagaugcucuauugggagacccucagugugauggcuuucaaaauaagaaaugggaccuuuuuguugaacgaagcaaagccuacagcaacuguuacccuuaugaugugccggauuaugccucccuuaggucacuaguugccucauccggcacacuggaguuuaacaaugaaagcuucaauugggcuggagucacucaaaacggaacaaguucugcuugcauaaggggaucuaauaguaguuucuuuaguagauuaaauugguugacccacuuaaacuucaaguacccagcauugaacgugacuaugccaaacaaugaacaauuugacaaauuguacauuugggggguucaccacccggguacggacaaggaccaaaucuuccuguaugcucaaucaucaggaagaaucacaguaucuaccaaaagaagccaacaagcuguaaucccgaauaucggaucuagacccagaauaaggaauaucccuagcaggauaagcaucuauuggacaauaguaaaaccgggagacauacuuuugauuaacagcacagggaaucuaauugcuccuagggguuacuucaaaauacgaagugggaaaagcucaauaaugagaucagaugcacccauuggcaaaugcaagucugaaugcaucacuccaaauggaagcauucccaaugacaaaccauuccaaaauguaaacaggaucacauacggggccugucccagauauguuaagcaaagcacucugaaauuggcaacaggaaugcgaaauguaccagagaaacaaacuagaggcauauuuggcgcaauagcggguuucauagaaaaugguugggagggaaugguggaugguugguacgguuucaggcaucaaaauucugagggaagaggacaagcagcagaucucaaaagcacucaagcagcaaucgaucaaaucaaugggaagcugaaucgauugaucgggaaaaccaacgagaaauuccaucagauugagaaagaauucucagaaguagaagggagaauucaggaccuugagaaauauguugaggacacaaaaauagaucucuggucauacaacgcagagcuucuuguugcccuggagaaccaacauacaauugaucuaacugacucagaaaugaacaaacuguuugaaaaaacaaagaagcaacugagggaaaaugcugaggauaugggcaaugguuguuucaaaauauaccacaaaugugacaaugccugcauaggaucaaucagaaauggaacuuaugaccacgauguauacagggaugaagcauuaaacaaccgguuccagaucaagggaguugagcugaagucaggguacaaagauuggauccuauggauuuccuuugccauaucauguuuuuugcuuuguguugcuuuguugggguucaucaugugggccugccaaaagggcaacauuaggugcaacauuugcauuuga

SEQ ID NO: 42018 - RNA, 1701 nt, Artificial Sequence
  derived and/or modified CDS sequence (wt) from hemagglutinin__InfluenzaA__AGL09747
augaagaccaucauugcuuugagcuacauucuaugucuaguuuucgcucaagaacuuccuggaaaugacgacagcacggcaacgcugugccuuggacaccaugcagugccaaacggaacgauagugaaaacaaucacgaaugaccaaauugaaguuacuaaugcuacugagcugguucagaguuccucaacaggugaaauaugcaacaguccucaucagauccuugauggagaaaacugcacacuaauagaugcucuauugggagacccucagugugauggcuuccaaaacaagaaaugggaccuuuuuguugaacgaagcaaagcccacagcaacuguuacccuuaugaugugccggauuaugccucccuuaggucacuaguugccucauccggcacacuggaguuuaacaaugaaagcuucaauuggacuggagucacucaaaacggaacaagcucugcuugcauaaggagaucuaauaauaguuucuuuaguagauugaauugguugacccacuuaaacuucaaauacccagcauugaacgugacuaugccaaacaaugaacaauuugacaaauuguacauuugggggguucaccacccggguacggacaaggaccaaaucuuccuguaugcucaagcaucaggaagaaucacaguaucuaccaaaagaagccaacaagcuguaauuccgaauaucggaucuagacccagaguaaggaauaucccuagcagaguaagcaucuauuggacaauaguaaaaccaggagacauacuuuugauuaacagcacagggaaucuaauugcuccuagggguuacuucaaaauacgaagugggaaaagcucaauaaugaggucagaugcacccauuggcaaaugcaauucugcaugcaucacuccaaauggaagcauucccaaugacaaaccauuccaaaauguaaacaggaucacauauggggccugucccagauaugucaagcaaaacacucugaaauuggcaacaggaaugagaaauguaccagagaaacaaacuagaggcauauuuggcgcaauagcggguuucauagaaaaugguugggagggaaugguggaugguugguacgguuucaggcaucaaaauucugagggaaggggacaagcagcagaucucaaaagcacucaagcagcaaucgaucaaaucaaugggaagcugaauagauugaucgggaaaaccaacgagaaauuccaucagauugaaaaagaauucucagaagucgaggggagaauucaggaccuugagaaauauguugaggacacuaaaauagaucucuggucauacaacgcggagcuucuuguugcccuggagaaccaacacacaauugaucuaacugacucagaaaugaacaaacuguuugaaaaaacaaagaagcaacugagggaaaaugcugaggauaugggcaaugguuguuucaaaauauaccacaaaugugacaaugccugcauaggaucaaucagaaauggaacuuaugaucacgauguguacagagaugaagcauuaaacaaccgauuccagaucaagggaguugagcugaagucaggguacaaagauuggauccuauggauuuccuuugccauaucauguuuuuugcuuuguguugcuuuguugggguucaucaugugggccugccaaaaaggcaacauuaggugcaacauuugcauuuga

SEQ ID NO: 42019 - RNA, 1701 nt, Artificial Sequence
  derived and/or modified CDS sequence (wt) from hemagglutinin__InfluenzaA__AGL09748
augaagacuaucauugcuuugagcuacauucuaugucugguuuucgcucaaaaacuuccuggaaaugacaauagcacggcaacgcugugccuugggcaccaugcaguaccaaacggaacgauagugaaaacaaucacgaaugaccgaauugaaguuacuaaugcuacugagcugguucagaauuccucaauaggugaaauaugcgacaguccucaucagauucuugauggagaaaacugcacacuaauagaugcucuauugggagacccucagugugauggcuuucaaaauaagaaaugggaccuuuuuguugaacgaagcaaagccuacagcaacuguuacccuuaugaugugccggauuaugccucccuuaggucacuaguugccucauccggcacacuggaguuuaacaaugaaagcuucaauuggacuggagucacucaaaacggaacaaguucugcuugcauaaggagaucuaauaguaguuucuuuaguagauuaaauugguugacccacuuaaacuucaaauacccagcauugaacgugacuaugccaaacaaugaacaauuugacaaauuguacauuugggggguucaccacccagguacggacaaggaccaaaucuuccuguaugcucaaucaucaggaagaaucacaguaucuaccaaaagaagccaacaagcuguaaucccaaauaucggaucuagacccagaauaaggaauaucccuagcagaauaagcaucuauuggacaauaguaaaaccgggagacauacuuuugauuaacagcacagggaaucuaauugcuccuagggguuacuucaaaauacgaagugggaaaagcucaauaaugagaucagaugcacccauuggcaaaugcaagucugaaugcaucacuccaaauggaagcauucccaaugacaaaccauuccaaaauguaaacaggaucacauacggggccugucccagauauguuaagcaaagcacucugaaauuggcaacaggaaugcgaaauguaccagagaaacaaacuagaggcauauuuggcgcaauagcagguuucauagaaaaugguugggagggaaugguggaugguugguacgguuucaggcaucaaaauucugagggaagaggacaagcagcagaucucaaaagcacccaagcagcaaucgaucaaaucaaugggaagcugaaucgauugaucgggaaaaccaacgagaaauuccaucagauugaaaaagaauucucagaaguagaagggagaauucaggaccuugagaaauauguugaggacacuaaaauagaucucuggucauacaacgcggagcuucuuguugcccuggagaaccaacauacaauugaucuaacugacucagaaaugaacaaacuguuugaaaaaacaaagaagcaacugagggaaaaugcugaggauaugggcaaugguuguuucaaaauauaccacaaaugugacaaugccugcauagggucaauaagaaauggaacuuaugaccacaauguguacagggaugaagcauuaaacaaccgguuccagaucaaaggaguugagcugaagucaggguacaaagauuggauccuauggauuuccuuugccauaucauguuuuuugcuuuguguugcuuuguugggguucaucaugugggccugccaaaagggcaacauuaggugcaacauuugcauuuga

SEQ ID NO: 42020 - RNA, 1701 nt, Artificial Sequence
  derived and/or modified CDS sequence (wt) from hemagglutinin__InfluenzaA__AGL09749
augaaggcaauacuaguaguucugcuguacacauuugcaaccgcaaaugcagacacauuauguauagguuaucaugcgaacaauucaacagacacuguagacacaguacuagaaaagaauguaacaguaacacacucuguuaaccuucuagaagacaagcauaacgggaaacuaugcaaacuaagagggguagccccauugcauuuggguaaauguaacauugcuggcuggauccugggaaauccagagugugaaucacucuccacagcaaguucaugguccuacauuguggaaacaucuaguucagacaaugggacguguuacccaggagauuucaucaauuaugaggagcuaagagagcaauugagcucagugucaucauuugaaagguuugagauauuccccaagacaaguucauggcccaaucaugacucgaacaaagguguaacggcagcauguccucaugcuggagcaaaaagcuucuacaaaaauuuaauauggcuaguuaaaaaaggaaauucauacccaaagcucagcaaauccuacauuaaugauaaagggaaagaaguccucgugcuguggggcauucaccauccaucuacuacugcugaccaacaaagucucuaucagaaugcagaugcauauguuuuuguggggacaucaagauacagcaagaaguucaagccggaaauagcaauaagacccaaagugagggaucaagaagggagaaugaacuauuacuggacacuaauagagccgggagacaaaauaacauucgaagcaacuggaaaucuagugguaccgagauaugcauucgcaauggaaagaaaugcuggaucugguauuaucauuucagauacaccaguccacgauugcaauacaacuugccagacacccgagggugcuauaaacaccagccucccauuucagaauauacauccgaucacaauuggaaaauguccaaaguauguaaaaagcacaaaauugagacuggccacaggauugaggaaugucccgucuauucaaucuagaggccuauucggggccauugccggcuucauugaagggggguggacagggaugguagauggaugguacgguuaucaccaucaaaaugagcaggggucaggauaugcagccgaccugaagagcacacaaaaugccguugacaagauuacuaacaaaguaaauucuguuauugaaaagaugaauacacaguucacagcaguggguaaagaguucaaccaccuggaaaaaagaauagagaauuuaaauaaaaaaguugaugaugguuuccuggacauuuggacuuacaaugccgaacuguugguucuauuggaaaaugaaagaacuuuggacuaccacgauucaaaugugaagaacuuguaugaaaagguaagaaaccaguuaaaaaacaaugccaaggaaauuggaaacggcugcuuugaauuuuaccacaaaugcgauaacacgugcauggaaagugucaaaaaugggacuuaugacuacccaaaauacucagaggaagcaaaauuaaacagagaaaaaauagaugggguaaagcuggaaucaacaaggauuuaccagauuuuggcgaucuauucaacugucgccaguucauugguacugguagucucccugggggcaaucaguuucuggaugugcucuaaugggucucuacaguguagaauauguauuuaa

SEQ ID NO: 42021 - RNA, 1701 nt, Artificial Sequence
  derived and/or modified CDS sequence (wt) from hemagglutinin__InfluenzaA__AGL09750
augaagacuaucauugcuuugagcuacauucuaugucugguuuucgcucaaaaacuuccuggaaaugacaauagcacggcaacgcugugccuugggcaccaugcaguaccaaacggaacgauagugaaaacaaucacgaaugaccgaauugaaguuacuaaugcuacugagcugguucagaauuccucaauaggugaaauaugcgacaguccucaucagauccuugauggagaaaacugcacacuaauagaugcucuauugggagacccucagugugauggcuuucaaaauaagaaaugggaccuuuuuguugaacgaagcaaagccuacagcaacuguuacccuuaugaugugccggauuaugccucccuuaggucacuaguugccucauccggcacacuggaguuuaacaaugaaagcuucaauugggcuggagucacucaaaacggaacaaguucugcuugcauaaggggaucuaauaguaguuucuuuaguagauuaaauugguugacccacuuaaacuucaaauacccagcauugaacgugacuaugccaaacaaugaacaauuugacaaauuguacauuugggggguucaccacccggguacggacaaggaccaaaucuuccuguaugcucaaucaucaggaagaaucacaguaucuaccaaaagaagccaacaagcuguaaucccgaauaucggaucuagacccagaauaaggaauaucccuagcagaauaagcaucuauuggacaauaguaaaaccgggagacauacuuuugauuaacagcacagggaaucuaauugcuccuagggguuacuucaaaauacgaagugggaaaagcucaauaaugagaucagaugcacccauuggcaaaugcaagucugaauguaucacuccaaauggaagcauucccaaugacaaaccauuccaaaauguaaacaggaucacauacggggccugucccagauauguuaagcaaagcacucugaaauuggcaacaggaaugcgaaauguaccagagaaacaaacuagaggcauauuuggcgcaauagcggguuucauagaaaaugguugggagggaaugguggaugguugguacgguuucaggcaucaaaauucugagggaagaggacaagcagcagaucucaaaagcacucaagcagcaaucgaucaaaucaaugggaagcugaaucgauugaucgggaaaaccaacgagaaauuccaucagauugaaaaagaauucucagaaguagaagggagaauccaggaccuugagaaauauguugaggacacaaaaauagaucucuggucauacaacgcggagcuucuuguugcccuggagaaccaacauacaauugaucuaacugacucagaaaugaacaaacuguuugaaaaaacaaagaagcaacugagggaaaaugcugaggauaugggcaaugguuguuucaaaauauaccacaaaugugacaaugccugcauaggaucaaucagaaauggaacuuaugaccacgauguauacagggaugaagcauuaaacaaccgguuccagaucaagggaguugagcugaagucaggauacaaagauuggauccuauggauuuccuuugccauaucauguuuuuugcuuuguguugcuuuguugggguucaucaugugggccugccaaaagggcaacauuaggugcaacauuugcauuuga

SEQ ID NO: 42022 - RNA, 1701 nt, Artificial Sequence
  derived and/or modified CDS sequence (wt) from hemagglutinin__InfluenzaA__AGL09751
augaagaccaucauugcuuugagcuacauucuaugucuaguuuucgcucaagaacuuccuggaaaugacgacagcacggcaacgcugugccuugggcaccaugcagugccaaacggaacgauagugaaaacaaucacgaaugaccaaauugaaguuacuaaugcuacugagcugguucagaguuccucaacaggugaaauaugcaacaguccucaucagauccuugauggagaaaacugcacacuaauagaugcucuauugggagacccucagugugauggcuuccaaaacaagaaaugggaccuuuuuguugaacgaagcaaagcccacagcaacuguuacccuuaugaugugccggauuaugccucccuuaggucacuaguugccucauccggcacacuggaguuuaacaaugaaagcuucaauuggacuggagucacucaaaacggaacaagcucugcuugcauaaggagaucuaauaauaguuucuuuaguagauugaauugguugacccacuuaaacuucaaauacccagcauugaacgugacuaugccaaacaaugaacaauuugacaaauuguacauuugggggguucaccacccggguacggacaaggaccaaaucuuccuguaugcucaagcaucaggaagaaucacaguaucuaccaaaagaagccaacaagcuguaauuccgaauaucggaucuagacccagaguaaggaauaucccuagcagaguaagcaucuauuggacaauaguaaaaccaggagacauacuuuugauuaacagcacagggaaucuaauugcuccuagggguuacuucaaaauacgaagugggaaaagcucaauaaugagaucagaugcacccauuggcaaaugcaauucugcaugcaucacuccaaauggaagcauucccaaugacaaaccauuccaaaauguaaacaggaucacauauggggccugucccagauaugucaagcaaaacacucugaaauuggcaacaggaaugagaaaugugccagagaaacaaacuagaggcauauuuggcgcaauagcggguuucauagaaaaugguugggagggaaugguggaugguugguacgguuucaggcaucaaaauucugagggaaggggacaagcagcagaucucaaaagcacucaagcagcaaucgaucaaaucaaugggaagcugaauagauugaucgggaaaaccaacgagaaauuccaucagauugaaaaagaauucucagaagucgaggggagaauucaggaccuugagaaauauguugaggacacuaaaauagaucucuggucauacaacgcggagcuucuuguugcccuggagaaccaacacacaauugaucuaacugacucagaaaugaacaaacuguuugaaaaaacaaagaagcaacugagggaaaaugcugaggauaugggcaaugguuguuucaaaauauaccacaaaugugacaaugccugcauaggaucaaucagaaauggaacuuaugaucacgauguguacagagaugaagcauuaaacaaccgauuccagaucaagggaguugagcugaagucaggguacaaagauuggauccuauggauuuccuuugccauaucauguuuuuugcuuuguguugcuuuguugggguucaucaugugggccugccaaaaaggcaacauuaggugcaacauuugcauuuga

SEQ ID NO: 42023 - RNA, 1701 nt, Artificial Sequence
  derived and/or modified CDS sequence (wt) from hemagglutinin__InfluenzaA__AGL09753
augaagacuaucauugcuuugagcuacauucuaugucugguuuucgcucaaaaacuuccuggaaaugacaauagcacggcaacgcugugccuuggacaccaugcaguaccaaacggaacgauagugaaaacaaucacgaaugaccgaauugaaguuacuaaugcuacugagcugguucagaauuccucaauaggugaaauaugcgacaguccucaucagauccuugauggagaaaauugcacacuaauagaugcucuauugggagacccucagugugauggcuuucaaaauaagaaaugggaccuuuuuguugaacgaagcaaagccuacagcaacuguuacccuuaugaugugccggauuaugccucccuuaggucacuaguugccucauccggcacacuggaguuuaacaaugaaagcuucaauugggcuggagucacucaaaacggaacaaguucugcuugcauaaggggaucuaauaguaguuucuuuaguagauuaaauugguugacccacuuaaacuucaaauacccagcauugaacgugacuaugccaaacaaugaacaauuugacaaauuguacauuugggggguucaccacccggguacggacaaggaccaaaucuuccuguaugcucaaucaucaggaaggaucacaguaucuaccaaaagaagccaacaagcuguaaucccgaauaucggaucuagacccagaauaaggaauaucccuagcagaauaagcaucuauuggacaauaguaaaaccgggagacauacuuuugauuaacagcacagggaaucuaauugcuccuagggguuacuucaaaauacgaagugggaaaagcucaauaaugagaucagaugcacccauuggcaaaugcaagucugaaugcaucacuccaaauggaagcauucccaaugacaaaccauuccaaaauguaaacaggaucacauacggggccugucccagauauguuaagcaaagcacucugaaauuggcaacaggaaugcgaaauguaccagagaaacaaacuagaggcauauuuggcgcaauagcggguuucauagaaaaugguugggagggaaugguggaugguugguacgguuucaggcaucaaaauucugagggaagaggacaagcagcagaucucaaaagcacucaagcagcaaucgaucaaaucaaugggaagcugaaucgauugaucgggaaaaccaacgagaaauuccaucagauugaaaaagaauucucagaaguagaagggagaauucaggaccuugagaaauauguugaggacacaaaaauagaucucuggucauacaacgcggagcuucuuguugcccuggagaaccaacauacaauugaucuaacugacucagaaaugaacaaacuguuugaaaaaacaaagaagcaacugagggaaaaugcugaggauaugggcaaugguuguuucaaaauauaccacaaaugugacaaugccugcauaggaucaaucagaaauggaacuuaugaccacgauguauacagggaugaagcauuaaacaaccgguuccagaucaagggaguugagcugaagucaggguacaaagauuggauccuauggauuuccuuugccauaucauguuuuuugcuuuguguugcuuuguugggguucaucaugugggccugccaaaagggcaacauuaggugcaacauuugcauuuga

SEQ ID NO: 42024 - RNA, 1701 nt, Artificial Sequence
  derived and/or modified CDS sequence (wt) from hemagglutinin__InfluenzaA__AGL09754
augaagacuaucauugcuuugagcuacauucuaugucugguuuucgcucaaaaacuuccuggaaaugacaauagcacggcaacgcugugccuugggcaccaugcaguaccaaacggaacgauagugaaaacaaucacgaaugaccgaauugaaguuacuaaugccacugagcugguucagaauuccucaauaggugaaauaugcgacaguccucaucagauccuugauggagaaaacugcacacuaauagaugcucuauugggagacccucagugugauggcuuucaaaauaagaaaugggaccuuuuuguugaacgaagcaaagccuauagcaacuguuacccuuaugaugugccggauuaugccucccuuaggucacuaguugccucauccggcacacuggaguuuaacaaugaaagcuucaauuggacuggagucacucaaaacggaacaaguucugcuugcauaaggagaucuaauaguaguuucuuuaguagauuaaauugguugacccacuuaaacuucaaauacccagcauugaacgugacuaugccaaacaaugaacaauuugacaaauuguacauuugggggguucaccacccggguacagacaaggaccaaaucuuccuguaugcucaaucaucaggaagaaucacaguaucuaccaaaagaagccaacaagcuguaaucccaaauaucggaucuagacccagaauaaggaauaucccuagcagaauaagcaucuauuggacaauaguaaaaccgggagacauacuuuugauuaacagcacagggaaucuaauugcuccuagggguuacuucaaaauacgaagugggaaaagcucaauaaugagaucagaugcacccauuggcaaaugcaagucugaaugcaucacuccaaauggaagcauccccaaugacaaaccauuccaaaauguaaacaggaucacauacggggccugucccagauauguuaagcaaagcacucugaaauuggcaacaggaaugcgaaauguaccagagaaacaaacuagaggcauauuuggugcaauagcggguuucauagaaaaugguugggagggaaugguggaugguugguacgguuucaggcaucaaaauucugagggaagaggacaagcagcagaucucaaaagcacucaagcagcaaucgaucaaaucaaugggaagcugaaucgauugaucgggaaaaccaacgagaaauuccaucagauugaaaaagaauucucagaaguagaagggagaauucaggaccuugagaaauauguugaggacacuaaaauagaucucuggucauacaacgcggagcuucuuguugcccuggagaaccaacauacaauugaucuaacugacucagaaaugaacaaacuguuugaaaaaacaaagaagcaacugagggaaaaugcugaggauaugggcaaugguuguuucaaaauauaccacaaaugugacaaugccugcauaggaucaaucagaaauggaacuuaugaccacaauguguacagggaugaagcauuaaacaaccgguuccagaucaagggaguugagcugaagucaggguacaaagauuggauccuauggauuuccuuugccauaucaugucuuuugcuuuguguugcuuuguugggguucaucaugugggcaugccaaaagggcaacauuaggugcaacauuugcauuuga

SEQ ID NO: 42025 - RNA, 1701 nt, Artificial Sequence
  derived and/or modified CDS sequence (wt) from hemagglutinin__InfluenzaA__AGL09756
augaagacuaucauugcuuugagcuacauucuaugucugguuuucgcucaaaaacuuccuggaaaugacaauagcacggcaacgcugugccuugggcaccaugcaguaccaaacggaacgauagugaaaacaaucacgaaugaccaaauugaaguuacuaaugcuacugagcugguucagaauuccucaauaggugaaauaugcgacaguccucaucagauccuugauggagaaaacugcacacuaauagaugcucuauugggagacccucagugugauggcuuucaaaauaagaaaugggaccuuuuuguugaacgaagcaaagccuacagcaacuguuacccuuaugaugugccggauuaugccucccuuaggucacuaguugccucauccggcacacuggaguuuaacaaugaaagcuucaauugggcuggagucacucaaaacggaacaaguucugcuugcauaaggggaucuaauaguaguuucuuuaguagauuaaauugguugacccacuuaaacuucaaguacccagcauugaacgugacuaugccaaacaaugaacaauuugacaaauuguacauuugggggguucaccacccggguacggacaaggaccaaaucuuccuguaugcucaaucaucaggaagaaucacaguaucuaccaaaagaagccaacaagcuguaaucccgaauaucggaucuagacccagaauaaggaauaucccuagcagaauaagcaucuauuggacaauaguaaaaccgggagacauacuuuugauuaacagcacagggaaucuaauugcuccuagggguuacuucaaaauacgaagugggaaaagcucaauaaugagaucagaugcacccauuggcaaaugcaagucugaaugcaucacuccaaauggaagcauucccaaugacaaaccauuccaaaauguaaacaggaucacauacggggccugucccagauauguuaagcaaagcacucugaaauuggcaacaggaaugcgaaauguaccagagaagcaaacuagaggcauauuuggcgcaauagcggguuucauagaaaaugguugggagggaaugguggaugguugguacgguuucaggcaucaaaauucugagggaagaggacaagcagcagaucucaaaagcacucaagcagcaaucgaucaaaucaaugggaagcugaaucgauugaucgggaaaaccaacgagaaauuccaucagauugagaaagaauucucagaaguagaagggagaauucaggaccuugagaaauauguugaggacacaaaaauagaucucuggucauacaacgcagagcuucuuguugcccuggaaaaccaacauacaauugaucuaacugacucagaaaugaacaaacuguuugaaaaaacaaagaagcaacugagggaaaaugcugaggauaugggcaaugguuguuucaaaauauaccacaaaugugacaaugccugcauaggaucaaucagaaauggaacuuaugaccacgauguauacagggaugaagcauuaaacaaccgguuccagaucaagggaguugagcugaagucaggguacaaagauuggauccuauggauuuccuuugccauaucauguuuuuugcuuuguguugcuuuguugggguucaucaugugggccugccaaaagggcaacauuaggugcaacauuugcauuuga

SEQ ID NO: 42026 - RNA, 1701 nt, Artificial Sequence
  derived and/or modified CDS sequence (wt) from hemagglutinin__InfluenzaA__AGL09758
augaaggcaauacuaguaguuuugcuauauacauuugcaaccgcaaaugcagacacauuauguauagguuaucaugcgaacaauucaacagacacuguagacacaguacuagaaaagaauguaacaguaacacacucuguuaaucuucuagaagacaagcauaacgggaaaauaugcaaacuaagagggguagccccauuacauuugggaaaauguaacauugcuggcuggauccugggaaauccagagugugaaucacucuccacagcaagcucaugguccuacauuguggaaacaucuaguucagacaauggaacguguuacccaggagauuucaucgauuaugaggagcuaagagagcaauugagcucagugucaucauuugaaagguuugagauauuccccaagacaaguucauggcccaaucaugacucgaacaaagguguaacggcagcauguccucaugcuggagcaaaaggcuucuacaaaaacuuaauauggcuaguuaaaaaaggaaauucauacccaaagcucagcaacuccuacauuaaugauaaagggaaagaaguccucgugcuauggggcauucaccauccaucuacuacugcugaucaacaaagucucuaucaaaaugcagauacauauguuuuuguggggacaucaagauacagcaagaaguucaagccggaaauagcaauaagacccaaagugagggaucaagaagggagaaugaacuauuacuggacacugguagagccgggagacaaaauaacauucgaagcaacuggaaaucuagugguaccgagauaugcauucgcaauggaaagaaaugcuggaucugguauuaucauuucagauacaacaguccacgauugcaauacaacuugucagacacccaagggugcuauaaacaccagccuaccauuucagaauauacauccgaucacaauuggaaaauguccaaaauacguaaaaagcacaaaauugagacuggccacaggauugaggaaugucccgucuauucaaucuagaggccuauuuggggccauugccggcuucauugaagggggguggacagggaugguagauggaugguacgguuaucaccaucaaaaugagcaggggucaggauaugcagccgaccugaagagcacacagaaugccauugacaagauuacuaacaaaguaaauucuguuauugaaaagaugaauacacaguucacagcaguagguaaagaguucaaccaccuggaaaaaagaauagagaauuuaaauaaaaaaguugaugaugguuuccuggacauuuggacuuacaaugccgaacuguugguucuauuggaaaaugaaagaacuuuggacuaucacgauucgaaugugaagaacuuauaugaaaagguaagaaaccaguuaaaaaacaaugccaaggaaauuggaaauggcugcuuugaauuuuaccacaaaugcgauaacaugugcauggaaaguguuaaaaaugggacuuaugacuacccaaaauacucagaggaagcaaaauuaaacagagaaaaaauagaugggguaaagcuggaaucaacaaggauuuaccagauuuuggcgaucuauucaacugucgccaguucauugguacugguagucucccugggggcaaucaguuuuuggaugugcucuaaugggucucuacaguguagaauauguauuuaa

SEQ ID NO: 42027 - RNA, 1701 nt, Artificial Sequence
  derived and/or modified CDS sequence (wt) from hemagglutinin__InfluenzaA__AGL09760
augaagaccaucauugcugugagcuacauucuaugucuaguuuuugcucaagaacuuccuggaaaugacgacagcacggcaacgcugugccuugggcaccaugcagugccaaacggaacgauagugaaaacaaucacgaaugaccaaauugaaguuacuaaugcuacugaacugguucagaguuccucaacaggugaaauaugcaacaguccucaucagauccuugauggagaaaacugcacacuaauagaugcucuauugggagacccucagugugauggcuuccaaaacaagaaaugggaccuuuuuguugaacgaagcaaagcccacagcaacuguuacccuuaugaugugccggauuaugccucccuuaggucacuaguugccucauccggcacacuggaguuuaacaaugaaagcuucaauuggacuggagucacucaaaacggaacaagcucugcuugcauaaggagaucuaauaauaguuucuuuaguagauugaauugguugacccacuuaaacuucaaauacccagcauugaacgugacuaugccaaacaaugaacaauuugacaaauuguacauuugggggguucaccacccggguacggacaaggaccaaaucuuccuguaugcucaagcaucaggaagaaucacaguaucuaccaaaagaagccaacaagcuguaauuccgaauaucggaucuagacccagaguaaggaauaucccuagcagaguaagcaucuauuggacaauaguaaaaccgggagacauacuuuugauuaacagcacagggaaucuaauugcuccuagggguuacuucaaaauacgaagugggaaaagcucaauaaugagaucagaugcacccauuggcaaaugcaauucugcaugcaucacuccaaauggaagcauucccaaugacaaaccauuccaaaauguaaacaggaucacauacggggccugucccagauaugucaagcaaaacacucugaaauuggcaacaggaaugagaaauguaccagagaaacaaacuagaggcauauuuggcgcaauagcggguuucauagaaaaugguugggagggaaugguggaugguugguacgguuucaggcaucaaaauucugagggaaggggacaagcagcagaucucaaaagcacucaagcagcaaucgaucaaaucaaugggaagcugaauagauugaucgggaaaaccaacgagaaauuccaucagauugaaaaagaauucucagaagucgaagggagaauucaggaccuugagaaauauguugaggacacuaaaauagaucucuggucauacaacgcggagcuucuuguugcccuggagaaccaacacacaauugaucuaacugacucagaaaugaacaaacuguuugaaaaaacaaagaagcaacugagggaaaaugcugaggauaugggcaaugguuguuucaaaauauaccacaaaugugacaaugccugcauaggaucaaucagaaauggaacuuaugaucacgauguguacagagaugaagcauuaaacaaccgauuccagaucaagggaguugagcugaagucaggguacaaagauuggauccuauggauuuccuuugccauaucauguuuuuugcuuuguguugcuuuguugggguucaucaugugggccugccaaaaaggcaacauuaggugcaacauuugcauuuga

SEQ ID NO: 42028 - RNA, 1701 nt, Artificial Sequence
  derived and/or modified CDS sequence (wt) from hemagglutinin__InfluenzaA__AGL09761
augaagacuaucauugcuuugagcuacauucuaugucugguuuucgcucaaaaacuuccuggaaaugacaauagcacggcaacgcugugccuugggcaccaugcaguaccaaacggaacgauagugaaaacaaucacgaaugaccgaauugaaguuacuaaugcuacugagcugguucagaauuccucaauaggugaaauaugcgacaguccucaucagauccuugauggagaaaacugcacacuaauagaugcucuauugggagacccucagugugauggcuuucaaaauaagaaaugggaccuuuuuguugaacgaagcaaagccuacagcaacuguuacccuuaugaugugccggauuaugccucccuuaggucacuaguugccucauccggcacacuggaguuuaacaaugaaagcuucaauugggcuggagucacucaaaacggaacaaguucugcuugcauaaggggaucuaauaguaguuucuuuaguagauuaaauugguugacccacuuaaacuucaaauacccagcauugaacgugacuaugccaaacaaugaacaauuugacaaauuguacauuugggggguucaccacccggguacggacaaggaccaaaucuuccuguaugcucaaucaucaggaagaaucacaguaucuaccaaaagaagccaacaagcuguaaucccgaauaucggaucuagacccagaauaaggaauaucccuagcagaauaagcaucuauuggacaauaguaaaaccgggagacauacuuuugauuaacagcaccgggaaucuaauugcuccuagggguuacuucaaaauacgaagugggaaaagcucaauaaugagaucagaugcacccauuggcaaaugcaagucugaaugcaucacuccaaauggaagcauucccaaugacaaaccauuccaaaauguaaacaggaucacauacggggccugucccagauauguuaagcaaagcacucugaaauuggcaacaggaaugcgaaauguaccagagaaacaaacuagaggcauauuuggcgcaauagcggguuucauagaaaaugguugggagggaaugauggaugguugguacgguuucaggcaucaaaauucugagggaagaggacaagcagcagaucucaaaagcacucaagcagcaaucgaucaaaucaaugggaagcugaaucgauugaucgggaaaaccaacgagaaauuccaucagauugaaaaagaauucucagaaguagaagggagaauucaggaccuugagaaauauguugaggacacaaaaauagaucucuggucauacaacgcggagcuucuuguugcccuggagaaccaacauacaauugaucuaacugacucagaaaugaacaaacuguuugaaaaaacaaagaagcaacugagggaaaaugcugaggauaugggcaaugguuguuucaaaauauaccacaaaugugacaaugccugcauaggaucaaucagaaauggaacuuaugaccacgauguauacagggaugaagcauuaaacaaccgguuccagaucaagggaguugagcugaagucaggguacaaagauuggauccuauggauuuccuuugccauaucauguuuuuugcuuuguguugcuuuguugggguucaucaugugggccugccaaaagggcaacauuaggugcaacauuugcauuuga

SEQ ID NO: 42029 - RNA, 1701 nt, Artificial Sequence
  derived and/or modified CDS sequence (wt) from hemagglutinin__InfluenzaA__AGL09762
augaagacuaucauugcuuugagcuacauucuaugucugguuuucgcucaaaaacuuccuggaaaugacaauagcacggcaacgcugugccuugggcaccaugcaguaccaaacggaacgauagugaaaacaaucacgaaugaccaaauugaaguuacuaaugcuacugagcugguucagaauuccucaauaggugaaauaugcgacaguccucaucagauccuugauggagaaaacugcacacuaauagaugcucuauugggagacccucagugugauggcuuucaaaauaagaaaugggaccuuuuuguugaacgaagcaaagccuacagcaacuguuacccuuaugaugugccggauuaugccucccuuaggucacuaguugccucauccggcacacuggaguuuaacaaugaaagcuucaauuggacuggagucacucaaaacggaacaaguucugcuugcauaaggggaucuaauaguaguuucuuuaguagauuaaauugguugacccacuuaaacuucaaguacccagcauugaacgugacuaugccaaacaaugaacaauuugacaaauuguacauuugggggguucaccacccggguacggacaaggaccaaaucuuccuguaugcucaaucaucaggaagaaucacagugucuaccaaaagaagccaacaagcuguaaucccgaauaucggaucuagacccagaauaaggaauaucccuagcagaauaagcaucuauuggacaauaguaaaaccgggagacauacuuuugauuaacagcacagggaaucuaauugcuccuagggguuacuucaaaauacgaagugggaaaagcucaauaaugagaucagaugcacccauuggcaaaugcaagucugaaugcaucacuccaaauggaagcauucccaaugacaaaccauuccaaaauguaaacaggaucacauacggggccugucccagauauguuaagcaaagcacucugaaauuggcaacaggaaugcgaaauguaccagagaaacaaacuagaggcauauuuggcgcaauagcggguuucauagaaaaugguugggagggaaugguggaugguugguacgguuucaggcaucaaaauucugagggaagaggacaagcagcagaucucaaaagcacucaagcagcaaucgaucaaaucaaugggaagcugaaucgauugaucgggaaaaccaacgagaaauuccaucagauugagaaagaauucucagaaguagaagggagaauucaggaccuugagaaauauguugaggacacaaaaauagaucucuggucauacaacgcagagcuucuuguugcccuggagaaccaacauacaauugaucuaacugacucagaaaugaacaaacuguuugaaaaaacaaagaagcaacugagggaaaaugcugaggauaugggcaaugguuguuucaaaauauaccacaaaugugacaaugccugcauaggaucaaucagaaauggaacuuaugaccacgauguauacagggaugaagcauuaaacaaccgguuccagaucaagggaguugagcugaagucaggguacaaagauuggauccuauggauuuccuuugccauaucauguuuuuugcuuuguguugcuuuguugggguucaucaugugggccugccaaaagggcaacauuaggugcaacauuugcauuuga

SEQ ID NO: 42030 - RNA, 1701 nt, Artificial Sequence
  derived and/or modified CDS sequence (wt) from hemagglutinin__InfluenzaA__AGL09763
augaagacuaucauugcuuugagcuacauucuaugucugguuuucgcucaaaaacuuccuggaaaugacaauagcacggcaacgcugugccuugggcaccaugcaguaccaaacggaacgauagugaaaacaaucacgaaugaccgaauugaaguuacuaaugcuacugagcugguucagaauuccucaauaggugaaauaugcgacaguccucaucagauccuugauggagaaaacugcacacuaauagaugcucuauugggagacccucagugugauggcuuucaaaauaagaaaugggaccuuuuuguugaacgaagcaaagccuacagcaacuguuacccuuaugaugugccggauuaugccucccuuaggucacuaguugccucauccggcacacuggaguuuaacaaugaaagcuucaauugggcuggagucacucaaaacggaacaaguucugcuugcauaaggggaucuaauaguaguuucuuuaguagauuaaauugguugacccacuuaaacuucaaauacccagcauugaacgugacuaugccaaacaaugaacaauuugacaaauuguacauuugggggguucaccacccggguacggacaaggaccaaaucuuccuguaugcucaaucaucaggaagaaucacaguaucuaccaaaagaagccaacaagcuguaaucccgaauaucggaucuagacccagaauaaggaauaucccuagcagaauaagcaucuauuggacaauaguaaaaccgggagacauacuuuugauuaacagcacagggaaucuaauugcuccuagggguuacuucaaaauacgaagugggaaaagcucaauaaugagaucagaugcacccauuggcaaaugcaagucugaaugcaucacuccaaauggaagcauucccaaugacaaaccauuccaaaauguaaacaggaucacauacggggccugucccagauauguuaagcaaagcacucugaaauuggcaacaggaaugcgaaauguaccagagaaacaaacuagaggcauauuuggcgcaauagcggguuucauagaaaaugguugggagggaaugguggaugguugguacgguuucaggcaucaaaauucugagggaagaggacaagcagcagaucucaaaagcacucaagcagcaaucgaucaaaucaaugggaagcugaaucgauugaucgggaaaaccaacgagaaauuccaucagauugaaaaagaauucucagaaguagaagggagaauucaggaccuugagaaauauguugaggacacaaaaauagaucucuggucauacaacgcggagcuucuuguugcccuggagaaccaacauacaauugaucuaacugacucagaaaugaacaaacuguuugaaaaaacaaagaagcaacugagggaaaaugcugaggauaugggcaaugguuguuucaaaauauaccacaaaugugacaaugccugcauaggaucaaucagaaauggaacuuaugaccacgauguauacagggaugaagcauuaaacaaccgguuccagaucaagggaguugagcugaagucaggguacaaagauuggauccuauggauuuccuuugccauaucauguuuuuugcuuuguguugcuuuguugggguucaucaugugggccugccaaaagggcaacauuaggugcaacauuugcauuuga

SEQ ID NO: 42031 - RNA, 1701 nt, Artificial Sequence
  derived and/or modified CDS sequence (wt) from hemagglutinin__InfluenzaA__AGL09764
augaagacuaucauugcuuugagcuacauucuaugucugguuuucgcucaaaaaauuccuggaaaugacaauagcacggcaacgcugugccuugggcaccaugcaguaccaaacggaacgauagugaaaacaaucacgaaugaccaaauugaaguuacuaaugcuacugagcugguucagaauuccucaauaggugaaauaugcgacaguccucaucagauccuugauggagaaaacuguacacuaauagaugcucuauugggagacccucagugugauggcuuucaaaauaagaaaugggaccuuuuuguugaacgaagcaaagccuacagcaacuguuacccuuaugaugugccggauuaugccucccuuaggucacuaguugccucauccggcacacuggaguuuaacaaugaaagcuucaauuggacuggagucacucaaaacggaacaaguucugcuugcauaaggagaucuaauaguaguuucuuuaguagauuaaauugguugacccacuuaaacuucaaauacccagcauugaacgugacuaugccaaacaaugaacaauuugacaaauuguacauuugggggguucaccacccggguacggacaaggaccaaaucuuccuguaugcucaaucaucaggaagaaucacaguaucuaccaaaagaagccaacaagcuguaaucccgaauaucggaucuagacccagaauaaggaauaucccuagcagaauaagcaucuauuggacaauaguaaaaccaggagacauacuuuugauuaacagcacagggaaucuaauugcuccuagggguuacuucaaaauaagaagugggaaaagcucaauaaugagaucagaugcacccauuggcaaaugcaagucugaaugcaucacuccaaauggaagcauuccaaaugacaaaccauuccaaaauguaaacaggaucacauacggggccugucccagauauguuaagcaaagcacucugaaauuggcaacaggaaugcgaaauguaccagagaaacaaacuagaggcauauuuggcgcaauagcggguuucauagaaaaugguugggagggaaugguggaugguugguacgguuucaggcaucaaaauucugagggaagaggacaagcagcagaucucaaaagcacucaagcagcaaucgaucaaaucaaugggaagcugaaucgauugaucgggaaaaccaacgagaaauuccaucagauugaaaaagaauucucagaaguagaagggagaauucaggaccuugagaaauauguugaggacacuaaaauagaucucuggucauacaacgcggagcuucuuguugcccuggagaaccaacauacaauugaucuaacugacucagaaaugaacaaacuguuugaaaaaacaaagaagcaacugagggaaaaugcugaggauaugggcaaugguuguuucaaaauauaccacaaaugugacaaugccugcauaggaucaaucagaaauggaacuuaugaccacgauguauacagggaugaagcauuaaacaaccgguuccagaucaagggaguugagcugaagucaggguacaaagauuggauccuauggauuuccuuugccauaucauguuuuuugcuuuguguugcuuuguugggguucaucaugugggccugccaaaagggcaacauuaggugcaacauuugcauuuga

SEQ ID NO: 42032 - RNA, 1701 nt, Artificial Sequence
  derived and/or modified CDS sequence (wt) from hemagglutinin__InfluenzaA__AGL09765
augaagacuaucauugcuuugagcuacauucuaugucugguuuucgcucaaaaacuuccuggaaaugacaauagcacggcaacgcugugccuugggcaccaugcaguaccaaacggaacgauagugaaaacaaucacgaaugaccgaauugaaguuacuaaugcuacugagcugguucagaauuccucaauaggugaaauaugcgacaguccucaucagauucuugauggagaaaacugcacacuaauagaugcucuauugggagacccucagugugauggcuuucaaaauaagaaaugggaccuuuuuguugaacgaagcaaagccuacagcaacuguuacccuuaugaugugccggauuaugccucccuuaggucacuaguugccucauccggcacacuggaguuuaacaaugaaagcuucaauuggacuggagucacucaaaacggaacaaguucugcuugcauaaggagaucuaauaguaguuucuuuaguagauuaaauugguugacccacuuaaacuucaaauacccagcauugaacgugacuaugccaaacaaugaacaauuugacaaauuguacauuugggggguucaccacccagguacggacaaggaccaaaucuuccuguaugcucaaucaucaggaagaaucacaguaucuaccaaaagaagccaacaagcuguaaucccaaauaucggaucuagacccagaauaaggaauaucccuagcagaauaagcaucuauuggacaauaguaaaaccgggagacauacuuuugauuaacagcacagggaaucuaauugcuccuagggguuacuucaaaauacgaagugggaaaagcucaauaaugagaucagaugcacccauuggcaaaugcaagucugaaugcaucacuccaaauggaagcauucccaaugacaaaccauuccaaaauguaaacaggaucacauacggggccugucccagauauguuaagcaaagcacucugaaauuggcaacaggaaugcgaaauguaccagagaaacaaacuagaggcauauuuggcgcaauagcagguuucauagaaaaugguugggagggaaugguggaugguugguacgguuucaggcaucaaaauucugagggaagaggacaagcagcagaucucaaaagcacccaagcagcaaucgaucaaaucaaugggaagcugaaucgauugaucgggaaaaccaacgagaaauuccaucagauugaaaaagaauucucagaaguagaagggagaauucaggaccuugagaaauauguugaggacacuaaaauagaucucuggucauacaacgcggagcuucuuguugccuuggagaaccaacauacaauugaucuaacugacucagaaaugaacaaacuguuugaaaaaacaaagaagcaacugagggaaaaugcugaggauaugggcaaugguuguuucaaaauauaccacaaaugugacaaugccugcauaggaucaauaagaaauggaacuuaugaccacaauguguacagggaugaagcauuaaacaaccgguuccagaucaagggaguugagcugaagucaggguacaaagauuggauccuauggauuuccuuugccauaucauguuuuuugcuuuguguugcuuuguugggguucaucaugugggccugccaaaagggcaacauuaggugcaacauuugcauuuaa

SEQ ID NO: 42033 - RNA, 1701 nt, Artificial Sequence
  derived and/or modified CDS sequence (wt) from hemagglutinin__InfluenzaA__AGL09766
augaagacuaucauugcuuugagcuacauucuaugucugguuuucgcucaaaaacuuccuggaaaugacaauagcacggcaacgcugugccuugggcaccaugcaguaccaaacggaacgauagugaaaacaaucacgaaugaccaaauugaaguuacuaaugcuacugagcugguucagaauuccucaauaggugaaauaugcgacaguccucaucagauccuugauggagaaaacugcacacuaauagaugcucuauugggagacccucagugugauggcuuucaaaauaagaaaugggaccuuuuuguugaacgaagcaaagccuacagcaacuguuacccuuaugaugugccggauuaugccucccuuaggucacuaguugccucauccggcacacuggaguuuaacaaugaaagcuucaauugggcuggagucacucaaaacggaacaaguucugcuugcauaaggggaucuaauaguaguuucuuuaguagauuaaauugguugacccacuuaaacuucaaguacccagcauugaacgugacuaugccaaauaaugaacaauuugacaaauuguacauuugggggguucaccacccggguacggacaaggaccaaaucuuccuguaugcucaaucaucaggaagaaucacaguaucuaccaaaagaagccaacaagcuguaaucccgaauaucggaucuagacccagaauaaggaauaucccuagcagaauaagcaucuauuggacaauaguaaaaccgggagacauacuuuugauuaacagcacagggaaucuaauugcuccuagggguuacuucaaaauacuaagugggaaaagcucaauaaugagaucagaugcacccauuggcaaaugcaagucugaaugcaucacuccaaauggaagcauucccaaugacaaaccauuccaaaauguaaacaggaucacauacggggccugucccagauauguuaagcaaagcacucugaaauuggcaacaggaaugcgaaauguaccagagaaacaaacuagaggcauauuuggcgcaauagcggguuucauagaaaaugguugggagggaaugguggaugguugguacgguuucaggcaucaaaauucugagggaagaggacaagcagcagaucucaaaagcacucaagcagcaaucgaucaaaucaaugggaagcugaaucgauugaucgggaaaaccaacgagaaauuccaucagauugagaaagaauucucagaaguagaagggagaauucaggaccuugagaaauauguugaggacacaaaaauagaucucuggucauacaacgcagagcuucuuguugcccuggagaaccaacauacaauugaucuaacugacucagaaaugaacaaacuguuugaaaaaacaaagaagcaacugagggaaaaugcugaggauaugggcaaugguuguuucaaaauauaccacaaaugugacaaugccugcauaggaucaaucagaaauggaacuuaugaccacgauguauacagggaugaagcauuaaacaaccgguuccagaucaagggaguugagcugaagucaggguacaaagauuggauccuauggauuuccuuugccauaucauguuuuuugcuuuguguugcuuuguugggguucaucaugugggccugccaaaagggcaacauuaggugcaacauuugcauuuga

SEQ ID NO: 42034 - RNA, 1701 nt, Artificial Sequence
  derived and/or modified CDS sequence (wt) from hemagglutinin__InfluenzaA__AGL09767
augaagaccaucauugcuuugagcuacauucuaugucugguuuucgcucaaaaacuuccuggaaaugacaauagcacggcaacgcugugccuugggcaccaugcaguaccaaacggaacgauagugaaaacaaucacgaaugaccgaauugaaguuacuaaugcuacugagcugguucagaauuccucaauaggugaaauaugcgacaguccucaucagauccuugauggagaaaacugcacacuaauagaugcucuauugggagacccucagugugauggcuuucaaaauaagaaaugggaccuuuuuguugaacgaagcaaagccuacagcaacuguuacccuuaugaugugccggauuaugccucccuuaggucacuaguugccucauccggcacacuggaguuuaacaaugaaagcuucaauugggcuggagucacucaaaacggaacaaguucugcuugcauaaggggaucuaauaguaguuucuuuaguagauuaaauugguugacccacuuaaacuucaaauacccagcauugaacgugacuaugccaaacaaugaacaauuugacaaauuguacauuugggggguucaccacccggguacggacaaggaccaaaucuuccuguaugcucaaucaucaggaagaaucacaguaucuaccaaaagaagccaacaagcuguaaucccgaauaucggaucuagacccagaauaaggaauaucccuagcagaauaagcaucuauuggacaauaguaaaaccgggggacauacuuuugauuaacagcacagggaaucuaauugcuccuagggguuacuucaaaauacgaagugggaaaagcucaauaaugagaucagaugcacccauuggcaaaugcaagucugaaugcaucacuccaaauggaagcauucccaaugacaaaccauuccaaaauguaaacaggaucacauacggggccugucccagauauguuaagcaaagcacucugaaauuggcaacaggaaugcgaaauguaccagagaaacaaacuagaggcauauuuggcgcaauagcggguuucauagaaaaugguugggagggaaugguggaugguugguacgguuucaggcaucaaaauucugagggaagaggacaagcagcagaucucaaaagcacucaagcagcaaucgaucaaaucaaugggaagcugaaucgauuaaucgggaaaaccaacgagaaauuccaucagauugaaaaagaauucucagaaguagaagggagaauucaggaccuugagaaauauguugaggacacaaaaauagaucucuggucauacaacgcggagcuucuuguugcccuggagaaccaacauacaauugaucuaacugacucagaaaugaacaaacuguuugaaaaaacaaagaagcaacugagggaaaaugcugaggauaugggcaaugguuguuucaaaauauaccacaaaugugacaaugccugcauaggaucaaucagaaauggaacuuaugaccacaauguauacagggaugaagcauuaaacaaccgguuccagaucaagggaguugagcugaagucaggguacaaagauuggauccuauggauuuccuuugccauaucauguuuuuugcuuuguguugcuuuguugggguucaucaugugggccugccaaaagggcaacauuaggugcaacauuugcauuuga

SEQ ID NO: 42035 - RNA, 1701 nt, Artificial Sequence
  derived and/or modified CDS sequence (wt) from hemagglutinin__InfluenzaA__AGL09769
augaagacuaucauugcuuugagcuacauucuaugucugguuuucgcucaaaaaauuccuggaaaugacaauagcacggcaacgcugugccuugggcaccaugcaguaccaaacggaacgauagugaaaacaaucacgaaugaccgaauugaaguuacuaaugcuacugagcugguucagaauuccucaauaggugaaauaugcgacaguccucaucagauccuugauggagaaaacuguacacuaauagaugcucuauugggagacccucagugugauggcuuucaaaauaagaaaugggaccuuuuuguugaacgaagcaaagccuacagcaacuguuacccuuaugaugugccggauuaugccucccuuaggucacuaguugccucauccggcacacuggaguuuaacaaugaaagcuucaauuggacuggagucacucaaaacggaacaaguucugcuugcauaaggggaucuaauaguaguuucuuuaguagauuaaauugguugacccacuuaaacuucaaauacccagcauugaacgugacuaugccaaacaaugaacaauuugacaaauuguacauuugggggguucaccacccggguacggacaaggaccaaaucuuccuguaugcucaaucaucaggaagaaucacaguaucuaccaaaagaagccaacaagcuguaaucccgaauaucggaucuagacccagaauaaggaauaucccuagcagaauaagcaucuauuggacaauaguaaaaccaggagacauacuuuugauuaacagcacagggaaucuaauugcuccuagggguuacuucaaaauaagaagugggaaaagcucaauaaugagaucagaugcacccauuggcaaaugcaagucugaaugcaucacuccaaauggaagcauuccaaaugacaaaccauuccaaaauguaaacaggaucacauacggggccugucccagauauguuaagcaaagcacucugaaauuggcaacaggaaugcgaaauguaccagagaaacaaacuagaggcauauuuggcgcaauagcggguuucauagaaaaugguugggagggaaugguggaugguugguacgguuucaggcaucaaaauucugagggaagaggacaagcagcagaucucaaaagcacucaagcagcaaucgaucaaaucaaugggaagcugaaucgauugaucgggaaaaccaacgagaaauuccaucagauugaaaaagaauucucagaaguagaagggagaauucaggaccuugagaaauauguugaggacacuaaaauagaucucuggucauacaacgcggagcuucuuguugcccuggagaaccaacauacaauugaucuaacugacucagaaaugaacaaacuguuugaaaaaacaaagaagcaacugagggaaaaugcugaggauaugggcaaugguuguuucaaaauauaccacaaaugugacaaugccugcauaggaucaaucagaaauggaacuuaugaccacgauguauacagggaugaagcauuaaacaaccgguuccagaucaagggaguugagcugaagucaggguacaaagauuggauccuauggauuuccuuugccauaucauguuuuuugcuuuguguugcuuuguugggguucaucaugugggccugccaaaagggcaacauuaggugcaacauuugcauuuga

SEQ ID NO: 42036 - RNA, 1701 nt, Artificial Sequence
  derived and/or modified CDS sequence (wt) from hemagglutinin__InfluenzaA__AGL09770
augaagacuaucauugcuuugagcuacauucuaugucugguuuucgcucaaaaacuuccuggaaaugacaauagcacggcaacgcugugccuugggcaccaugcaguaccaaacggaacgauagugaaaacaaucacgaaugaccgaauugaaguuacuaaugcuacugagcugguucagaauuccucaauaggugaaauaugcgacaguccucaucagauucuugauggagaaaacugcacacuaauagaugcucuauugggagacccucagugugauggcuuucaaaauaagaaaugggaccuuuuuguugaacgaagcaaagccuacagcaacuguuacccuuaugaugugccggauuaugccucccuuaggucacuaguugccucauccggcacacuggaguuuaacaaugaaagcuucaauuggacuggagucacucaaaacggaacaaguucugcuugcauaaggagaucuaauaguaguuucuuuaguagauuaaauugguugacccacuuaaacuucaaauacccagcauugaacgugacuaugccaaacaaugaacaauuugacaaauuguacauuugggggguucaccacccagguacggacaaggaccaaaucuuccuguaugcucaaucaucaggaagaaucacaguaucuaccaaaagaagccaacaagcuguaaucccaaauaucggaucuagacccagaauaaggaauaucccuagcagaauaagcaucuauuggacaauaguaaaaccgggagacauacuuuugauuaacagcacagggaaucuaauugcuccuagggguuacuucaaaauacgaagugggaaaagcucaauaaugagaucagaugcacccauuggcaaaugcaagucugaaugcaucacuccaaauggaagcauucccaaugacaaaccauuccaaaauguaaacaggaucacauacggggccugucccagauauguuaagcaaagcacucugaaauuggcaacaggaaugcgaaauguaccagagaaacaaacuagaggcauauuuggcgcaauagcagguuucauagaaaaugguugggagggaaugguggaugguugguacgguuucaggcaucaaaauucugagggaagaggacaagcagcagaucucaaaagcacccaagcagcaaucgaucaaaucaaugggaagcugaaucgauugaucgggaaaaccaacgagaaauuccaucagauugaaaaagaauucucagaaguagaagggagaauucaggaccuugagaaauauguugaggacacuaaaauagaucucuggucauacaacgcggagcuucuuguugcccuggagaaccaacauacaauugaucuaacugacucagaaaugaacaaacuguuugaaaaaacaaagaagcaacugagggaaaaugcugaggauaugggcaaugguuguuucaaaauauaccacaaaugugacaaugccugcauaggaucaauaagaaauggaacuuaugaccacaauguguacagggaugaagcguuaaacaaccgguuccagaucaagggaguugagcugaagucaggguacaaagauuggauccuauggauuuccuuugccauaucauguuuuuugcuuuguguugcuuuguugggguucaucaugugggccugccaaaagggcaacauuaggugcaacauuugcauuuga

SEQ ID NO: 42037 - RNA, 1701 nt, Artificial Sequence
  derived and/or modified CDS sequence (wt) from hemagglutinin__InfluenzaA__AGL09771
augaagacuaucauugcuuugagcuacauucuaugucugguuuucgcucaaaaacuuccuggaaaugacaauagcacggcaacgcugugccuugggcaccaugcaguaccaaacggaacgauagugaaaacaaucacgaaugaccgaauugaaguuacuaaugcuacugagcugguucagaauuccucaauaggugaaauaugcgacaguccucaucagauccuugauggagaaaacugcacacuaauagaugcucuauugggagacccucagugugauggcuuucaaaauaagaaaugggaccuuuuuguugaacgaagcaaagccuacagcaacuguuacccuuaugaugugccggauuaugccucccuuaggucacuaguugccucauccggcacacuggaguuuaacaaugaaagcuucaauugggcuggagucacucaaaacggaacaaguucugcuugcauaaggggaucuaauaguaguuucuuuaguagauuaaauugguugacccacuuaaacuucaaauacccagcauugaacgugacuaugccaaacaaugagcaauuugacaaauuguacauuugggggguucaccacccggguacggacaaggaccaaaucuuccuguaugcucaaucaucaggaagaaucacaguaucuaccaaaagaagccaacaagcuguaaucccgaauaucggaucuagacccagaauaaggaauaucccuagcagaauaagcaucuauuggacaauaguaaaaccgggagacauacuuuugauuaacagcacagggaaucuaauugcuccuagggguuacuucaaaauacgaagugggaaaagcucaauaaugagaucagaugcacccauuggcaaaugcaaaucugaauguaucacuccaaauggaagcauucccaaugacaaaccauuccaaaauguaaacaggaucacauacggggccugucccagauauguuaagcaaagcacucugaaauuggcaacaggaaugcgaaauguaccagagaaacaaacuagaggcauauuuggcgcaauagcggguuucauagaaaaugguugggagggaaugguggaugguugguacgguuucaggcaucaaaauucugagggaagaggacaagcagcagaucucaaaagcacucaagcagcaaucgaucaaaucaaugggaagcugaaucgauugaucgggaaaaccaacgagaaauuccaucagauugaaaaagaauucucagaaguagaagggagaauucaggaccuugagaaauauguugaggacacaaaaauagaucucuggucauacaacgcggagcuucuuguugcccuggagaaccaacauacaauugaucuaacugacucagaaaugaacaaacuguuugaaaaaacaaagaagcaacugagggaaaaugcugaggauaugggcaaugguuguuucaaaauauaccacaaaugugacaaugccugcauaggaucaaucagaaauggaacuuaugaccacgauauauacagggaugaagcauuaaacaaccgguuccagaucaagggaguugagcugaagucaggguacaaagauuggauccuauggauuuccuuugccauaucauguuuuuugcuuuguguugcuuuguugggguucaucaugugggccugccaaaagggcaacauuaggugcaacauuugcauuuga

SEQ ID NO: 42038 - RNA, 1701 nt, Artificial Sequence
  derived and/or modified CDS sequence (wt) from hemagglutinin__InfluenzaA__AGL09772
augaagacuaucauugcuuugagcuacauucuaugucugguuuucgcucaaaaacuuccuggaaaugacaacagcacggcaacgcugugccuugggcaccaugcagugccaaacggaacgauagugaaaacaaucacgaaugaccaaauugaaguuacuaaugcuacugagcugguucagaguuccucaacaggugaaauaugcaacaguccucaucagauccuugauggagaaaacugcacacuaauagaugcucuauugggagacccucagugugauggcuuccaaaacaagaaaugggaccuuuuuguugaacgaagcaaagcccacagcaacuguuaccccuaugaugugccggauuaugccucccuuaggucacuaguugccucauccggcacacuggaguuuaacaaugaaagcuucaauuggacuggagucacucaaaacggaacaagcucugcuugcauaaggagaucuaauaauaguuucuuuaguagauugaauugguugacccacuuaaacuucaaauacccagcauugaacgugacuaugccaaacaaugaacaauuugacaaauuguacauuuggggaguucaccacccggguacggacaaggaccaaaucuuccuguaugcucaagcagcaggaagaaucacaguaucuaccaaaagaagccaacaagcuguaauuccgaauaucggauccagacccaggguaaggaauaucccuagcagaguaagcaucuauuggacaauaguaaaaccgggagacauacuuuugauuaacagcacagggaaucuaauugcuccuagggguuacuucaaaauacgaagugggaaaagcucaauaaugagaucagaugcacccauuggcaaaugcaauucugcaugcaucacuccaaacggaagcauucccaaugacaaaccauuccaaaauguaaacaggaucacauacggggccugucccagauauguuaagcaaaacacucugaaauuggcaacaggaaugagaaauguaccagagaaacaaacuagaggcauauuuggcgcaauagcugguuucauagaaaaugguugggagggaaugguggaugguugguaugguuucaggcaucaaaauucugagggaaggggacaagcagcagaucucaaaagcacucaagcagcaaucgaucaaaucaaugggaagcugaauagauugaucgggaaaaccaacgagaaauuccaucagauugaaaaagaauucucagaagucgaagggagaauucaggaccuugagaaauauguugaggacacuaaaauagaucucuggucauacaacgcggagcuucuuguugcccuggagaaccaacacacaauugaucuaacugauucagaaaugaacaaacuguuugaaaaaacaaagaagcaacugagggaaaaugcugaggauaugggcaaugguuguuucaaaauauaccacaaaugugacaaugccugcauaggaucaaucagaaauggaacuuaugaccacuauguguacagagaugaagcauuaaacaaccgauuccagaucaagggaguugagcugaagucaggguacaaagauuggauccuauggauuuccuuugccacaucauguuuuuugcuuuguguugcuuuguugggguucaucaugugggccugccaaaaaggcaacauuaggugcaacauuugcauuuga

SEQ ID NO: 42039 - RNA, 1701 nt, Artificial Sequence
  derived and/or modified CDS sequence (wt) from hemagglutinin__InfluenzaA__AGL09773
augaagacuaucauugcuuugagcuacauucuaugucugguuuucgcucaaaaacuuccuggaaaugacaacagcacggcaacgcugugccuugggcaccaugcagugccaaacggaacgauagugaaaacaaucacgaaugaccaaauugaaguuacuaaugcuacugagcugguucagaguuccucaacaggugaaauaugcaacaguccucaucagauccuugauggagaaaacugcacacuaauagaugcucuauugggagacccucagugugauggcuuccaaaacaagaaaugggaccuuuuuguugaacgaagcaaagcccacagcaacuguuaccccuaugaugugccggauuaugccucccuuaggucacuaguugccucauccggcacacuggaguuuaacaaugaaagcuucaauuggacugaagucacucaaaacggaacaagcucugcuugcauaaggagaucuaauaauaguuucuuuaguagauugaauugguugacccacuuaaacuucaaauacccagcauugaacgugacuaugccaaacaaugaacaauuugacaaauuguacauuuggggaguucaccacccggguacggacaaggaccaaaucuuccuguaugcucaagcagcaggaagaaucacaguaucuaccaaaagaagccaacaagcuguaauuccgaauaucggauccagacccaggguaaggaauaucccuagcagaguaagcaucuauuggacaauaguaaaaccgggagacauacuuuugauuaacagcacagggaaucuaauugcuccuagggguuacuucaaaauacgaagugggaaaagcucaauaaugagaucagaugcacccauuggcaaaugcaauucugcaugcaucacuccaaacggaagcauucccaaugacaaaccauuccaaaauguaaacaggaucacauacggggccugucccagauauguuaagcaaaacacucugaaauuggcaacaggaaugagaaauguaccagagaaacaaacuagaggcauauuuggcgcaauagcugguuucauagaaaaugguugggagggaaugguggaugguugguaugguuucaggcaucaaaauucugagggaaggggacaagcagcagaucucaaaagcacucaagcagcaaucgaucaaaucaaugggaagcugaauagauugaucgggaaaaccaacgagaaauuccaucagauugaaaaagaauucucagaagucgaagggagaauucaggaccuugagaaauauguugaggacacuaaaauagaucucuggucauacaacgcggagcuucuuguugcccuggagaaccaacacacaauugaucuaacugauucagaaaugaacaaacuguuugaaaaaacaaagaagcaacugagggaaaaugcugaggauaugggcaaugguuguuucaaaauauaccacaaaugugacaaugccugcauaggaucaaucagaaauggaacuuaugaccacuauguguacagagaugaagcauuaaacaaccgauuccagaucaagggaguugagcugaagucaggguacaaagauuggauccuauggauuuccuuugccacaucauguuuuuugcuuuguguugcuuuguugggguucaucaugugggccugccaaaaaggcaacauuaggugcaacauuugcauuuga

SEQ ID NO: 42040 - RNA, 1701 nt, Artificial Sequence; identical to SEQ ID NO: 42038
  derived and/or modified CDS sequence (wt) from hemagglutinin__InfluenzaA__AGL09774

SEQ ID NO: 42041 - RNA, 1701 nt, Artificial Sequence
  derived and/or modified CDS sequence (wt) from hemagglutinin__InfluenzaA__AGL09775
augaagacuaucauugcuuugagcuacauucuaugucugguuuucgcucaaaaacuuccuggaaaugacaauagcacggcaacgcugugccuugggcaccaugcaguaccaaacggaacgauagugaaaacaaucacgaaugaccgaauugaaguuacuaaugcuacugagcugguucagaauuccucaauaggugaaauaugcgacaguccucaucagauccuugauggagaaaacugcacacuaauagaugcucuauugggagacccucagugugauggcuuucaaaauaagaaaugggaccuuuuuguugaacgaagcaaagccuacagcaacuguuacccuuaugaugugccggauuaugccucccuuaggucacuaguugccucauccggcacacuggaguuuaacaaugaaagcuucaauugggcuggagucacucaaaacggaacaaguucugcuugcauaaggggaucuaauaguaguuucuuuaguagauuaaauugguugacccacuuaaacuucaaauacccagcauugaacgugacuaugccaaacaaugaacaauuugacaaauuguacauuugggggguucaccacccggguacggacaaggaccaaaucuuccuguaugcucaaucaucaggaagaaucacaguaucuaccaaaagaagccaacaagcuguaaucccgaauaucggaucuagacccagaauaaggaauaucccuagcagaauaagcaucuauuggacaauaguaaaaccgggagacauacuuuugauuaacagcacagggaaucuaauugcuccuagggguuacuucaaaauacgaagugggaaaagcucaauaaugagaucagaugcacccauuggcaaaugcaagucugaaugcaucacuccaaauggaagcauucccaaugacaaaccauuccaaaauguaaacaggaucacauauggggccugucccagauauguuaagcaaagcacucugaaauuggcaacaggaaugcgaaauguaccagagaaacaaacuagaggcauauuuggcgcaauagcggguuucauagaaaaugguugggagggaaugauggaugguugguacgguuucaggcaucaaaauucugagggaagaggacaagcagcagaucucaaaagcacucaagcagcaaucgaucaaaucaaugggaagcugaaucgauugaucgggaaaaccaacgagaaauuccaucagauugaaaaagaauucucagaaguagaagggagaauucaggaccuugagaaauauguugaggacacaaaaauagaucucuggucauacaacgcggagcuucuuguugcccuggagaaccaacauacaauugaucuaacugacucagaaaugaacaaacuguuugaaaaaacaaagaagcaacugagggaaaaugcugaggauaugggcaaugguuguuucaaaauauaccacaaaugugacaaugccugcauaggaucaaucagaaauggaacuuaugaccacgauguauacagggaugaagcauuaaacaaccgguuccagaucaagggaguugagcugaagucaggguacaaagauuggauccuauggauuuccuuugccauaucauguuuuuugcucuguguugcuuuguugggguucaucaugugggccugccaaaagggcaacauuaggugcaacauuugcauuuga

SEQ ID NO: 42042 - RNA, 1701 nt, Artificial Sequence; identical to SEQ ID NO: 42038
  derived and/or modified CDS sequence (wt) from hemagglutinin__InfluenzaA__AGL09776

SEQ ID NO: 42043 - RNA, 1701 nt, Artificial Sequence; identical to SEQ ID NO: 42038
  derived and/or modified CDS sequence (wt) from hemagglutinin__InfluenzaA__AGL09777

SEQ ID NO: 42044 - RNA, 1701 nt, Artificial Sequence
  derived and/or modified CDS sequence (wt) from hemagglutinin__InfluenzaA__AGL09778
augaagacuaucauugcuuugagcuacauucuaugucugauuuucgcucaaaaacuuccuggaaaugacaauagcacggcaacgcugugccuugggcaccaugcaguaccaaacggaacgauagugaaaacaaucacgaaugaccgaauugaaguuacuaaugcuacugagcugguucagaauuccucaauaggugaaauaugcgacaguccucaucagauccuugauggagaaaacugcacauuaauagaugcucuauugggagacccucagugugauggcuuucaaaauaagaaaugggaccuuuuuguugaacgaagcaaagccuacagcaacuguuacccuuaugaugugccggauuaugccucccuuaggucacuaguugccucauccggcacacuggaguuuaacaaugaaagcuucaauugggcuggagucacucaaaacggaacaaguucugcuugcauaaggggaucuaauaguaguuucuuuaguagauuaaauugguugacccacuuaaacuucaaauacccagcauugaacgugacuaugccaaacaaugaacaauuugacaaauuguacauuugggggguucaccacccggguacggacaaggaccaaaucuuccuguaugcucaaucaucaggaagaaucacaguaucuaccaaaagaagccaacaagcuguaaucccgaauaucggaucuagacccagaauaaggaauaucccuagcagaauaagcaucuauuggacaauaguaaaaccgggagacauacuuuugauuaacagcacagggaaucuaauugcuccuagggguuacuucaaaauacgaagugggaaaagcucaauaaugagaucagaugcacccauuggcaaaugcaagucugaaugcaucacuccaaauggaagcauucccaaugacaaaccauuccaaaauguaaacaggaucacauacggggccugucccagauauguuaagcaaagcacucugaaauuggcaacaggaaugcgaaauguaccagagaaacaaacuagaggcauauuuggcgcaauagcggguuucauagaaaaugguugggagggaaugauggaugguugguacgguuucaggcaucaaaauucugagggaagaggacaagcagcagaucucaaaagcacucaagcagcaaucgaucaaaucaaugggaagcugaaucgauugaucgggaaaaccaacgagaaauuccaucagauugaaaaagaauucucagaaguagaagggagaauucaggaccuugagaaauauguugaggacacaaaaauagaucucuggucauacaacgcggagcuucuuguugcccuggagaaccaacauacaauugaucuaacugacucagaaaugaacaaacuguuugaaaaaacaaagaagcaacugagggaaaaugccgaggauaugggcaaugguuguuucaaaauauaccacaaaugugacaaugccugcauaggaucaaucagaaauggaacuuaugaccacgauguauacagggaugaagcauuaaacaaccgguuccagaucaagggaguugagcugaagucaggguacaaagauuggauccuauggauuuccuuugccauaucauguuuuuugcuuuguguugcuuuguugggguucaucaugugggccugccaaaagggcaacauuaggugcaacauuugcauuuga

SEQ ID NO: 42045 - RNA, 1701 nt, Artificial Sequence
  derived and/or modified CDS sequence (wt) from hemagglutinin__InfluenzaA__AGL09779
augaagacuaucauugcuuugagcuacauucuaugucugguuuucgcucaaaaacuuccuggaaauaacaauagcacggcaacgcugugccuugggcaccaugcaguaccaaacggaacgauagugaaaacaaucacgaaugaccgaauugaaguuacuaaugcuacugagcugguucagaauuccucaauaggugaaauaugcgacaguccucaucagauccuugauggagaaaacugcacacuaauagaugcucuauugggagacccucagugugauggcuuucaaaauaagaaaugggaccuuuuuguugaacgaagcaaagccuacagcaacuguuacccuuaugaugugccggauuaugccucccuuaggucacuaguugccucauccggcacacuggaguuuaacaaugaaagcuucaauugggcuggagucacucaaaacggaacaaguucugcuugcauaaggggaucuaauaguaguuucuuuaguagauuaaauugguugacccacuuaaacuucaaauacccagcauugaacgugacuaugccaaacaaugagcaauuugacaaauuguacauuugggggguccaccacccggguacggacaaggaccaaaucuuccuguaugcucaaucaucaggaagaaucacaguaucuaccaaaagaagccaacaagcuguaaucccgaauaucggaucuagacccagaauaaggaauaucccuagcagaauaagcaucuauuggacaauaguaaaaccgggagacauacuuuugauuaacagcacagggaaucuaauugcuccuagggguuacuucaaaauacgaagugggaaaagcucaauaaugagaucagaugcacccauuggcaaaugcaaaucugaauguaucacuccaaauggaagcauucccaaugacaaaccauuccaaaauguaaacaggaucacauacggggccugucccagauauguuaagcaaagcacucugaaauuggcaacaggaaugcgaaauguaccagagaaacaaacuagaggcauauuuggcgcaauagcggguuucauagaaaaugguugggagggaaugguggaugguugguacgguuucaggcaucaaaauucugagggaagaggacaagcagcagaucucaaaagcacucaagcagcaaucgaucaaaucaaugggaagcugaaucgauugaucgggaaaaccaacgagaaauuccaucagauugaaaaagaauucucagaaguagaagggagaauucaggaccuugagaaauauguugaggacacaaaaauagaucucuggucauacaacgcggagcuucuuguugcccuggagaaccaacauacaauugaucuaacugacucagaaaugaacaaacuguuugaaaaaacaaagaagcaacugagggaaaaugcugaggauaugggcaaugguuguuucaaaauauaccacaaaugugacaaugccugcauaggaucaaucagaaauggaacuuaugaccacgauguauacagggaugaagcauuaaacaaccgguuccagaucaagggaguugagcugaagucaggguacaaagauuggauccuauggauuuccuuugccauaucauguuuuuugcuuuguguugcuuuguugggguucaucaugugggccugccaaaagggcaacauuaggugcaacauuugcauuuga

SEQ ID NO: 42046 - RNA, 1701 nt, Artificial Sequence
  derived and/or modified CDS sequence (wt) from hemagglutinin__InfluenzaA__AGL09780
augaagacuaucauugcuuugagcuacauucuaugucugguuuucgcucaaaaacuuccuggaaaugacaauagcacggcaacgcugugccuugggcaccaugcaguaccaaacggaacgauagugaaaacaaucacgaaugaccgaauugaaguuacuaaugcuacugagcugguucagaauuccucaauaggugaaauaugcgacaguccucaucagauccuugauggagaaaacugcacacuaauagaugcucuauugggagacccucagugugauggcuuucaaaauaagaaaugggaccuuuuuguugaacgaagcaaagccuacagcaacuguuacccuuaugaugugccggauuaugccucccuuaggucacuaguugccucauccggcacacuggaguuugacaaugaaagcuucaauugggcuggagucacucaaaacggaacaaguucugcuugcauaaggggaucuaauaguaguuucuuuaguagauuaaauugguugacccacuuaaacuucaaauacccagcauugaacgugacuaugccaaacaaugagcaauuugacaaauuguacauuugggggguccaccacccagguacggacaaggaccaaaucucccuguaugcucaaucaucaggaagaaucacaguaucuaccaaaagaagccaacaagcuguaaucccgaauaucggaucuagacccagaauaaggaauaucccuagcagaauaagcaucuauuggacaauaguaaaaccgggagacauacuuuugauuaacagcacagggaaucuaauugcuccuagggguuacuucaaaauacgaagugggaaaagcucaauaaugagaucagaugcacccauuggcaaaugcaaaucugaauguaucacuccaaauggaagcauucccaaugacaaaccauuccaaaauguaaacaggaucacauacggggccugucccagauauguuaagcaaagcacucugaaauuggcaacaggaaugcgaaauguaccagagaaacaaacuagaggcauauuuggugcaauagcggguuucauagaaaaugguugggagggaaugguggaugguugguacgguuucaggcaucaaaauucugagggaagaggacaagcagcagaucucaaaagcacucaagcagcaaucgaucaaaucaaugggaagcugaaucgauugaucgggaaaaccaacgagaaauuccaucagauugaaaaagaauucucagaaguagaagggagaauucaggaccuugagaaauauguugaggacacaaaaauagaucucuggucauacaacgcggagcuucuuguugcccuggagaaccaacauacaauugaucuaacugacucagaaaugaacaaacuguuugaaaaaacaaagaagcaacugagggaaaaugcugaggauaugggcaaugguuguuucaaaauauaccacaaaugugacaaugccugcauaggaucaaucagaaauggaacuuaugaccacgauguauacagggaugaagcauuaaacaaccgguuccagaucaagggaguugagcugaagucaggguacaaagauuggauccuauggauuuccuuugccauaucauguuuuuugcuuuguguugcuuuguugggguucaucaugugggccugccaaaagggcaacauuaggugcaacauuugcauuuga

SEQ ID NO: 42047 - RNA, 1701 nt, Artificial Sequence
  derived and/or modified CDS sequence (wt) from hemagglutinin__InfluenzaA__AGL09781
augaagacuaucauugcuuugagcuacauucuaugucugguuuucgcucaaaaaauuccuggaaaugacaauagcacggcaacgcugugccuugggcaccaugcaguaccaaacggaacgauagugaaaacaaucacgaaugaccgaauugaaguuacuaaugcuacugagcugguucagaauuccucaauaggugaaauaugcgacaguccucaucagauccuugauggagaaaacuguacacuaauagaugcucuauugggagacccucagugugauggcuuucaaaauaagaaaugggaccuuuuuguugaacgaagcaaagccuacagcaacuguuacccuuaugaugugccggauuaugccucccuuaggucacuaguugccucauccggcacacuggaguuuaacaaugaaagcuucaauuggacuggagucacucaaaacggaacaaguucugcuugcauaaggagaucuaauaguaguuucuuuaguagauuaaauugguugacccacuuaaacuucaaauacccagcauugaacgugacuaugccaaacaaugaacaauuugacaaauuguacauuugggggguucaccacccggguacggacaaggaccaaaucuuccuguaugcucaaucaucaggaagaaucacaguaucuaccaaaagaagccaacaagcuguaaucccgaauaucggaucuagacccagaauaaggaauaucccuagcagaauaagcaucuauuggacaauaguaaaaccaggagacauacuuuugauuaacagcacagggaaucuaauugcuccuagggguuacuucaaaauaagaagugggaaaagcucaauaaugagaucagaugcacccauuggcaaaugcaagucugaaugcaucacuccaaauggaagcauuccaaaugacaaaccauuccaaaauguaaacaggaucacauacggggccugucccagauauguuaagcaaagcacucugaaauuggcaacaggaaugcgaaauguaccagagaaacaaacuagaggcauauuuggcgcaauagcgggcuucauagaaaaugguugggagggaaugguggaugguugguacgguuucaggcaucaaaauucugagggaagaggacaagcagcagaucucaaaagcacucaagcagcaaucgaucaaaucaaugggaagcugaaucgauugaucgggaaaaccaacgagaaauuccaucagauugaaaaagaauucucagaaguagaagggagaauucaggaccuugagaaauauguugaggacacuaaaauagaucucuggucauacaacgcggagcuucuuguugcccuggagaaccaacauacaauugaucuaacugacucagaaaugaacaaacuguuugaaaaaacaaagaagcaacugagggaaaaugcugaggauaugggcaaugguuguuucaaaauauaccacaaaugugacaaugccugcauaggaucaaucagaaauggaacuuaugaccacgauguauacagggaugaagcauuaaacaaccgguuccagaucaagggaguugagcugaagucaggguacaaagauuggauccuauggauuuccuuugccauaucauguuuuuugcuuuguguugcuuuguugggguucaucaugugggccugccaaaagggcaacauuaggugcaacauuugcauuuga

SEQ ID NO: 42048 - RNA, 1701 nt, Artificial Sequence
  derived and/or modified CDS sequence (wt) from hemagglutinin__InfluenzaA__AGL09782
augaagacuaucauugcuuugagcuacauucuaugucugguuuucgcucaaaaacuuccuggaaaugacaauagcacggcaacgcugugccuugggcaccaugcaguaccaaacggaacgauagugaaaacaaucacgaaugaccgaauugaaguuacuaaugcuacugagcugguucagaauuccucaauaggugaaauaugcgacaguccucaucagauucuugauggagaaaacugcacacuaauagaugcucuauugggagacccucagugugauggcuuucaaaauaagaaaugggaccuuuuuguugaacgaagcaaagccuacagcaacuguuacccuuaugaugugccggauuaugccucccuuaggucacuaguugccucauccggcacacuggaguuuaacaaugaaagcuucaauuggacuggagucacucaaaacggaacaaguucugcuugcauaaggagaucuaauaguaguuucuuuaguagauuaaauugguugacccacuuaaacuucaaauacccagcauugaacgugacuaugccaaacaaugaacaauuugacaaauuguacauuugggggguucaccacccggguacggacaaggaccaaaucuuccuguaugcucaaucaucaggaagaaucacaguaucuaccaaaagaagccaacaagcuguaaucccaaauaucggaucuagacccagaauaaggaauauuccuagcagaauaagcaucuauuggacaauaguaaaaccgggagacauacuuuugauuaacagcacagggaaucuaauugcuccuagggguuacuucaaaauacgaagugggaaaagcucaauaaugagaucagaugcacccauuggcaaaugcaagucugaaugcaucacuccaaauggaagcauucccaaugacaaaccauuccaaaauguaaacaggaucacauacggggccugucccagauauguuaagcaaagcacucugaaauuggcaacaggaaugcgaaauguaccagagaaacaaacuagaggcauauuuggcgcaauagcagguuucauagaaaaugguugggaggggaugguggaugguugguacgguuucaggcaucaaaauucugagggaagaggacaagcagcagaucucaaaagcacccaagcagcaaucgaucaaaucaaugggaagcugaaucgauugaucgggaaaaccaacgagaaauuccaucagauugaaaaagaauucucagaaguagaagggagaauucaggaccuugagaaauauguugaggacacuaaaauagaucucuggucauacaacgcggagcuucuuguugcccuggagaaccaacauacaauugaucuaacugacucagaaaugaacaaacuguuugaaaaaacaaagaagcaacugagggaaaaugcugaggauaugggcaaugguuguuucaaaauauaccacaaaugugacaaugccugcauaggaucaauaagaaauggaacuuaugaccacaauguguacagggaugaagcauuaaacaaccgguuccagaucaagggaguugagcugaagucaggguacaaagauuggauccuauggauuuccuuugccauaucauguuuuuugcuuuguguugcuuuguugggguucaucaugugggccugccaaaagggcaacauuaggugcaacauuugcauuuga

SEQ ID NO: 42049 - RNA, 1701 nt, Artificial Sequence
  derived and/or modified CDS sequence (wt) from hemagglutinin__InfluenzaA__AGL09783
augaagacuaucauugcuuugagcuacauucuaugucugguuuucgcucaaaaacucccuggaaaugacaauagcacggcaacgcugugccuugggcaccaugcaguaccaaacggaacgguagugaaaacaaucacgaaugaccgaauugaaguuacuaaugcuacugagcugguucagaauuccucaauaggugaaauaugcgacaguccucaucagauccuugauggagaaaacugcacacuaauagaugcucuauugggagacccccagugugauggcuuccaaaauaagaaaugggaccuuuuuguugaacgaagcaaagccuacagcaacuguuacccuuaugaugugccggauuaugccucccuuaggucacuaguugccucauccggcacacuggaguuuaacaaugaaagcuucaauuggacuggagucacucaaaacggaacaaguucugcuugcauaaggagaucuaauaauaguuucuuuaguagauuaaauuggcugacccacuuaaacuucaaauacccagcauugaacgugacuaugccaaacaaugaacaauuugacaaauuguacauuugggggguucaccacccggguacggacaaggaccaaaucuuccuguaugcucaaucaucaggaagaaucacaguaucuaccaaaagaagccaacaagcuguaaucccgaauaucggaucuagacccagaauaaggaauaucccuagcaggauaagcaucuauuggacaauaguaaaaccgggagacauacuuuugauuaacagcacagggaaucuaauugcuccuagggguuacuucaaaauacgaagugggaaaagcucaauaaugagaucagaugcacccauuggcaaaugcaagucugaaugcaucacuccaaauggaagcauucccaaugacaaaccauuccaaaauguaaacaggaucacauacggggccugucccagauauguuaagcaaagcacucugaaauuggcaacaggaaugcgaaauguaccagagaaacaaacuagaggcauauuuggcgcaauagcggguuucauagaaaaugguugggagggaaugguggaugguugguacgguuucaggcaucaaaauucugagggaagaggacaagcagcagaucucaaaagcacucaagcagcaaucgaucaaaucaaugggaagcugaaucgauugaucgggaaaaccaacgagaaauuccaucagauugaaaaagaauucucagaaguagaagggagaacucagaaccuugagaaauauguugaggacacuaaaauagaucucuggucauacaaugcggagcuucuuguugcccuggagaaccaacauacaauugaucuaacugacucagaaaugaacaaacuguuugaaaaaacaaagaaacaacugagggaaaaugcugaggauaugggcaaugguuguuucaaaauauaccacaaaugugacaaugccugcauaggaucaaucagaaauggaacuuaugaccacgauguauacagagaugaagcauuaaacaaccgguuccagauuaagggaguugagcugaagucaggguacaaagauuggauccuauggauuuccuuugccauaucauguuuuuugcuuuguguuguuuuguugggguucaucaugugggccugccaaaagggcaacauuaggugcaacauuugcauuuga

SEQ ID NO: 42050 - RNA, 1701 nt, Artificial Sequence; identical to SEQ ID NO: 41880
  derived and/or modified CDS sequence (wt) from hemagglutinin__InfluenzaA__AGL09785

SEQ ID NO: 42051 - RNA, 1701 nt, Artificial Sequence
  derived and/or modified CDS sequence (wt) from hemagglutinin__InfluenzaA__AGL09786
augaagacuaucauugcuuugagcuacauucuaugucugguuuucgcucaaaaacuuccuggaaaugacaauagcacggcaacgcugugccuugggcaccaugcaguaccaaacggaacgauagugaaaacaaucacgaaugaccgaauugaaguuacuaaugcuacugagcugguucagaauuccucaauaggugaaauaugcgacaguccucaucagauccuugauggagaaaacugcacacuaauagaugcucuauugggagacccucagugugauggcuuucaaaauaagaaaugggaccuuuuugucgaacgaagcaaagccuacagcaacuguuacccuuaugaugugccggauuaugccucccuuaggucacuaguugccucauccggcacacuggaguuugacaaugaaagcuucaauugggcuggagucacucaaaacggaacaaguucugcuugcauaaggggaucuaagaguaguuucuuuaguagauuaaauugguugacccacuuaaacuucaaauacccagcauugaacgugacuaugccaaacaaugagcaauuugacaaauuguacauuugggggguccaccacccagguacggacaaggaccaaaucucccuguaugcucaaucaucaggaagaaucacaguaucuaccaaaagaagccaacaagcuguaaucccgaauaucggaucuagacccagaauaaggaauaucccuagcagaauaagcaucuauuggacaauaguaaaaccgggagacauacuuuugauuaacagcacagggaaucuaauugcuccuagggguuacuucaaaauacgaagugggaaaagcucaauaaugagaucagaugcacccauuggcaaaugcaaaucugaauguaucacuccaaauggaagcauucccaaugacaaaccauuccaaaauguaaacaggaucacauacggggccugucccagauauguuaagcaaagcacucugaaauuggcaacaggaaugcgaaauguaccagagaaacaaacuagaggcauauuuggugcaauagcggguuucauagaaaaugguugggagggaaugguggaugguugguacgguuucaggcaucaaaauucugagggaagaggacaagcagcagaucucaaaagcacucaagcagcaaucgaucaaaucaaugggaagcugaaucgauugaucgggaaaaccaacgagaaauuccaucagauugaaaaagaauucucagaaguagaagggagaauucaggaccuugagaaauauguugaggacacaaaaauagaucucuggucauacaacgcggagcuucuuguugcccuggagaaccaacauacaauugaucuaacugacucagaaaugaacaaacuguuugaaaaaacaaagaagcaacugagggaaaaugcugaggauaugggcaaugguuguuucaaaauauaccacaaaugugacaaugccugcauaggaucaaucagaaauggaacuuaugaccacgauguauacagggaugaagcauuaaacaaccgguuccagaucaagggaguugagcugaagucaggguacaaagauuggauccuauggauuuccuuugccauaucauguuuuuugcuuuguguugcuuuguugggguucaucaugugggccugccaaaagggcaacauuaggugcaacauuugcauuuga

SEQ ID NO: 42052 - RNA, 1701 nt, Artificial Sequence
  derived and/or modified CDS sequence (wt) from hemagglutinin__InfluenzaA__AGL09787
augaaggcaauacuaguaguucugcuauauacauuugcaaccgcaaaugcagacacauuauguauagguuaucaugcgaacaauucaacagacacuguagacacaguacuagaaaagaauguaacaguaacacacucuguuaaucuucuagaagacaagcauaacgggaaacuaugcaaacuaagagggguagccccauugcauuuggguaaauguaacauugcuggcuggauccugggaaauccagagugugaaucacucuccacagcaaguucaugguccuacauuguggaaacaucuaguucagacaauggaacguguuacccaggagauuucaucaauuaugaggagcuaagagagcaauugagcucagugucaucauuugaaagguuugagauauuccccaagacaaguucauggcccaaucaugacucgaacaaagguguaacggcagcauguccucacgcuggagcaaaaagcuucuacaaaaauuuaauauggcuaguuaaaaaaggaaauucauacccaaagcucagccaauccuacauuaaugauaaagggaaagaaguccucgugcuguggggcauccaccauccaucuacuacugcugaccaacaaagucucuaucagaaugcagaugcauauguuuuuguggggacaucaagauacagcaaaaaguucaagccggaaauagcaauaagacccaaagugagggaucaagaagggagaaugaacuauuacuggacacuaguagagccgggagacaaaauaacguucgaagcaacuggaaaucuagugguaccgagauaugcauucacaauggaaagaaaugcuggaucugguauuaucauuucagauacaccaguccacgauugcaauacaacuugucagacacccgagggugcuauaaacaccagccucccauuucagaacauacauccgaucacaauuggaaaauguccaaaguauguaaaaagcacaaaauugagacuggccacaggauugaggaaugucccgucuauucaaucuagaggccuauucggggccauugccggcuucauugaagggggguggacagggaugguagauggaugguacgguuaucaccaucaaaaugagcaggggucaggauaugcagccgaccugaagagcacacaaaaugccauugacaagauuacuaacaaaguaaauucuguuauugaaaagaugaauacacaguucacagcaguggguaaagaguucaaccaccuggaaaaaagaauagagaauuuaaauaaaaaaguugaugaugguuuccuggacauuuggacuuacaaugccgaacuguugguucuauuggaaaaugaaagaacuuuggacuaccacgauucaaaugugaagaacuuguaugaaaagguaagaaaccaguuaaaaaacaaugccaaggaaauuggaaacggcugcuuugaauuuuaccacaaaugcgauaacacgugcauggaaagugucaaaaaugggacuuaugacuacccaaaauacucagaggaagcaaaauuaaacagagaaaaaauagaugggguaaagcuggaaucaacaaggauuuaccagauuuuggcgaucuauucaacugucgccaguucauugguacugguagucucccugggggcaaucagcuucuggaugugcucuaaugggucucuacaauguagaauauguauuuaa

SEQ ID NO: 42053 - RNA, 1701 nt, Artificial Sequence; identical to SEQ ID NO: 42052
  derived and/or modified CDS sequence (wt) from hemagglutinin__InfluenzaA__AGL09788

SEQ ID NO: 42054 - RNA, 1701 nt, Artificial Sequence; identical to SEQ ID NO: 42052
  derived and/or modified CDS sequence (wt) from hemagglutinin__InfluenzaA__AGL09789

SEQ ID NO: 42055 - RNA, 1701 nt, Artificial Sequence
  derived and/or modified CDS sequence (wt) from hemagglutinin__InfluenzaA__AGL09790
augaagacuaucauugcuuugagcuacauucuaugucugguuuucgcucaaaaacuuccuggaaaugacaauagcacggcaacgcugugccuugggcaccaugcaguaccaaacggaacgauagugaaaacaaucacgaaugaccgaauugaaguuacuaaugcuacugagcugguucagaauuccucaauaggugaaauaugcgacaguccucaucagauccuugauggagaaaacugcacacuaauagaugcucuauugggagacccucagugugauggcuuucaaaauaagaaaugggaccuuuuuguugaacgaagcaaagccuacagcaacuguuacccuuaugaugugccggauuaugccucccuuaggucacuaguugccucauccggcacacuggaguuuaacaaugaaagcuucaauugggcuggagucacucaaaacggaacaaguucugcuugcauaaggggaucuaauaguaguuucuuuaguagauuaaauugguugacccacuuaaacuucaaauacccagcauugaacgugacuaugccaaacaaugagcaauuugacaaauuguacauuugggggguccaccacccggguacggacaaggaccaaaucuuccuguaugcucaaucaucaggaagaaucacaguaucuaccaaaagaagccaacaagcuguaaucccgaauaucggaucuagacccagaauaaggaauaucccuagcagaauaagcaucuauuggacaauaguaaaaccgggagacauacuuuugauuaacagcacagggaaucuaauugcuccuagggguuacuucaaaauacgaagugggaaaagcucaauaaugagaucagaugcacccauuggcaaaugcaaaucugaauguaucacuccaaauggaagcauucccaaugacaaaccauuccaaaauguaaacaggaucacauacggggccugucccagauauguuaagcaaagcacucugaaauuggcaacaggaaugcgaaauguaccagagaaacaaacuagaggcauauuuggcgcaauagcggguuucauagaaaaugguugggagggaaugguggaugguugguacgguuucaggcaucaaaauucugagggaagaggacaagcagcagaucucaaaagcacucaagcagcaaucgaucaaaucaaugggaagcugaaucgauugaucgggaaaaccaacgagaaauuccaucagauugaaaaagaauucucagaaguagaagggagaauucaggaccuugagaaauauguugaggacacaaaaauagaucucuggucauacaacgcggagcuucuuguugcccuggagaaccaacauacaauugaucuaacugacucagaaaugaacaaacuguuugaaaaaacaaagaagcaacugagggaaaaugcugaggauaugggcaaugguuguuucaaaauauaccacaaaugugacaaugccugcauaggaucaaucagaaauggaacuuaugaccacgauguauacagggaugaagcauuaaacaaccgguuccagaucaagggaguugagcugaagucaggguacaaagauuggauccuauggauuuccuuugccauaucauguuuuuugcuuuguguugcuuuguugggguucaucaugugggccugccaaaagggcaacauuaggugcaacauuugcauuuga

SEQ ID NO: 42056 - RNA, 1701 nt, Artificial Sequence
  derived and/or modified CDS sequence (wt) from hemagglutinin__InfluenzaA__AGL09791
augaagacuaucauugcuuugagcuacauucuaugucugguuuucgcucaaaaacuuccuggaaaugacaauagcacggcaacgcugugccuugggcaccaugcaguaccaaacggaacgauagugaaaacaaucacgaaugaccgaauugaaguuacuaaugcuacugagcugguucagaauuccucaauaggugaaauaugcgacaguccucaucagauucuugauggagaaaacugcacacuaauagaugcucuauugggagacccucagugugauggcuuucaaaauaagaaaugggaccuuuuuguugaacgaagcaaagccuacagcaacuguuacccuuaugaugugccggauuaugccucccuuaggucacuaguugccucauccggcacacuggaguuuaacaaugaaagcuucaauuggacuggagucacucaaaacggaacaaguucugcuugcauaaggagaucuaauaguaguuucuuuaguagauuaaauugguugacccacuuaaacuucaaauacccagcauugaacaugacuaugccaaacaaugaacaauuugacaaauuguacauuugggggguucaccacccggguacggacaaggaccaaaucucccuguaugcucaaucaucaggaagaaucacaguaucuaccaaaagaagccaacaagcuguaaucccaaauaucggaucuagacccagaauaaggaauauuccuagcagaauaagcaucuauuggacaauaguaaaaccgggagacauacuuuugauuaacagcacagggaaucuaauugcuccuagggguuacuucaaaauacgaagugggaaaagcucaauaaugagaucagaugcacccauuggcaaaugcaagucugaaugcaucacuccaaauggaagcauucccaaugacaaaccauuccaaaauguaaacaggaucacauacggggccugucccagauauguuaagcaaagcacucugaaauuggcaacaggaaugcgaaauguaccagagaaacaaacuagaggcauauuuggcgcaauagcaggcuucauagaaaaugguugggaggggaugguggaugguugguacgguuucaggcaucaaaauucugagggaagaggacaagcagcagaucucaaaagcacccaagcagcaaucgaucaaaucaaugggaagcugaaucgauugaucgggaaaaccaacgagaaauuccaucagauugaaaaagaauucucagaaguagaagggagaauucaggaccuugagaaauauguugaggacacuaaaauagaucucuggucauacaacgcggagcuucuuguugcccuggagaaccaacauacaauugaucuaacugacucagaaaugaacaaacuguuugaaaaaacaaagaagcaacugagggaaaaugcugaggauaugggcaaugguuguuucaaaauauaccacaaaugugacaaugccugcauaggaucaauaagaaauggaacuuaugaccacaauguguacagggaugaagcauuaaacaaccgguuccagaucaagggaguugagcugaagucaggguacaaagauuggauccuauggauuuccuuugccauaucauguuuuuugcuuuguguugcuuuguugggguucaucaugugggccugccaaaagggcaacauuaggugcaacauuugcauuuga
